United States Patent Application Publication US 2007/0054278 A1 - sequence listing, part 73

SEQ ID NO: 95972 - DNA, 30070 bp, Homo sapiens
gtgcctcttcttacggttgtcaggaacgtaaagttaaataaggggtgtaaactttttagcacagcacctggcatgtagtaagtgctaattaacagtagttttaaggttgggtgcaggcgcttatgcctgtaaccccagtactttgggaggccaaggtgggcagatcacttgtgcctaggagtttgagaccagcctaggtaacatggcgaaaccccaactctacagaaagtacaaaaactagccaggcatggtggcgcacacctgtggtcccagctactcagaaggctgaggcaggaggatcgcttgagcccaggaggttgaagaaacagtgagctgtggtcgcaccactgtactccaggctgcataacagagtgagaccctgtctcaaaaaaaaaaaaaaaaaaaattgtagtcttaaaacaaacacacacagacacacagacacacacagagaatgctggctcaatcgcacaagggcctaggtttcaccttccattgtataaaaccaaaatcaaaagagtgttaagttaacccccaaaatatttccctcctccaaaagataatcatcaggaataggacagtgtaaatgcgaggcggtgcctgggcagaaggggaaggtgaggcaggttgttcccagggatgtacaggaacctgggccactttcctctgagacactgagaaggcagagcctttctggccagctcacctttacaaatcactcgctgagcctcaggtcacattctcaagggactgggaaatggaattgggcatgcgtgtgttaggaaacttygggcactggttaagtactgggtaaatgtgtgttgaatggattaatgatatactcaaatggccaagtcatggcatcattgagaacccaggtatttcagagctttgtaatcgagatggaacagctgttaagagcctggactttggggctaggagaaacctgggtctgaatcctttcagtgtcaccaacaagtgtaacctgagccacttgacctctgaactttaattttcagatctgtacaatggggatgaataccaccacctacttccagggaatgctggcgaattctaagagtgctaacatatgtgaacacacttagtgcctggcacacgtaagtgcccaataagtgttcactgtagtagcacggtgcagtggtatgtgcttatattcccagctactcgggaggctaaggcagaagaacacttgagcccaggaatttgggaccagcctgggcaacatagtaagaccctgcctcttaaaaaaaaaaaaaaagttcaatgtttattactatcaggagggagcaaaaggacactgaaagaaagatggtagatctttgcaacctagaagatagtatgtctcccagagctccaaaactaacaagcccttccctacataatgcactctgtgtcgcacccctaatgcctgcctccagtgtcgtcggatcctcatggcagccctcagtcaggaaacatgtctctgctccgaggcccagaggatgaagtgacctgccccaggttcactgagggagttggagtggtctgagacatgttcccccatacctggctgcttccaccccaagctactgacatacacaagttgcagctggttctcaggagacatttctggtctggctgggtggccctgtgcaccttggaaagcaagttccatgtgctctggctggttgttttcagatgcacgctccaaaggagtggcttttaactgaggtgtccccagaatcacccaaggaacccctttcaaaaactcctaccaccactaccaactcccaataagagaggggcggagccaggagcccatccatctgtattggttaaaaaaaaccaccaccaccatcacaaaaaactcctgggtgattccaagatatgatgaagttaaaaagggctgctctaaaatgaggattttggctgggcacagtggctctcacctgtaaccccagcactttgggagcccaaggtgggaaagtggaaaactgcttgagcccaggagttccagaccagcctgggcaacacagtgagaccccatctcaacaagtgaaatgagaattttcaactcttcctccatccccatacggcatatgggagtgactgtggtttctcatggggaatgggaagcaggtgtcaagggttcaggtgcagtgtaaggaaaaaacccaaaaagattctcatttaccccatcctggctgagaaacactgttccaaagagcaaggcttcattcagcccagggagcagacagtaaactgacaacagagaaaacacacgtcagctctggggcaggtacaggggactccactgatggaaaaagctggcctgcttatgagtggatgaaatcttcacagtgctgtcaaaaatcagcacacacacgtgacacacaaagaaaaaatcagtacttctgaatggtttatatggcctgacccaattttggttaaaaaaccaagatatctccctgtctctatcaatctttctatcaatctacagaaaatcacccagaaggattaatgcctaaatgcttagagtcattactggggtcagggaaaggagaagggaaataataggtgatttttaaaattacaatgtcccagtattgactatattttccaataataagcataggtaacttgtacttttattaaatttttttttttttttttgagatggagtcttgccctgtcccccaggctggagtgcaatggcgcaatcttggctcactgcaacctctgcctcccaggttcaagcgattctcctacctcagcctcctgagtagctgagattacaggtgtgtgccaccacacccagctaatttttgtatttttagtagagacatggtttcgacatgttggccaggctggtctcgaactcctgacctcagatgatccgcccgccttggcctcccaaagtgctggaattacaggcatgagccactgtgcctggcctacttttatcaatttttaattatacaaaatgccaatatattctccttatttaaaacatgtgtcactttgtctactctctggccctaggtctctcccaggagaactaatcaccactgccaatctgatgtctatgcccccgagaccttttctatcatttatacacatatttatacttaaatacgtatgtttgctgttttgcatttttttcactcaacaataggccttgatgatctgtccacaacagcccacagagatccaatgcattgttttacacctataaattttaaaaaaataaaatgagtgaagctaattttatgaggtcagggtagaaaacaccyrggaaatagctggcccctggctcccttggggacagcccagaatacctggccagctgccctctctgtaggctcttagcacacctggtttctcctccttgcactcacccagaaagcttgtgtccagtgactgaagcctggccacatccyaggcccgcttgataccaatgttgggtaagytgaggtccactttcccattgctgtggggttgaagccggaggaatgttctcaagttcaaggatacagccagtgctacctatagaataaatgacaaaagcaataagcctgagggtgagtggcaaaggggccaggacccacgtgctaagaagagagcaaacataagcacagaggccactcctagccatgcccttgccagacactgctaatcaaccttggcatgctctcccactaagcctgggaacagccaccatcgatcagctaaaagttaaaatccactttgccttctgcctgcaaaatttcagaggttctcaataccaaggaatcacttccccataatcaccatgttttcaatgagaaatataagaacataaagaatagcagtgagaagccaggtgtggtggctcatatctgtaatcccagcactttgggaggccaaggcaagaggatcacttgagcccaggagtttgagaccagcgtagtgtcagaccacgtctctacagaaaaataaaagaaaaaaattagtggggcatggtggtacacacctgtggtcccagctacttgggaggctgaggttggaggctgcagtgagccatgatcgcaagattgcactccggtgacagagcaagactgtctcaggaaaaaaaaaaaaaagcagagtgcagcagaggtggtttcagacagacttaggttcacaccaagctctaccaaggtatataggacttggatcaagttaccacttctctcctaagcctcagtttgcacatttgtaaaataggataataaaagggtatgccttgggggtagctgtaagggtaaaatgagataatggatgttttcaactcctttgctagatcatccttccaacttctaaatgtcttagtgccccggagctcagttctcaaacctctttccttctgcatcaaagctcactcctaggtgatctcattccactcacagggctttatattataatcatctttttgctatcataccgagcgaggcccaagaatcccttcagtgggcataagaaatcttttccttgcctggctggggagaacctgatctctctgatctgctcccaagctgtgcctcagggtgtccttttaccttcttacaaaattagcatcagggagaaggggtacccaatccttaaaggctctaacggctttgtaccttgccatgtaccacggcatgttctccatgaaggatgactttccccggagcagacaccagtaggacttctgacaacatggctcctgggaatcctaaaagggaaagccaatgagaagagcaaagatctctagatgtcagaaccagcaggaagagatcttagaacacctagttcaagcccatcataataacaaaaaaggtagttaccgtccagcacttgctacgtaccagaaaggcaatgcaggagtcaactggacacatccaacagatctgggttcaaatgccagctcttccactccccagtgatgtcatcttagttaactcacttaaatggctaagaacctcggtttccccacacgttatatggagagaaaataaccgtacctacctcggtggatgttaggaaggttaaattaacgcaagggaaacacttggcggtgtctggcacctactaatcattcaattactgagagctacttattactggctctgttcttcgtttcagcttttacaactactactattaaaggtagaaattacatgaaatcatggagcagaaagaactctttgctggacatttaggctgtttccaatgtgtcacaattataaacaaggctgcagaaaacacccagtacgcctcgttttgcacacttaaatgagtatttctgcaggacagagtcctagaaaggagcttgcagggtctataggtgtgtgcaatttacacttttatacataacgcaaaattatcctccgcttaaggctttacgtagattaccttacgctaagattcaggtgtactatgagctaagtactatcgtgatccccatttcttagaaaaactgaggctcagagcggggaatccccttgcttgtcaagctcaaaatcacgactgtcagattgaggtcgccgatccctcggggcaagactctcagagctgggtaaactgagccacagaagctggacgcctggctcagcgtcgtcctgggtctaggacctcgcgccgcccggccgcccgaccccggcctctcacctgccgccgccgccgcctccccggccgccgcccctccgcgccgaagccggagcagctccccaactcccacaacccagagcgcccgtgcctcaaggggaggaggcgttgtacttcaggccagccaatcagagcgcgcgagcccggagtacctttaccaataggcttgaacattggtcaataggtgttgcagccaagccgacacgggttttcccgccccgctccttccgttaaaccaatgggaaacaagtccctgggagtgtcccgccctggggtgagaactgcgaaccaataaaaattgaaacctgagcggyggcgcggccagctgtgggtggagtcaccccgcggactggacgggaacctggcggggtcaggtcccgtcaagcagcctggctcatggctgtgtgcggcctggggagccgtcttggcctggggagccgtcttggcctgcrmgggtgcttcggcgccgccaggctcctgtatccccgtttccagagccgcggccctcagggcgtggaagacggggacaggtgagtggctggcgggaagggcaactcgaacacctgccgtgaatcgtggtgtcgtcgccatgggtacgtcacaccgccgtgaggtcaccgcggcaaccgtcaggtgacgtctccacgctgttctgacgtcaccatggcaacgtgggccacgtgggcgccagagaccaggtagtctttgcctaagtcccaatgaagtcccgctatcatcgggcagggcagggcatatcccatgtgggccaggagggctctcgactcagattgtgaccaatctccaaagcagtttattccccaggtcccagatacaccagcaccttctaaagatggctttcctcatattccttgaaacttgcacctcaacccagacctcagaacctctagagtaccgtggattaataatggattaatttagttcacagatccaggaaattaaccttcgaatgggcttgtaatgtcacattttaattttgagctatgtccttgagttgtttacattgttttttgaaaatgccactttttgagctgtattttggcaattcttcatctctgagtacactcgaagcctcatactatggaagtggctcaggtttcttttcctgcaagaggccctgagttggtggagtataagataaaaatttgggtaggatagagttaagagtcctagctacttgggaggctgaggcagaggatcacttgagctcaggagttcaaggctgcagtgagctatgatcatgccactgcactgcattccagcttaggcaacagagcaagaccctgtctgtgaacaaaataatcataggccagatacggtggctcacgcctgtaatcacaacactttgggagtttgaggcaggagtattgcttgagctcaggagttcaaaaccagcctgagcaacatggtgaaacccgtctctaccaaaaaaaaaaaaaaaaaaaaattagctgggtgtggtggtatacacccgtgctcccagctgctcgggaggctgaggtgggaggattgyttgagcctgggaggcagaggttgcagtgagcctagatcgtgcaactgcatttcagcctgggtgacagagtgagaccccatctcaaaataataataataataataaataaataaataatttcggtaggatagaagttacagtttgtgctctggtctaggacagttttgggcatcccactcctgcctcttcttggatggtctaggaaggtgtctcatctgagccatagtttcctcctcagtaaaatgaagagaataggtgttggctacctttggggttgtggaaagattccaggataattccagaagataatgcctgtaaactacttggcacagtgcagggacaatggcaaaggatcaatcaagtccttcagcaaatatttattgagcatctttgttgagcaaggcattacatcagctactctacacactctgtcatccagctctggtcttgcccacaaaatgtttgctattagaaaggatctaggggaaagaaatcaacaagagatgaccatctaagcagtaaggggtaagtgctgcctctgaggttacaagcagcaagctgggaccctctgaaggagctgaccctctgtgtaagccatccccactcaccagayactgatgtttatttctcattaggccacagccttcctcgaagacacccaggatccccaagatttacaccaaaacgggagacaaaggtagggtggggacaggtgaaaaatgcaaagaaatactcatggcatacaccattttaaagttcttccaaattctttgcagccactttaaagtataatataccaggcgcggtggctcatgcctgtaatcccggcactttgggaggccctgttgggctaatcatctgaggccaggaatttgagactagcctggccaatgtggtgaaaccccatctctactaaaaatacaaaaattagctgagtatggtggtccatgcctgtaaccccagcagctacttgggaggctgaggcaggagaattgcttgaactcgggaggcagaggttgcagtgagccaagatcatgccactgcactccagcctgggtgacagagcaagactccatctcagaaaaaaaaaaagtctmagaaaaaaaaagtatgatatttgacagatctcaaaatatgttacaaaaatgtaatgtgaaatgaaaaacacccaagagatattaaatgacaaaagcctgaatctgtctggataagcatgtacatatatgtgtgttcaggtgtgtgtagaatagtctgaaaggttacacctgggactgttctgggagagagattaagttgtgagaggggaacaaacagaaggactttcactatttacatacttttattctattttattattttttataatgagtatatattactttaatagtttttaaaatgctagaacatgttatatagaaaaaagtaagatgcagaagaatgcgttgctatgatccttttttttttttttttttgatacagggttttactctgtcacccaggctggagtgcagtggctcagtcatggctcacaacagcctccacctttcagactcaagcaatcctcccacctcagccttctgagtatctgggacaacaggcacacatcgccatgcctggctaatactttttaattttttttgtagagatgaggtcttgctgtgttgcccaggctggtcttgaactgctaggctcaaggtatcctcccagctcagcctcccaaaatgctgggattacaggaggcatgagctaccgcaccaagacagtataccattttttgtagtacaaaagcatgcagaccactagtatgtattgttttttggatatatacttgtatagtaaaagtataaaagcatgtacgggacatactcagtgccactgaatggtaaacttaagaagggtcaaaatggtaaaatttctgttatgtatcatctgttaccacaattaaaaagaaggaagaggatgttggaaaggacttattgtagggttgggcttgtgttgggtggttacaaggaagtggggctttgttctggattgaatcctgttaggaagcagggctgtttctgtcactgggtatctttttttgttttttgagacagggtctagttctgttgcccaggctggagtgcagtggcacgatctcagctcactgcaacctcctgggttcaagcaattcttatgcctcagcctcgcgaatagctgggactacaggcaygcatcaccatgcccaactaattttttctgtttttagtagagacggggatttgccatgttggccaggctagtctcgaactcctggcctcaagtgatctgcccaccatggcctcccaaagtcctgggattacagtgtgagccactgcacctggcctgtaattgggtatgttaataatttgtttctagaagacagaagggacaaagaggtgctaacgctgtaatggataaagatgcagcagtcactcacattagccagggaagggggaggtttggtcatcttttggagtttggacacagtcgtctgtgctcagacgttcttccgcagtggccttgtcttggtctcgaaccgtcatagtcatagagtggcctgtctgatggttttctgtgaaatggtttgtgttcagcagaacaccacagtctacctgtgagtgccaggccggcacctggcaaccccaaagcctgcccgatagcgaaagccagctccaaactgtcaggggcagttttcactttctcagaggttgggggagaaaggcgggactgtgagctaggcagaggcacagaggactttgacttcatgtgaaatataatggtaatgtatatatgatataaaatatagaacgtgttgtatttctttatcaggatggttagtatgtggtttttaagttgaaaagcacatcaggaaagaagtgagcatagtggctaacccttggggagtggcaactaaaaggggttacatgggggctttcagggtgttgctcatgttctgtttatgaagctaggtgctgatcaaggaggtatattcagttagtagtaattcaccaacttgcacacttacgatttgagcacttttctgtgtatatgctatatttcaagttgaaagttctttaaggggtggtacggtggctcatgcctgtaatctcagcactttgggaggctgaggcgggtgaatcacttgagaccaggagttcaagactagctcggccaacatgggcgaaaacccgtctctactaaaaatacaaaaattagccgggcatggtggtacacacttgtaatcccagctacttgggagactgaggcatgagaatcacttgaacctgggagggggaggctgcagtgagccaagatmacgccgctgtactccagcctggatgacagagtgactgttcaaaaaagagaaagttctttaaaatctttgaaagtttaaaaaaaaaaaaacagcatatcaggaaaacagaatcttaatttgggtggctaaacatttttttccacagggttttctagtaccttcacaggagaaaggagacccaaagatgaccaagtgtttgaagccgtgggaactacagatgaattaagttcagctatygggtaagggggacaggattggccttgaggttgcgtttgagtcgagtatgagtaaacgtaatgaaygtgaagctctcacgcatgctgggcagcagcctcggaggttgtcagcccttattgaactttcctcagccctgaagcacaggctggtcagctccacaaggctgtggggctgcagactcctttcccttctggccctgcctgtgcctgcgctggcctctggcccatgccatgtgaagctgcctccctctcatccctcacttttcaggtgagcctgtgtgtgccactgaggttagtatactgagtgaaagaggtgagttagtataatgcacagtacatccaatgtgatcccttttgtgactgttgttttttacataagccaaagtttagaaggtggactcaaggatggaccagatcaggatgggccaggtcatgctgtgatcacagacaaccccaaaatctcctgacttatgacaccaaagatggacttgctgttcccacttcatgcccatcacagggtatattctttggctccatgcggccttcattctgggacacaggctgctagtacagctgctgcctggggcaattatcagtcattgtggcagagggaaaagaggtcatggtgaagctcacattggctcctgacgctgccaggggattgtgcagtgtcagtgttgtcgccagtgaggtttacccaagatgtgattattgctgattgaaaacttttcccactaccccaccatgatgacttgaaatatagtcaacattggcagtttttgacagtctttatggagactaaactttgttggtaaataaaagttgaaaaaaaaatgactaggtgcagcggctcacatgtctaatcccagcgctttgggaggccgaggtgggagaatcacttgagctcaggagtttgagaccagcctgagcaacatagcaagacttcatctctactaaaaagaaaagttaaaaaattagccaggcgtggtggtgcacacctgtagtcccagctactcagaaagctgaggcaggaggatcacttgagtctgggaggttgaggctgcagtgagccatgatcgcaccactgcactccagtctgggtgacagagtacgactctgtctccaaaagacaaacctttcttgggaatgatgccttccatttattcacatttcagcggccagagcctgtcacgtgcacatgcctgacatcagcggggtaggaggggcagcaaatatttgcaagcaggagcacagtctgcccagcatgccctacaggctggtgacagggggagcagcaacagtctcaggtgctggatcctgaaatctgaccccggggccctggggttataggtgcatgggagccagacagacccagctgcaaattttcagcaccgctgctgattgtctctgggacgtcaggtaaatcacgtggcctctgtgagcctcagtttacggttctgtcaagtagtcatcatgataattcccatctcactgttcttgtggggcttaaatgagatgattccatgtttcaccctgaggacagtgcctagcacaagtaaaaataatgttagctattatcactcttcttttttttttttttccgagacggagtttcgcrcttgttgcccagactggagtgcaatggtgtgatctcggctcactgcaacctctgcctcccgggttcaagcgagtctcctcattattactattcttaacacttacctgttcctggctaccatttctccatggcgggcctgactaggtgagattttcrggacagataatgggaggtacagatagtcagccagccgggtagagaaggcaaacaaaccccttggtgtgtgtgggagggggtccagaagagggcagacacaagaccaagtgggcaaagggagaaaaggccagttctcgcatcagctattctaatgagctctaaaacacgagccatcgtctctcagttgaggaggagcgggaggttggagaaacctcagttgtggattcttccttggtcagatattgaccaagcatctgcagtgcgaggcgctgctcaacagagaacctcagccccgccttcctgagctgcagagtgcagggagcagaacctcagccccaccttcctgagctgcagagtgcagggagcaggcagcactcactgggcagctacgagggtgggagcaggcttggggcaagtgcccagggtggggcctgccactggcctggtcacggggcatccctcggcaagcaggtacttctgcacacctcctgtgaggcaggcatggggcatccgctatgatggagacagactgtgtcccagcctgcacagccctccctttggtccagaggggaagacacaccagacgggaatcacatactggtgtgtttagttctaactgtaagatgtgccaggaagatgggctggatattctccattggccctttcaaatcccttctcttcaccttctctttatgcatgggaggctgaccttatcacctggtggctgtgccacctmgattcgttggtcttctggcattcaggtrggtccagccagtgggaggcaccagtaggtgataggagagtgagtgcagagagctcatgagtgtgtgtgaccctgttccccagtggtgcatggctctggtggcagctgggctccctacctaactccctccctgctgagtgactccagaattcagctccctccagggtgagttgtaccttccccgacccttgcccttcaggctcctgcatttccctgaaactctgcccatacctctgtgaattgtcccttcccaaagccctcctccaggaatccctgcagcgcgccactgtctcctgctggggcactgactggtgcaggagggaagtgcagggttctgagggaggcagagccagggtcctgacctgtgtyggggggcagtttgctttctctgccttatgagggaagtcctccccagccttcaaagtctcccctccagcatcacctcctccaggaagccctccctgcctctctagccaaggtcagattaggcttctattgctctttccttcagagcactgatctcagtttgcaccttcacattcaggagtatgtctaatctgattacctatcacactcctgaatatcacgctcctgaacatgaaggtgtaagctttgcctgaagtcccagagacactcagcagcggtgcagaatttgcacctgggtctgtctggttcccactcacctatcaccacagggctgcgggtcagagctcaggatccagcacttgagactgtcactgctcaccctgtcaccaacttgctggagagagcctgggtcagcttctgttcaccactgactctcctgggcctggccagagtagctgttcaaaaggaattcttgactggaaataatgagcatccgaaaaggcatttcaagaaacaaataccaccgcccccaaatggaaggctataatgttcttattgttagcaagaaaaataacatggctattatagctaaattaactaaatggcctgccacctgagaatctattgtttatggcaagacagggcctagggacattacattacaggcaaattctttttcctttttcttcataggtttgctctggaattagtcacagaaaagggccatacatttgccgaagagcttcagaaagtgagtaacaccatctcacccaagctgggaatcttcagccccggtggccatcacgggactcagcatccagccaccagttactctttgtgtcacctggggctagtyactctccctctgtgagctccatttcttcatctgtaaaatgcrgacaggccaggtatggtggctcacacctgcaatctcagctacttgggagactgaggcaggaagatcacttgaggccaggagcctaggtaacataataagaccctgactctacaaaatatttgaaaattagccaggcatagtggtgaatgcctgtagccttagctactcaggaaactgaggtaggaggatctcttgagcccaggaggtcaaggctgcagtgagctgtgatcatgccactgcactcctgcctgggcaagagattgagaccctgtctcaggccgagcaccatggttcaattaagcctgtaatcccagcactttgggcggccaaggtgggagcatcacttcaagccaggagttcaagaccagcctgggcaacttagggagaccctgtctctacaaaaaaaaaaaaaaattaaaaattagccaagtatggtggcatgcacccatagtcccagcaacttacaaggctgaggtgggagaatcgcttgagtcttacaggttgaggctgcagtgagatgtgattacaccactgcactgtagcctgggcaacagagtgggatcctgtctttaaaaaaaaaaaaaaaaaaaaacctctgtctccaaaacaaacaactggagacatataatcttccttcacaggcgagtggggaggattgtactaaatgagggaatttaaaatgcaacggttctcaacccagggccattctgcccctcagggcccgctgagcaatatctggagacatttttggttgccacatctgggtgttgggggtgttgctggcatgtaaatatcctgcaatgcaggggacagcccccgtcaacgaagaatgacccggccttgaatggcaatagcaccgaggctgagaaagccggtgtgaagtgcctcgctcatgcccgatgcagagggaacctgggaagcctagctgcagtgagccctcagcccgtgggactcatgcgtcacagtgtcactgttctgttccctaagaaggagggggcctctgacccacgcagagaacttcaagcacggagacagggtcaccaccccagaatgcccagggtgccgcactttccacctccacatggacccaggtccccagaaaccgctccccgcagggtcagcccttcccacttccgttctgaagcccaggctggagcctgctcaggcccctgggaacagacggagggkagtaggtggggctgccacaggctgtggctgcaggaggaagcctcagctgccagaacattctgtgtggtggaggaaggctttcaacctcctgaggagccgcggtagcagcggtcatttctgtctgctgtacgcgttgggtcgcagctgtcacgtcacctcctcaagggccttccctggccacctaatctccagctgggttaggcactgctcctggatttccacatcctctaaccacaggcatcacaaggggtgttaacctgttcacccatccacctcccacccagccttggcactgtgagggcggggacagtgtctggttcacctgggagccccgcctggcctggtagccgctcgcagggcctgtggatgaggcygggcagcaatgccactgctytcctcatatcacccatttcaccctcacagacacccgtgaggtggaagttaatgtccacagcttatagggagccaaactgagcctcagaaaggctgacttgcccagcccccacagccaggcatcagtagagctggaatctgattcccaaactggtgccatttctccccagcccttggggtacacgctgcacgtggccaaccaagtgggtagtattatcactcccgctttgactgtgaaagtgcagagaccccaagcagggaagcagcttgcccaaggtctgctggtcagaagccctgggaaggttccagcccagtgctggatgggcagcctctgctctcacacaccatggcctgcttcttgaatgctgtcacagtggccatcttaggagaggtcagaagtcgcagaccttcaccctcctggtagcccaccatccagcttgagtggaccctggctgggcacaaagtcagaggtggtacttgtggtcttcacatgcatgagagctgttggacatttgtcatgcaggggcctggagtcctgcagcagaccttaacagaccacttctgttccaagcaaacccactccccacctggacagagcacaggcctcacccagccaggcttcctgctcccagaatccccacacgcctcggctgactacattctccaagctccttgtcctttagagtttagaaagcactgtcacatttgacctcttggcccaactgttacaggttagaaaaccaaagctgtcaaatgttgagaaaagaagaaaacctcacagggcctaggtgcacaggagacgtggacagagcccagacggttcctcttgactgtccctgggtgtgtgatgcgtgtcatctgcttaacccagctgctgcccccatgggagccttttcctccctcagactgcaaaagagccacaccaggtccccctcagcagggctgggtgtccaacgaagatgttgtgctgaaagttcagagtttgctttcaaatgtcagccarttcaaggtctgatagcctgtattagtctgttctcgcactgctataaagaactacctgagaccggataatttataaagaaaagaagtttaatctgcacatggttttgtgggctgtacaggcttctgcttctggggaggcctcaggaaacctacagtcatggcggaaggcaaaggggaagcaggtacatcttcacatggctgataggagagagagagtgtgaagagggaggtgctacacactttcaaacaaccacatctcatgagaactctatcacaagacagcactagggggctggggctaaaccattcaaaactaccccaatgatccaatcacctcccaccaggccccacctccaactctggggatcacaatttaacatgagatttggatggggacacattgccaaaccatatcacagcccttcatgagctagctggcacaggctttgccggcgtattaggtggcgcctctgcacattgtctctgtccagcccatctcacatagatcttgactgtcactttctgtcgccccccagatccagtgcacattgcaggacgtcggctcggccctggcgacaccatgctcctcgrcccgggaggctcacttaagtaattctcaaactcctgtgggtgttcagagggccctagggtcaggggactctcctagggtmaccatctgggatcccaggcccccagggacccacgggtgggtcagttagccttgctcgtagctcctgggagggaaggtaccttctgagccagtggaagcagtctgcgggacacccaggtggaagggcggcgggggtggttcccgccatggtctggtgggtgatggcctcatggcagttccctctgctccttggctcctcagagtataccacgttcaaggcggggcccatcctggagctggagcagtggatcgacaagtacaccagccagctcccaccactcacggccttcatcctgcctgtaggtactgggcaggcttaaccgggggcggctgcaggcaggttcagtgacagacacacatgggctctgaataaatccctcttttcacagtgacagacgctgtcctccagttccccaagtccctccaggtcctcaccggtccctcccagccctgccyactctggagcagcgtgcccggtgggtgtgcygtggcagggctcctggaggcagaacactgccyggtttggggggcagggctggacttcagaggagctcctgtccgcagtgggcacacctttcccaccctgctcaggcaatgtccctttctcctttcagtcgggaggcaagatcagctcggcgctgcatttctgccgggccgtgtgccgccgggccgagagacggtaagagggctggagagagggagagggcccaagggagagggagaggaacaagggggaggggggagggagagggagaggaggacggagatggggagagggagaggggcctctgcacagcgggcaggaggcaggtacagcagggccatctctgagccatccagccacacatcaacagaccttgtctgggcccctccactgtgccagacggggaccaggacagaccaagtccctgtcctcagagcaccatgttgtgragtggagacagtgacatgtgaccaaatagactatcagacaacacaattgcaccttgtttgtgagccctgtattctgagaacagcaggaagttattgctgggttctcagcctcagccatcttggggacaggggtagacatgaaaggaccctgctggctgctgggtgcataaggctcctgaaaggcctgcatggctgtggggagcccaggtggacgttgtcagcagactagccaccacctcctccaaagctactgacagccttttcaaggaatctttaraagaaaatgagcaaagtctctatctacaccactcagagaccaggctgccagccagctttacagagaagagaaagcaagccctactttgatccaatggactggcactttatgttcataatttcatttactccttgttgatagccctgggagagaggtggtggtggcctctgttttacaggagtcaggaagctgtggctcagagaaatgacaccatggtcacggtcccccacatggttgatagcagaatccagattggagtccacgtctgtctgggccaagcctgagctcttccacggtcccacaccactaaggttttgttctttatgaaaggctctcgggcccagatagctccttagagatcccaggtaacagaacaagctttggcttcaaaagaaaaaactgtcatttgtacaaagccatccatcagcagtgctcataatagcaagaaactggaaacaacccaaaggccccgaaaacaggcatggcggagcagctgataggtcctccatgcagcagagagttacgcagccatggcagtggcaaggtgcagattgtcctgaggtggggacacacacctggggcacctcgggtgaggaagctcctcgctgagcatgcggtgcccactagagacagcctggagctctgtgacaggcctgggtgcacaccctsctgggccgctagccgggtgcatggctttgggtggggatgagaaccctgaggctgggctttgggtagctggcttgccaacaaggggtatgccacagggtgatacctgggaaaggctcggcaagggcccgccaccacactggtgcccagcagatggccgtccagtgtctaatgtatctgcaaatagactggcatggaccccaggaatccagaatcctgcggaatcaggagcttggtctgcctgggtctttttctcccctgtgaagttgttctaagtcatgatgtacaaggggcttagagtttagcccattgggaattaagggtcaggcccccacttcctttgaaggctagaggcagaccaccccaacttcaccccacccagacccaggtccagtggtacaaaagctggctggctggggtgtggtgtaggccaggtggctccctcaactcaccagccatccttgatccctccttggccaggccrycctgcgatgtgctggtggaaagggggccratggcctgtttaaacccacctgtgatggatttgtcatctccactgcyggccgagcctgtgcaggttcaggttgagcggtggcaggatgtgaaatgctgctcaaggtttaggcccaggtcagagcctgttgagccccataatgtcacgtgactcagtgtctcctccctttctagtgtggtgcctcttgtccagatgggagagaccgatgygaacgtggccaagttcttaaacaggtactcgcgtggaacctgggggttcctctctgaaagccgaggctcatctgtgggaagtagcagcggtgcagcggtccgggaagcagtgtggggcagcattcccgcaccccctccttcattcccttagtgtttatgaacatctgctctgtgccaggcaccacgccgggcacaggggaggcagtggtgaacaaggtgggccctgtgcctgtccygataagatttagatcttattgggagaggctgctgtaaaaaccaggaagaaaaacctaagtgcaaagtggcattgcgggggcaaagggcgttcttagaggctgggtgctcaggggaggcctctcggtggtgactgaccagggagccaggcttcaggccctctctcagccagtttcctgtccccgagagggcctgcggcagcatgaaccaacaagagagccgggccaagctgcgctcaggggaccccatgcaggccccagtgagccaggctagcccagggagggcttcctctgcctcgcggccggcccatgaggctggagccacacctggcccaaagcctgctctgckggttcctgccccagccctggcttctgtggcatcagtgtgggcaaggccagagcctgggggcaggtagagagctgggggagcaggtctgcaccccaggagctgtcctgggtgtctagaaagtgacctcaggcccttgactgtggccactcctcccagagacatggcgctttgacgggtcctgagcagctcctttccttctgggaggggggtttcgccgggagtgaggagcaggtctacttcaccttcaaagcagcaaccctgcggtcccatagcattgcacgggacaggccatttcatctcctcagtgaggcttcacagagccaacaagcaacaggcacaccactgccctccaggagcatgcggcccaggggtaaaataccctgaacaacctccccttcgctcttcctgagagccagccgtggggcccagggggcctgagtcaggggaggactcaggaggatgtggtgtggagctggcctctgagggcaagactggggcagagagagagggaggaacgtggtgcctcgtgctgggagtgaaacagcaaaaggtgcggacagcagaaggcagaagagctgacagcgtaagcgccttctggggcccgtggcgtcgtcctctagttccctccactgctgcccctgcagaaggcctcatgcacagatgaccattgctgttggttcaaaggaggaggcgggaaaggggctgggctctggtctctagagtgctccagcctgtgcttctcacccggtacctttggcgatgtttggaggcattactagttgtcacactgggtgcaggggtgccactggcacctggtgggtggagaccaaaggtgctgtcagcatcctacactgcacaggatgcacaggacagccccgaacacacagaatgatccagaatgtcagtagggcctagtccagcagtgtcagcatcagccagggcaggaactagacctgcagagccccgggcccagcccagcccagccctcctgagtcagaatctgcacgtcgctgagatcccctggtgatgcctgtgcacactgtagtttgggaaacacccaaactgatcacgcacctgagccctgatcactcaaaggtgcaaaaaccggctcagagaggagtccaaagtcatctgccccatggggtagggccgggrcaatggcctcatcctgcaggaatggccccagccttgacactggagtagagtccttggcattcacagcagctggcctcgtgtgccatccatyaagtgcaagatggctgggcccccgccctccctgcacaatgtgcccagagtgcgtcatttatatctcctccttgtaggcggatatgggaagacccagttagcgttgatctctcatttcaaaccattctgtttgcttctctctctctgcccctccagactcagtgactatctcttcacgctagccagatatgcagccatgaaggaggggaatcaagagaaaatatacawgaaaaatgacccatcggccgagtctgagggactctgaaatcacagaaagtgggagcttggaggatccctccatggcgatggccgtggagagaggagcttgcccttytggggtcctggttcctgaagagctcacccagagaggctcaaagcagccttttgtcccagctcagctttgatytacacctcttgccaccttcctcaagggactgtgaccctttggggattctgyccctgaccctgcttccccaagctctcctgggtcttggagggatgtgggaatgaattggcattgcaggaaagacaggtaaagtgattgctgcaatgagaaggagctgtgcggaaaaggaataaaagttggaaaggctggagccgtgtgtgtgtgtgtgtgtgtgtgtgtgtgtgtgtgtgtgwgwgwgagagagarccctcccactgccagctcaggttgttcacagatttggaatgggaccagaggcccttgaaaatgtaattgtgatttacctgtgccaaaggtgctttaaatgtcacatttgtaaaggggaaggcggacaagatttggaagtttagtcacctctgagccacccatcaccgccaaagtgtgggggaaggatagctgcagattgacaggcgaggctcagaaactcctggcttagattgaagtgtgtgtgatgggggtgcagcttagaggaccccctctgaaagggatggagatgctgatgagaacaacactaccacttgaaggtgaacattccctgtckggttggactgagtcaagggtctgcggtgcagcatcttcagcttgagaaaatgaggttgtcagtttccagcaaggctgacatccaccagactgatttctccgatgttgcacttggctggcttatgcctctgagatcsgtgccacggctgtatttatttcagttgtcactgmtgctccctcctgctatgaaacgacactgccagtgccagcagtgtccttgggaaaggcaatatttatgaagggcagaagaggcagccccaagaacctaaagactgcaggctgctaattgcaggaaatgactttggaagggcaggctcttgtccagtttcagggctgaaatgcctggcgaactccattcagccatcacatattgactgagtggctgcttagcatgggccaccgcgctaggctcgggacagctggtctttccggccatctttcttgctggcaagtcagcaaacattaccttcttagtcacgtgcatatttttgccttcattcttaccacctggcctgcaaagtttgcaggagggccaggtatattcacttgtgtcttctgggtcctttcattgctgacaggctgtgatggccctcttgagccttgggcagggtgggtgaggtgcagatgaccaggagtgtgtgaatgccttccaggaggtggctttgttccgtgcctccctgcccccatcgtcactaccaggtctggtacggagtcggtgctcagtgtttgcaaaacagagctgaaaayggactttgggaggccgaggcaggcagatcacctgaggtcaggagtttgagaccagcctggtcaacatrgtaaaaccccatttctgctaaaaaaaaaaaaaaaaaaaaaaaattagctgggcatggtggcgggtgcctgtaatcccagctattcaggaggctgaggcaggagaatcacttgaacctacgaggcagaggctgcagtgagccaagatcgtgacacgacactccagcctggctgatagagtgagactccgtcacaaaaaaaaaaaaaaaaaaaaaaaaaccctgaaaacgcaatcactaaggctcggtcagggagtatgttcaaagagcttgcagcgaatcactcaattctgtctacacctcaaaatctcaaaatcttcctggaatatatatatatatataaaataacacagcagccctgcatgcctagccatgggaaagcacagcctccaaaggataaggaaagctttttgagtaaatacaacatcctaaagtgacaatctttgaaacaaggccgttcacctgttgccaagtcctgtccttccaggaccgggtgtcacagcctggatgttaacagtcgcgttctcagacccccgcctctgtatctgtctcccggttcaccagcaaacacttctctgagaaaccacctgggtgcagggcagatgccaccactcagcaggtgtttctctcctgtgctaccaacctgggaaaaatggagaaagcttgctttgggggctggaaggatggggtgtttaaaacatttgctcttctgcagtgcctttcaaaagctctatcaagagcccgaggcaaaagaaaagatgtgtacccctctgtacactgagcaaatgtcctcccatattttgaaccaggtgggaaaagttaatgaaagccctacagtcaggaaatgtgactgcgaagcccccgctgccccagtgtttgcacaccactggcaactctcagaaacaatcagtcccattgcacgggaacacggggttttgaaacaaacagcagcctgtttttatttaaagtcgtgatcccttgcttatcgtagatttttttcataatttgattttggaaaatattgcacacaaatactactcgatccctgagtttgtgggcacttccttacattttgcacccatgaaaatgcctcctccgcctccaggtcaggctccctggaatggggtgtttagtgtcatttccagagacaagctggcagttggctcttgtgtcagagagaagcccacagtcacagtgacaccagcccgcactgtggaagggcttgctatgtgcagtgccctgagccaagtgttccacagacattatctcatttgaaccccatagcagccctggaaggaggcattgggtggggaaccaagttgtcctggggagtcagtgccaagatgtgagccccggacgcggcctcgtcactcacagccccgtgctcctcagctcccacccactgccgcttgacagtcgttttaatcactacctgggctgtggcgaacaatgccaggctctgatagatcctgctgtctcatttctcaacctagtttcccttaactaatatttcatggctatcgttaatgtgcgtttttcatcgagtaatttccacagcccgaacttgtaacacatcccaatgacaaacgtccccagttcggaagcccccgtcagtggcaatgtcacccttgctgctgcctcgacaccttccgacagcccattcagttttatgatcgccctgtcccagtgatcactactgaacctttaagaatccagatgcatttcaagtttaattgaayaaaattctttgyataataaattccgcatgaatgctacataaatcagtgcctggaaggatttgtggctcatccctcccctctggcggggcctgagaatcttctggcaatactgacacaagctggaataaatgcatctttgcagtcagtccagctagaggcaggcggcacagttttaacttgccttggcctattgcttttcttctctcagagtcctcctggaagatagtgctaaagtccaacagaggcagggacaggcagattgcggagacctagaaactttggggacatccctcgtgttctcccattccacagaatcagaaacttctcaagctgtggtttgtcacctttggaatgcacacacacatattcacaagtttgcatccagtcataggaagtccatggaacctcccggtaagaatcccttttctaagagaacccatgcgaccctcttcgggagctaagtcaggattcccaaggctgccttcagcagcctgtttcagggtcagatagctccagcctggaagggtgagaagatgcacttggggctggctgggagaggctgctgggtgacctttgatgcttgtagggttgtggggtgcagggaaggactgtcaaacagctggcttgggcactggccccaggcaggctcaggttcaaggccagctttgtcacctcctgccttggtgactgggcaagtcattccatctgtctcggtcttgctcctccacctatagaatgggaatcataacatccaccccatgggtcactgggattgtttaatgaggtaatacttaaaagagtaatattgccccctggcaaatattagctcctgttattacagttgtttgctattactactactatttgaattcagattccatctttgtcacttccagcatctccttaagcaaatggtttaaccactcaaagcctctttatcttttataataggataataataccaatttccaagagttcagaaataagtccacaggccccagacatgatagcagctccaaaaaatagctattgttgttcaatcatatttgacccttttcaaagcacgttctaaaagctcatccccaggtgacgctgaggacagcatggcagcacctctggcccctcaggcttgctgagtgggtgggggagacaggtggcctccagaggtggccaggcacaatcagatgagaagatggggatgtggctccaggaacacagggccaaagtgaaagtgagagtgaattgcaggacaatgagagctgaacacggtctcagacatcattgctcccattttataaatgaggaaactgaggcctggagaggagaactattttttttttttttttgagatggagtctcaccctgtcacccaggctggagtgcaatggcatgatctcagctcactgcaacctccacctcccgggttcaagcgattctcctgcctcagcctcctgagtagctgggattacaggcccatgctaccacacccagataattttttgtatctttagtagagatggggtttcaccatgttggccaggctggcctcaaactcctgacctcaggtgatctgcccacctcggcctcccaaagtgctgggattacaggtgtgagccactgcgcctggccttttttttttttttttttgagaccgagtcttgctctgtcacccaggctggagtgcgatggcgtgatctcggctcaactgcaacctccacctcctgggttcaagtgattctccggcctcagcctcctgagtagctgggattataggcatgcatcacgatgcctggctaatttttttttgtatttttagtagagacaaggtttcgccatgttagccaggctggtctcgaactcctgacctcaagtgatccacctgccttggcctcccaaagtgctgagattataggcgtgagccaccttgcccagcagagaggagaacttaataagtacatcttaataaggaccacacatagagcactgattatgtccaggcatcttgctaagaaccttacattcaatagttcatttaattatgtcaagagctcatggaggtggaactattaatattatcacccccaacttacagatgaggaaactgaggcccagagaggagataggagtttctcaaggtcagacagctaggaggcagaaccaggctttaaatcagggctctgtgcctcaaacaccatgacaggcatttcctcaacacctagctctatgctcaattgtactacagtgccagggtgttcatgtctttctagttctcagaaccctacaaggtacatacaattatcctccccatttcacaggtgaggaaacgggggctcaaagggtaaagtcacttgctcaaagtcacacagtgtccatgggggtgacactgggtataatgatactgtcaacagctgacacttactaagctctccttaccaccagagctttttaaaccatctcagcatagctaaccttggagagcaccttccttgcatgcttggcatgtattccccataacaaccccaccaagtggatgttagtacctttgcgtcatagactcagaaaccgaggcacagggagacggcaccttggctggtgtcacgcagagaggaagaagtccaacttggatttgaactcggatctgcctgtctccagcatgctccctgtgggcagmggcaaagccaagacaaggaccctactcttcaggtccccgtggggtggccgccctggcacagttggcagtgagggcgtgactggcaatcaagtgggtcagggcttcttctctgggggaagtgaagggactaccaaaaacctggaagaggctgggtgcggtggctcttgcctgtactcctgacatgtcgggagaccaaagcgggaggatcacttgaggccaggagtttgagatcagcctgggcaacatagtgagaccctgtttctttaaaaaaaaaaaaaaaaaaaaaagcccaggattgatgtgcgcacctgtagtcccagctactcgagactgaggtgaaaagatcgcttgagcccaggagcttgaggccgagtgagctgtgatcgtgcccctgcactccagaccgggcaacaaagcgagaccctgtctcaaaaacaaacccccaggaggaacttagttgccacagctacaagtgtcctctccgaggaagggtaagaagcaaatgccaattcaaggcagcacggggcaaaggcaccctggagaacggagtacataagtagcatgaaggtgtctaactgactcaggacccgagcggggggcaaggtgacctcttccccccgcccctcactgccgaaatgcctcccagtgcaagctcccaaggcaccggtccttcggctctcatcactgtccatctgcagtgccgatggccctcactggtcagcaggtgcctttatttacaatcaccttggaagggtcaagcagacatatgttgctaagggtcgtttattcttgtttataaaatttatggcttcacctcgattacacactgtcaaaacagaaaggattgggcccaaagtctcttgccgcatgactgcctcagacgtgcgtacatctgttaactccgtgggagctgtagagggaaataaggttcactataactcaaaagcttgctaccctgccacacggtgtgagcatcgggccttgagaaaagacatccaggcgtgcacagggagagggaggaggtaagggctgcgagtgggcatgccaggtggtctcaggaccctgccccggcccggccagggactctctcaaggtgctttgactggggagtggaagagagagaactgtatttctatggccctcgggggtccagctgcaggatcccagcagctggaaagagtcctgagcctatggctttccacctgctgacttcagcggggagagagaaatgttgactctcacggttgcagggagtggagatcggtatgaactttcaggagggcaatttggcaatgtgcatgaaagtcctagagaggtgtgtaccttacagtcctgcaactctgtgtctgagaatttttgtgaaggaaatagacacattggtggagctgcaagagttttttttttttttttttggcttttttgtttttgttttttcagtgcaggaaatagtcacactggtgaaactgcaagggttttttgtttttgtttttgttttttccagtgcagaaaagtgctgctcattacagtgaaaaattggaagacaatgtccaacaatagggagctggataattaaataagtaaaatattaacaataagggactgtaagaaatac

SEQ ID NO: 95973 - DNA, 57868 bp, Homo sapiens
  misc_feature (1)...(57868): n = A,T,C or G
tggacgggatagttttatcaagagaatccctaatgtgtcattttaaaccagctgtgctttttattcattctggttgagcgtataggtttacactttaccctttttatacttggaataaatttagttccagcagatctagtagcactccagaaaccaaccccatctgttccccataaaaagaacattttctctgctctccagccacgtgtcttggaatgtaattctgttgtgcctttgtttttatcactctcttcgccccaaaagcaactgctgtaagcttttttctacttgtcttttctagtccccaacctctacctttttcctttttcccagccctaatttctggatgcacttctgtgatccaggtattttaagaaccagttacctcagacctcatgttgaacagtgtcgccatctgggtcctcttgatactgcagacttttaacgtacacatgcaggaaccctgctgagcgtgggcacttgttttaaagcaaaactcttcccaaggactgaagaaagggcttctggcaagctcgtcatggcattgtggtgggatgggtctagagtgtcatctgaatggtgcttcctgtgttcctctttgaattctgccattttcagtattcttgtgtgtctgaataggcaaagcgatttaattggctggtcttgcacgcaaattagttccaaagataagctctttgtaacacatttccagtcrctaatgctcaaatgtagaacattcctttaaatggcaggataaaaaacccactatccaccatagtgcattttgggaagatgtctgtagcatatgttgctgtgaaattaggccttgtgggatatggctgtttgtcattttgatgtattttaaataaatatatatattttttaaagagccttttttaccagttcaaaaagtttaattaaccagcagtcaccgcatctgaatttttgtctctggggcatagatggcagaccaagattaaaagtggtaactcagctatacgagcatgggctaccttcctgggctctcctgcagtcctgtagacctgctgttccgcagaccatgggacacaaggtcagtgtgttcccagtgagggtcccaagtcagtcatcttaagtgtttgttctctgccccattcagtggactgttgacttcagtccctgcaagtgctttagcccgagtggggttttctcagagcactgccacgagttaagtgtgtgtttagccaaataatttctccgtaagggaaaaatgcagtcacccaaattttaccaacaatgacagagatgagagtagaaaagattaggcaacatctgagttttaacttgaaaagtgtccaagtcatcatgaaaggccgactgggagcaagtgattattagagattcttcaggagacctcatctgaaaatgttaagactgccagtgagggaaggaattgttaaaatgccagcggcttttttttcctctttttttctgtaattctgtaaaaatgcagagaaagttgagtggtacttcagaattgagggagagggttaccgcagcgtagaaatatatttctagatttcagttccacaccacaaatccacaacaatgccatttttcaactgtacaaaaatctgcttatgaactggacatgatcttaatggtagtgtcaaaggccaagtttttcacctgttaatatttttccacatttgtccttgaatctgaataactttatacagtactgtaaatttaacttacatcgagtttgttgtcaattcttatgaaaagagctttctgcatgtaacacatacggttaaagaacacagcaaaggacmaaatttgcaggaacagttttggaaccracagaaaatgtcaccttttatttgccatcttatatatatctatcagttttaccagctacttctaaatttgtacattatttgtaagggaaagaaggaaaaccctaagacttgtctaacttagtggagaatgtgtgtgttgggcttaggatggatagctaagtcttattgagctgtgttacctaacttgtatataaaaattgtaattaaaagtttgggttcacctgtttctcacagtttaaaatgatgagtaattgcaaactctggaaatgtgactagtatatgatttaaggctgtagaagcaaggaagctctttcaagtgctaaaactaaagacttctagtttttggctcaaataagtactgtttgtataccaggatatgtgagatgtaaatgtagtaggtcacttttcacccttgtagctataaaataaaaattttgtagaacagaaatagcttgtactactgaattaacaaaagttatactaaagtatcatgtttaaaaaaaaatatatatatatatacagagttaagcttgttgctgttaccctgtctggatttgaaaagtgtgctgatttatatatatatattacacacacacacacacacacacacacacacacacacatacacctaaaatggcctaaagcagacatccatgtaattacagttgcaaaatgaaaacattttggaaagaacattgtatcatagttcattcatttgcagtggatctttgttcctttttactgtggtaattttagaaatgagtgtcaagtttgaaattagatctgctaagttggggttttgctgcttgaactctgcactgggtcctcaaataaaccgatgtgaatgtagttttttccccctgtgtgaagaagcagttacaccccaacaataggaggaaaaatctagaactatttcaagttttatctttttgtatatgaaaataaaataataataaaacaatcttgtctttcttaattacgtggcaggggattggagtttcctttcatgaggattagacatgaaatgaaatggcgttcggctgcttagagggctgactcaagtcagttcctgtttggtatgtgtaacattaacagatgttaatggctgaatgcctagtctgccatggtcctgtggggctggagctaagcacaggtctccatttctgccattcagaagtccagggtctagttggggacattatgaatggggaccattctcctgaacgaactgttctgggattttgagtaagtttctgcaggttagcatattttccaaatgtccaagacactccccattccctcatcctctgccaccagtcctgtactttgcagacaaccctgagcaatattgttgtaagtggagcagagaagccttgaaaatagttgtattcaggactattgcagatgacaaactctgtcattcccaaacgttgctgagtactggagtcatttgcggagctattaaaaaatacaattatgggtccttatccccaacctggaattagcaaaccaggtctccagtttcagagatttggacttaatctcactaaaggaactcatggttccccaataataaaataatgatagtctttaatacctaacaaaacaggaaggccccagaaatcacctcactgctttctgcagtaacaagtttttttggtcgatgactctttcttgcctaagtggagaaacaccctttaaattcaccctttattatgagaattaagcaacggtttgaaacttgtggagaaagtttttgatgaccctttattcagggaccagttgcccaatatttggctgtttttgctctttcacgtttagaaagttcaccttttattagtgagtgcctctaatgaaggaaggagagcaaagggctgacatttttgatacaggatcttggagctggaaaagctgaaaggttggaccttaggagtcatctggtcaaactttccctatagcaaaggaattctttgaccaaagaaatttgacacagaagttggtttataaaaccaggcttgtctgaatgagcaagtagaagagggccaagggaccatttcacttaccctcccatcccttcctttaagtctcaggtatccctatggaacacctaggaaccttgattaaagtttacaaatcactggcccaattccaattttacaggtgggcaaacaggcccagagggagttttcctaccctgaggcaggcaacccttccagttcttgacctcttgggaccaaaagtggggttacacttgttcagaagtagaggatctggattaggaaaagccatctaatatttatctctctagtatttagcacagtgtctggcacttacaagggccttaagaaatacagtacctcagtgattgtgtatttagtaaattctggggaaagctgctgaagtagccttgaagcctacagataccagtgttgtctggttgtatttgttaggattcttggttgcaggtgacagaagccattagacaaaaaagggggtttcactgaaaggattctgggggaaatgactagccaagacttcagaaaggcaggatgtatgtgggcttcaggagcctgtgggagttggggtcataacattgcaggcctccacctgtgtcctggtatttcttccattattgctcagagcaagaccagatgcatctgctcctttgacttcttagcaggaaacaaggctgtagacagtgccagagcttttttttttttttttagacagagtcttgctctattgcccagattggagtgcagtggcacgatctcagctcactgcaacctccgtctcctgggttcaagcaattctgcctcagcctttcgagtagctgggattacaggcacgcgccaccacacctggttgatttttgtattgttagtagagacggggtttcaccatgttggccaggctggtctcaaattcctgacctcaggtgatcctccagtcttggcctcccgaagtgctgggattgcaggcatgagccactgcgcctgtgagttttaygtcacagctttgctacccagagagactactagatcgaaaatccctaggaaggactctggttgatgtagcttaaccagtcagggtccttcagaagaggtattcctggcaagggggtagcctcccatttgaggctgtcaaaataatgtgcacacttcagtaggttgttagaagtggcctcctggtcagtgaatcatcagtgggatcagatgaaagttattcctaccagttatctaagaaataggaaacttgaagtttctgctaagaactaagtccacacggaatgctagagatcatgctgcaaaatgaagactcatttgtttgtgagtggtagtccatgaaatctatcctttctttgccagcaggcgttcagcaatctggattttatattctatcaagacaaagagtagagatgactcaaacatttctaacatttatagagcacttagtgacatgcccctggtacttccctaaacattttacatgtgtcatctcctttaatcctcacaagaacgctatggtctaagtattattattccaatttaaaagagaaggttggggacagtgacacacacctggacttacagcactttgggaggccgaggcgggaagattgcttgaggccagaagttggataccagcctgggcaacataaggagacccccttctttaccgctcccccactcccgccaaaaatttagccgggcaatgtggcacgtgcctgtagtcccagctactcaggaggctgaggcaggaggatcgcttgagcccacgagttcgagatcgcagtaagctatgatcattccactgtactgcagcctgggtaacagagaccctgtcgctaaataaataaatagacctgagttggaatatcggctctggagaccttagtgtaaccatgcgcaagtgtttactcacctattaaatgagactaaaggtattttcttctcatgactatatatagcataccactaagccctctagacatcatattccccatccatcgccccgtccagtggaccagggatgaagcggggatgcgctaggcatcccggtttgtcaccagggggcgtgcgaggccctcagcttggcgggcggtgaggcgtggggtgacggggggatggcgggggccggcatgcgcgcgcatgcgccgtggtaaaaggccggtacctcgggcaagatggctatcaagagtatcgcttcccgcctccggggttcccgtcgttttctgagcggcttcgtggctggggctgtagtgggcgctgcgggagctgggctcgcggccctgcagttcttccggagtcagggcgctgarggagcgttgacagggaagcagccggatggtaagtctgtgggyccgtcctcccttcgctggcccagatttcgggctccgactcctacctggagtgtgaatggcagtccttgacggacagccttcaccgtttgctgggcccctagcctggcccttggtttctgacctttattctcccggctcggcctcccttccccacctcgcgtctcgccagcttccctcatgtccttccttcccccgggcatcttcgttttctgcacagaaccacccccgccgcccgactttcttccccccagttactcatcgcgatatctatgttttaatgtctgtgttctctactaagattgttagctccataagacttgagactatgtctgttttggtctccatcatctaaccagcacagtacctggtacataattggcattcagtaagtatgaatgaaggaataaattaatacataattttagtagatkagttaactgcccttctttcgtcattgttcagttgaagaatacctgctatccctccaaagtgtataaaaactcatgttgcaatgggtaccttatatttgacaaaaaaaaaaaaaaaattaacacgagctcatttcttgtactttgcggatgtgctaatttaacttgctcctttggatacttggcatctagcaagagaactacycycttggggggttgaggatttgagaaggcatcggggaggattatctcgaaactgactcactgctgaatgtgtgcttggtttctcccactaggaaaaacagtaccagttttactgtcatcttgcaacagcacacatatcagtgcttcagagatgattkggaaatttgatgtgaaagactaataagatcaagtctttattcaaaagttaatgcagtagctgcattttattcactgattataggcaaatcagtactttgcctactgtctgttttcttcatctcataagtaattgcaaaaatgagattttctggttgattagacttctgagccagtcctttgtaaatcacaccgctctccttttccttataatctttcattattaagagccactaattgtgtgtgtgtgttttttttgtctctgccccccctttttttttttttttcatttttaggatctgcagaaaaggctgtcttggaacaatttggattccctttaactggaacagaggcaaggtgttacactaatcacgctttgtcttatgatcaggcaaagcgggtgcctagatgggttcttgaacatatttccaaaagcaagataatgggtaggtggttggataaaaaaactgaagtaacagtatttatgaaagatgtctccaaatttaaaacagggatgattattaatattctcaacctttttcatatcatagcacatgtagaaaattatatttatataacttactggttaaatcaaccctgcctggcagccagaaagccagaccctttccagctgtctcagggctgaaaatacccatatcttgacacactagttgggaggctctgtcataaatattacagcaatgagcaccattcagttttaccttaacaaatatttatgtgcctgctatgtgtctggcactgtggtaacccttggggacctatgtgtgaccagagtagaggatctctaccccagtgacactttgagttgggagagtgggttgacccatcaaacaaataattttagatgtataattacaataatttttccaaaggaggtgattgcaagttagtgtagtataattaaggaacagtaaaaagtttgatgagaggctgggcrtggtggctcacacctgtaatcccagtactttgggaggctgaggcgtttgagctcaggagtttgagatgagcctggccaacatggcaaaaccgcgtttctacaaaaaatacaaaaattagctgggcgtggtggtgcacctctgtggttccagctacttgggggactgagatgggaggatctcttgagcccaggaggtgggggttgcagtgagccaagatcgcagcaccacactccagcttaggcaacagagggagaatgtgtctcaaaaaaaaaaaaaagtgtgatgagagattataacacaagaacctgattttgattagtaaggcttctctggaaaagtggactgaagagtgaacggaaattacttaggcaaggggttgaatgtgccatgggatatggagaagagcattctaggaagaaaggaacatttgcatcttcggaggcccccaatgtggacaggagttttgttcttttagggaactaaaagagtgccagtagatgaatgagggggaaggtgatgtgaaatgatgctggagaagtaagcaggtgtgtcagtttattcatgtgtccttatgtcttgatagggtcctgtagaattgccagatcttgataattaatgtcaaattggtttctaggtagattcttcaagtttacactcctagcatcattgtttcttctctctctcaaccttcacctatggtgagcattactgagctttaccaatttaatgctcattttacttgtgtttattgattatcartgagggttaacatgctgtgaattagtcttttttggtaagttattctttacctatttcagttggggtattctcttttgaatttatttgtaaaagttcttttatttattaaggatattaccttttgtcacagttgttttgttcccttttgttatttgctttttaatttgctgtgtgttccacatattctcctttgctttaaaatgtgtgctatggctatgcatattaaaatgctgatattaaagttagtgtgtgccattctagagtgcacagcaaccagcagaataacaggaggcttggaatgtacttggtgttagacagaaactgatgtaagtgaaaactttatcaagcatataagaaaacctgggcattttatattgtataataagtcttgtgagctgtgtacttttgaggcaataaaatagagccaattaatattatttgaaaatagggagcaatgtacctgtgttttacttgattttaatgtaaaaggtcttctgttttcagtaatgatggactgagttattcagatagaatcttcctgctgaaacagaaaatgttagtatataaaaagtgtatatctgtattttttttacctttttttttgagatggatttttgctatgttgcctaggctggtcttgaatttctgggttcaagtgaccctcctgcctcagcctcctgagtagctgggattacaggtatgtgccactatgcccaactaaaagtatatcttttaaaaaatggcttaagaaaaatgaagagccagcagcatagtggmgaattgctaggttagtgttggtgggagaaagcgagaatccaaagaggtaagcgcagtcttggcaaaccaaaaccacatttgcctttgaattcacagcattatggggtgaggaggattgaaggaaagacctaagrctcacccaaggtagattgtcctgtaggtcttgcagtgtaggagacccttcctgtgttaccctggaactccaaagggctacatcctcagggaagagtgaactagaactaacttccctgcccactcttagggactacatggaaggttgtcttggcactgaacggagaaaggtcaaaaggaagataaaaagtttgttccagagaaggtaaagtcaaaaactggctatcatgcagacttacagcccaaatctgtgcatcgagaggagatcagggaaccttaatccctgagcatggtttaatacggttctccactgggaatactgctagacaccttacagcagtaaatttatatcttttctcaaggaaggtatctttttaggtctttggaaattcctacaaattgcttttccagggcagtaagcaccagccaaagataactagctgtagaaggaagtgattccaatggtaatgacacttagaaatttactaatgataaatttttctgtattattctttataaagtgattctaaaaagctacatatatgatactttactgtaaactttgggatctgatactaaatttttcttggctgaatgaaatcaccttggaatcagtgacttcattgttctccattttacacttctttgaataacagtctgagtatgtttcatttgttgtcataacttttgtagtttaagaaagtctcacctcacgatagksmaataggtagtgttaggatttgctaatgttctctgtgacaaaccattctggaggtgtcagaaaataaataaaatctgagatttcttctctcctatgtggtacccagatattctgttttagaaatttctgggtggagctcataacttaaatgtttattttgtcatggttcgagaggcagtaagcaagatatcagagacactcctctccccaaggctgtgcttgcctagaacaaattgttttgtgtctatatatatccattatttcagtacacataaacttgtcaaatacaatcgtacaaaatacaatacatgggagtcttttttaaaaaacaagagtttatttagtagccaagctttttatatagtttagtgttttgattggtgattgtttttacttaaaatactattcagaggagtttttctttaactggaaaggccagagtcaaaattayatgagatagctacactgtatgaaaagcattctttcctagactagtactttctaaattcagatgaagtatctgaactatcccaggaacttgagacatgcatgcaatccctaatactagctgcttggagagacaccagccagtagcaaccagcttgccttgcttagagaatcttgagggacatttgtctactgataacatatccattttgtgtgtttttcttcaggtgatgcagacagaaagcattgtaaatttaagcctgatcccaatatccctccaaccttcagtgccttcaatgaagattatgttggaagtgggtggtcacgaggacacatggctccagcaggaaataacaaattttcaagtgtaggcatactttgggggagggatgggaatatggggctgatgttatgcatacaacaggaattagaggtttaaaaacctaggagccaaaccttaaaacttgagaatttccatactcttatttttcttcctgacaatatgtctcttctttcaatcacataccgagacatttttaaacaggttgaatgaggaaaactaagtgctatgtgaagggaactagaaagccactgggagctgaagctactcacttttatttatttatttttttgagacggagtctcactcactctgttgcccaggtcggagcacagtggcttgatctcggcgcactgcaacctctgcctcccaggttcaagcaattcctgtgcctcagcctcttgagtggctgggattacaggggtgcgtcaccatgctcagctaatttttgtttgtttgtttatttattttttgagatggagtctctctctgtcacccaggctggagtacaatggcacgatcttggctcactgtaacctccgcctcccgggttcaagtgattctcctgcctcagcctcccgagtagctgggattacaggttcccgccaccacacccaggtgttttgtatttttagtagagatggggtttcaccacgttggccaggctggtctcaaactcctgacctcaggtgatccacctgcctcggcctcccaaagtgctgggattacaggcgtgagccactgtgctcagccactcacttatttttaattagttaattagagacagagtctcgctttgatgcccaggctggagtacagtggtggaatcatagcttactgtagtcttgaactcctaggcttatacggtcctctttcctcagcttcccgactaactaggactatagtcatgtttcatcatgcctggctaatttattttaaaaaatttttttaatttgtagaaatttatagaaaaggtgaaaaaatagtacaacaaacattgatacatttactttacatatacatatgtaaattctgcaaccattgacaaagttgcagacatgttttatttctaaatggattgctcaggagtatgcatcatctaagaatgaggatgtttatatatatgagtatatataaatacaagtatcacaccaagaagtgtatactaatacatttttatatatttgtgcagtaatattatctaaaatacaatgtatagtcagctttcccacatggtcctaattatgacctttatagcttttttgattcagtattcaatcatgaatcacacattacatttagttatcatatttctttagtcttctttaatctagaatgatttccctgccaaaaagtgggaggagtgtctttcatgatattgacaattgttgcgtaaactattggtgattatgtcattaagatagtaattctcaaccttggacactcattataatcacctggagaagtttttgcagtcctgatgcccagacctgaacctcatacttacaaaactggaaactctcagggatgagacccaggcatcaatatcaatatttttaaagctccctagattattccaatgtgcacccaagattgagagcgactgcttgaagagaaggtacttgtagcattggcagttagtatagatcagtgaggaaattacagtgaggtagagccttgtatatttgggtgaaaaatgtgaagtgaatgaacacatagtggccagatattcagaagaacaaggacgttttctctgccacttttgaactagtatgtttgtactgtactaaaataacttttgtgaaaattgatctctattgagaaactctttgccagaggcttaaaaccagaatttgcccttaagctttgtgttggaaatatttagttcttagaattcacrttataggtttggattttataattgataagcctacctgactacttactttatagtcctnattttgaataattattataagagctttctgtcctggaataattatggctttcatttattgaaacaagtagtcaataattgcctagcactaatgtttaaataagaaagtgtttttctgtgtctttttaataaaatatcttttaaaggggaaagcatttcagtgcaagttactatgtttcyttctttacagaaagccatggctgaaaccttttacctttctaacattgtgcctcaggattttgataataattctggatattggaacaggtgagggatgagagttttaaaaacatgattctatggaagataaatgaagtgacaggagaatgtactgatgtgcctattagctgtttctgtctttgtttttcaaaagctaagcctctgaaggtaagtatgttgggccagttttctttgctgtgttttgggagtacagycttctacagaagatcagacttcaaaacgtagcctgcctttttgatcatgtttgccactgttcaaaagtcaagttttgaaagaaatgactcaaaataataatcttaataattgaggcagcatcttttttgagtgtgttcagtgaacactattattttctcttgtattccaatatttcttagctttttttaaaaaaacagttttgtatttcaagagctcctgagctttaggccagggtcagtggttcatgtctatagtctcagcacctggagaggccgaggcaggagaattgcttgaggccagcagtttgagactggcctgggacatagtgaagccttgtctctactaaaaatttaaaaaattaaccaagtgtggtggtccatgcctgtatcccagctactcaggaggctgaggtgggagaatcacttgagcccaggagtttgaggctatagtgagcggtgattgtgccactgcactccagtctggacaacagagcaagaccctatctcaaaaaaaaaagttcctgaacttaaaaaaagttggggtatagtttaatgtaactattaaccagtttttttgtttgttttttgtttttttgagacaaagtctcacactgtcgcccgggctggtgtgcagtggcacaatctcggctcactacaacctccgcctcccgggttcaagcgattctcctgcctcagcctcccgagtagctgggattataggcacacgccaccacacccggctaatttttgtatttttagtagacatggggtttcactatgttggccaggctagtcttgaactcctgacctcgtgatttgcccaccttggcctcccaaagtgctgggattacagacatgagccaccacgcacggccactattaaccagtttttgatagaacctaactataaaataatctgggccttctacatttttctgacactgtcaggtggcttctttatgcatctaaaactaacggtttgaggttctttcaggctattgtgtttttccccatatagtactttgtggtttaaaataatgaagagagcaccctgcaccaatgagagacttcagcagttatcagtcatggcgacatttgtttcatctacataccctcactttgccccactcagattatttttagcagattgcagatattttatccataaatgtttcgttacatatatttagaagataaggattcttttaaaatataaccacagtattattaatgcccttaaagaatttaacaataattctttattaccaattttatagtcagtgttcaaatwttcctggttgtctttaattttttgttgttgttggttggtttgaaccaggattcaaataagatagacacaaaaatttggttgatatrtctctttagttcctataaatctgtagattttcctttcyttttttttttcctccattcagattatctgttgaagatctaggatgtttgtcctagagtttcctttccatattctggatttgctgatcgcatacctgtggaagcatttaacattttcttttcccaagagataaatttctgggaggaaaactttaccttgtaattggacatatatatacaccctattaaaaataatttaaaaaaatttttaaggccagtcaagtgaagcagtgggagtagagaaggaacaaagaagtatgtaactggttgtgaacaattagttgtaaacaccactgcacttataccagcctataaaaataattggattttactttttagataagaaactgaggaatgaggacatgcattgttatctctcatttagaaatctcttccaactgggccgggtgcagtggctcatgcctgtaatgccagcactttgggaagccgaggtgggcagatcgcttgaggtcaggagttggagaccagtctgggcaacgtggcaaaactgtctattttagtagacactaaaaataaaaaaaaaattagccgagtgtggtggcacacacctaaaatcccagctactcgggaggctgaggcaggagaatcgcttaaacccaggagatggaggttgcagtgagctgagcctgggtgacagagtgagtgagactccgtctcaaaagaaaaaaaaaaaaaacttccaactgcagtcatatacatactttcatatgtatatgaaagtacatattacaactacttgccatttgggcacctgtaatcccagctactcgggaggttgaggcaggagaatcacttgaacccgggaggcagaggttgcagtgagctgagattgcaccattgcactgcagcctgggtgacagagtgagactccatctaaaaaaaagaaaaaaaaaatacttgccatttttatctggtaagttgacaaaaacagattttaaatgataaatcccagcattataaagattgttgtgaaactgctgtgttgtattttaattttttagagtaaattgatataaccctattaaaagcttatagagtaaattgatataaccctattaaaaatgttagttttacatatgatgacgagtctttaaaataaattcattcagtaattctggtccttgaaatttatcctaaggaattgatacaacgttgcattatataagaaatgttaacataagcccaattgtcctgcaagaggaatggttaaataaagtatatcatcttgttggaatgayacataattcttgaaagctggttgggaactatggcataaaaaaagttttaagttcatgaaatttgaattccagaatgtactctgagcgcacataaagaaaaatgtagatagttttgttagtgtatgtgatttttaagttttttctgtgcagtaagcaaactgggaaaataattgtttatatgcttataatgttttgtgccatgttcttgtttaatttctcaaatgcagtttttcttggtatctttcataggaattgatatgatttgctgctgtcttacatgtatatatgtgagaatatcatacatttttttatttgtttttcagaatagaaatgtactgtcgagagctgacagaaaggtttgaagatgtttgggtggtatctgggcctttgaccttacctcagactagaggcgatggaaagaaaatagttagttaccaggtaaggatgtttaatagtcaggtttatgttatctgtatgagattataatctcactttccattctgctttttatttttatttttatcattcaaaaaaaattttgcattctactttttaatttcacttattcaacaatatttattgaacacctattaggaatgataggcatagggaatatagtgatggataaaagcaactrttgacttcaaggaactcacggtttagagtggaaaacagatgttaacaattaattacattaaagtgtgacatgctgtaatagaggtaaacacacacagtgtggtcttgtgaaaggactgatgggctctactcatatgagtcaggaacgcttaaaagaggaagtgatattgagctataccttgacagataagagtcaggagtggaccctgaggattccagaggatggagcaggatgagcacaggacatttgtggtcaacatcagggttttgagatttatatatcattcataaaaattggagcttatggtacaaaacagtgtgggtggctcaaggggtatgaagagttccataacaacaggtggacgggtgagataatatgcgactttctattctatgatgaagacttgggttttaatttttaggcactaagaagtcatagatttgttttaagcgtgggagaaatatgatatttgggttttataaagagtattttggcagcagcgtgtaaagagataggtgggaaaagggagcatttgaagaagagattagaggcaaggagatgagttaggacatacaagcagttggagtgaggaataatagaggaacacaggaaagagtaaccatgaataaataacttgtttgagtgaggaagagggagaagttccaggataacaactagattgcagaccaggctcagtggctcatgcctgtaatcccagcactttgggaggccgaggcaggcgatcacgaggtcaggagttcgagaccagcctggccaatatggtgaaaccccgtctctgctaaaaatacaaaaattatctgggtgtggtggcgtgtgcctgtagtcccagctacttgggagtctgaggcagaagaatcgcttgaacccaggaggcggaggttgcactgagccgagatcgcaccactgcactccagcctgggcgacagagcaagactccacctcgaaaaaaataaaaataaaaataaaataaaaacaaccagattacagtgttacagtgagttgaataaatgggaagaaaagcttttcttctagaagcttcttttttttaatatgcaagatatgtgagcacttttatagactgaaagagagattaaagataggagagtgtaattagtggtgtgagagcttcagacatctaatgttgctgggaaattcttagctagcctttcatattggcaatttacaaagtggtatacctgaagagcaggtgttcttagaaaaagtttaacatttaatcttatcatgcagaaatatcctgaggattcttccaagagggtggctgaaatgttatactatactgtgaggcttacagagggcagggaacaggtggagtgaagcagaagaggtggtagagtgagtaaaaagaagcactgaaggacttgctaataaggccaaagaggaggggagggaacacctagctcagctctggaaataaagtagatatttaataaatgctggttaggtaaatgattacttaagtctgtgataaaatttaataacctgaggaacagattgaggaaccaccccccccccaaaaaaaaaccaaaacttttagagtatattctgtccatttgacttgcttattatcagcctgtctagatcagatgtgcagtaatgtccaagcatccaaggatttgtataggtccatatgaatagcccactttctctttttccacacaaaattatgacccaactacttctttttgttaagtggaaatgatagagtagttgttttcaaggatttgtacatccttggaaaattccagtagatatgggagtgaaggaagtcaaaggaattagtattttaaaattaattcatttaatatctctcctcccatattaatttctctcctctgattaacttgctaatttaattttagtatattttatagtcttaggagaaaaaaaggcttaaagccccctgtattatttttcaaatattaattattcttggtctttgttaaatcctgtttattttatgtcagaaaagaggctcttctagctttgacttgtatatcttaaatggttaaattacagttttatttgtgctttgtttttataaaattgaaaaatttatatcactagcctactgtgtagtagaacaaaaatttgtacaatgtttaaaacgaaaaattaaccaataattacaagcatttcactacatagatttttgtgtggctatttctgtaaaatatgtgttgcccaaatgccgtagtggaaaatgtattgtttttcttaagttggatataatttttaaaaatagaactgataaaaatatatcttctagttgtttctgctgaaaaggcccagaagaattggtatgtcattagcaatgaacacatcttgagacccagatatttgtttctaaaaagcatctcctgaaaagactcagcgcttagagaaatgactgatttaaggggtggtacagggagagtacaaaatggaacatcatatatcagaaagccaaggaagtgctcagacaaatggtggggatatgtcagaaggacatgtgaatcagcttgaaggagctcccacttactgtatctggtgctattgaatatcaaaataaaatggattataaacctattgaattaaataagaatacatactcaataaatatgtaaatacatagggtgtaaagaaaagcttctgcataccatagaatgtcagttaataaatttgcgagaatgaaagagttatacaaatcattttgcacacatcaccataattgattcaggcaagagtcatcactagctaaaactagtgagtgaatgttttatgaggaatagggtatttacataatctaaaagtatctcctcatacattatttattaatcacaaagtaagaaataactttacagtgaagaaacatcccattacccaagtgatcaagtnnnnnnnnnnnnnnnnnnnnatcccattacccaagtgatcaagtttagtattgctagtaatgggacttagtgaaacgctgtactcctggtgtgatgcactgagcaggataaaatatcaggcataccccaattgagagacattctgtgaaacagctgacttctactttacaaaagtgttagtgtcataaaagacaaaggctgagaaactatctgttccagattaatagattaaagagtcatgcaaacaaaatgtgtagtatgatcttagattagatcctagaccagaaaaaagttgctaaaaaggatgttattgggagaattggcaacattcgaggtctgttatctaatatacaaattagataattgtgtattttcagtattaaatttcctgatttttaaaattgttctgtgatatgtaagtaaatatctttgctcttaggaagtcatatcctgaagtgtttaggagtaaaatggtgtgcctgtgacttttaaaaagtttagggaaaagagaagagagtgataaagcaaatagaacaaaatgttaacaattggtaaatctgagtgaaggatataaaggaaggagttctttgtgctgttcttacaaatgctaagcttttaattaattcagaattttaaaattatatattaaatattatatagatatttaaataaaatattaaaagatatattaaaatagttatcagtgaaatgatactcaaacatgttcaagctagccttaaagagtttcaaaagagacctatcagctctcctcaccctagttagtgtcataatgatcagtcatgtgaggtcagtcaagatcagcttcctgaagagtatactttgagtaatagtcttgtttcttgtttttattttaaagacttgctggtcttaggtattctctttcagattctgggcttctaaggtcatatcattagttttccatgtctcttattaatttataggacctatgcatgttcacactggcaaatctttaattcagtaagtcatccgttcagcaaattttcaagtacctgtcatgtgggaggaaggtatacagaattgtaaatggcatgctccaaacttatattcttgattactttcttcctctcctgtatttcacatcctggcagtcatctctcactcttaattactttgaaccaacaacttttattaattctctttttttaaaataacttttacttagacataccgaagctctgaacacctgcagtattgcagaggcctctaatgggtttctctgcctccaattgcgttggctaccagtctatctggagtacagaaaccatgacagagaaagtatacgttgttactttcctaatcctcggaaccataaaaaaaggaataacattaaaagaacagaaaaggaaacttcatttatactgaaattagggaatgttcacagtcctgtatcaaggaatttttcaaataatatctgcaagataaagtgaaatttggaccaaattataaaggatgttaatttgacatgtctcctcttatcaaagcatgggacagggtactagaattagtaaggaagttcagacctaccggtagtagaccacaggagaaatttctggtgtttaacttggagcttatccctttatcttgcaatagtaggaaaggcagggtggttatagttgttaaaagcacatatttcatgtcagatctggccttggatctttgctttgatacttacttgcatgtggtcctgggaaaatgacctaacttctttaaagttcagttttatctgtgatatttggatagtagtagtgtttacctcaccgagttgctagtatcatcgttagcttggtagttagcacataggaaatgttcagtaaatattagctactattactcctttggaggctaacataagaatgaagaccagtgttttttgtattctttggtgcatgtactcataaacctatgatttctaagattcttttttacttctcctttcttatctacagaagcccaaaagtcaggtgcctctttattaattttaaagcacaatttttgtagtcttctaagtcgatgcttttgagttcatgagttcatgttatgttaggagttgtgaaattagatacttayattaaacacggtttagtcttgatgcttttttttcgctcatggcattaaagtcataactggcaaactatctttccttgaaattaaacttgaaaaatttttaaattatgcaattatatgtgcataatgataaaaatgctaaatcttaaaacatgattgtggaaatatatgacattgtaatgaaattcaaacagtacaaagcagcatgaaaaggtaaagtctcacttatactccttatcccactgtccagtttttatttgttttggcacttatttctatatctcagaataatgagcactaaaatatatttttaacttgtgacctgtcgyttattaacagttactttatctctataaaattatgaaatttattgtttatttcttgcactgcactatactctgctagtcatatatacttaattttagttcttccgttggtaaactttgcatcatatactttacataatatacttgarcctctaatcttgatctaccatttatacttgtcaaggtttgtagcatttacatttatgtttgctaacgataatgtagtctgagttttgcctgtagcagagtttgtaaactgaggcctcttatggcaagtccagcccatagaggtattttatttggctcacatggtatatatatatatatttttaagtttttcatagagatagggtcttgctctgtctgctaggctggagtgcagtgacaagatcgtagctcactgtaacctttatcttctgggctttcgagatcttcccacttcagcctaccaagtagctacgactacaggcatgcaccaccatgcccagctaatttttaagtttcttttttgtagaggtgggggtctcactatgttgccccagctggccttaaattcctggcctcaagtagtcctcccacctccacccctcaaagggctggaattaaaggcgtgagccaccacacctgactgtatgttattttttaattagtttataatgtttaataattgggagatttcacataaatccagattttagcttctcttaaatcagatgactccgtaacaattggcatatactcccataggcagccagtttactagacaagagtmtcaaccttctccttagattgaacacacatcttcaaatcactgtagtctttacctgccccattttactcacttacatttcctgtctagcccttgttggtctttgagtttgtaatccaagatctattagaaaatatttaaccagcatttatattattataagtgtgtatgtagtatgtttggacctataaggaaatagatataattctatatcattaaatctgtgccacttgagagagaaatattaccacaaacaacggaaaaacagaagtggaaggtaagggtggcagtgtattataattgctctttttaaaaatactttctaattcagataatttaggtcatttaagcatattatcatatgattttttaaaaaggtaaattagttttttcgtgaaaatatattcttggagccctctgactttctgttttaatttggattacttgtttcctccctccttccctttctccttcattccctttcttctttccttccttttattcaacagagacttaactaagcttttactaggtacctggtgctgttctgggtgcttctgatacagcattaaacaaggcagaaaagagtaccctcatggagcatgcattatagtggaggagatacctagtaagtaaaatgcctcgtagaaatataaagcacggtagaggattgtattagggtgggaaagaaagacaaggggaagtgagatagggcagaagcctaagtgaagtgagggagcaagccatatgaacagtttttcggctagagcgagtgcaagacacgggtgaaactgaggttggcacattcaaggagcagtgctctgctcagtgtgactagagcagcgtaagcatgaggaggagaagaaggtaaattatagagggaggcaatggcaggaaatgtggattgtattaagtgagatgggacacttaaacagtgttttgatcaggttagtagcataatctggtttacatttttaaagcacacactggcttcttgtgaagaacagaagaaagtgtggaacctggaaggccagttaagagactaatggaattgtctacatgagaaataataacttgaataggrtggtggtggtagaaatggtgagaagtggtatgatttaagatgtgcttggaagtggtcagcacactgatgatgttgaaagctatgatgagattatataagtgaatatagacaggagagaacaatcaattgaattctgaaccctggagcacttggacattagcggtcaggaagaagaagatccagcgaaagagtcagaggagcagcctttaaggtaggagaaatctaggggagagtgatgttccagaagctaagtgaagaaatcatttaaaggagggaatgatgagttgagaactgactgtttgcaatcccagtaagcttttttagttttaagtcatctatatatctgtccttctgtttctccttattatactcctagcttgggtccttaaattcctctttccccttaaatattatcttaaatccctcttttccaccctcccccccctccccctgcttttttttttgagacggagttttacggtgtcccccaggctggagtgcagtggtgcgatcttggctcaccgcagcctccacctcccaggttcaagcaattcttctgcctcagcctcctgaatagctggtattacaggcacctgccaccacatttggctaattttttatatttttagtagagacagggtttcaccatgttggccaggctggtcttgaactcctgactgcaagtgatccgcctgccttagcctcccaaagtgctgggattacaggcatgagtcactgcacctggctacccttttttatagataacttttttttgctttggtagagtatatcctcaaattttttctggaagagtcaatggatgataacctttccgagtccttgcatgtctgaaaatgtcctaaaactctgaagatgcgctcaggaatctttatgtatgacaagttctctagagtagttttatgtataccaccattttattttattttaatgaggatgatccctttatttgacttgaggatggagaagaagaggattatgaggtcacgggaatgtctcatgaggaattacccaaagctggtaacaccaggtgctctgccaggaggactctctggaaggggcagccagctcacagatgccctggatccctcgaggccagtcactaaaaagttatgaccatccccttcttgccagtctgccagggctccaggggggaaaagtggaaaattatctggtcctggcccagggccagctcctcggtgaggaactcgaagaagtgggtgctgtggctgcggttctcctcagtggtgtccatcatgctggtggaggagatgaacagctgcgcccagggctcagtggacctactcagcaccatggtcaggcccgcyacacccatcatgttcacatgctgcccttgttctgtgctccctggcccatgctcccatccttgggtttgcccaggatggaggctgtggcgcagagccatttctccaaccctgcaggcacttggttggcaggcaagttcgtgtctagctctaggaagggcatgggctgtagaaaaagagacccattcttttagagagtatttttctagcctcatatgaaggcaaaacaaaggcctgctacttttgtgagttgtaggataattctgcagatgaatttttttcagtcacacactttgattttgataccctttatttgctagagtactacttaaggggtggtaaaaatattaatatcagctttggctttttcctgtatattttatcttaacaatgtcatcacatccatctttcatcttccagaagttcacggtagttcttagtccagtaatgcagtactctgtcatttttcagcacttttatacctttttactgccattccatatatttatgtggaatatatatatggatatccatatatatatatatgtattttccttttaatttgcagaggagaggaccaaaaacccgtgttcaatttgccttttttaactggaaaccctactttaatctatatttattagtgttttgcaaagcaggttaatttgtttttgtctttgcttttagcaggttaatatttcttaatgttttatttggaaataatttcaaatttatagaaaggttataagaacaataaaaagaactcccctgtatctttcacctagatttactggttgttaacattttgccacatttatgctcccccatatagataggcatacacctgtttttgttttctgaaccatttgagttagttgcagatatcttgttcctttcctcctaagcattctgtcatgtaaccacagaataattatcaaattcgtgaaaaaacatatagaaatactacctaatatttagtccatattgaaattttacaaattacccaatactatcctttatactgttttttttttctgattcagtatccaaccaggattgagcattgcatttagttgtcatgtctctgtagtctcctttaatctgaactagcttctgactcagccttttgtcttgaatgactttgatatttttgaatagtacgggccagttgttttacagtatgtccctcctttgggtttgtctgttgtttgctcatgattcattatgtttttggcagaatgtaggagcagtgatcttgtgtccttctcagtgcattgcatcaggaggtgcataatatcagtttgtctgattattgatgattttaactttacttggttaaggtggtgtctaccaggttttttcaccatttccccctttggaatttataagtaatctgtggaaatactttgaggcgatgtaagcatctttttcgtcttcgaactttcactcaatagttttagcatccattgatatttcctgcctgaattagttattactatgttagttgctaaatgatgactttctaattcttacyccytaatttattagttgacattccactgttagagcttttccttgttatcaatgtagactcacagatttatttttattcaaagagttttaatgtttactgtgattgttcattttgatgctcaaattgccccagatttagccagtgggagctccttccagtgtctcctgtgtccttttgatgcatcctcatcattttttagcatttcctactttctggtataaggctatgttccatgttcatcttggccatcggccatttctccaaggagcactggatccttttagtggggattgatgtttagaaaccaagatctggacagcaattcagattgattcttgagtgcttgctctgctgtttggtttgtcaggtgtgttcaccacatttatttttagccttttgtagtggatggagagagccccaaagctcgtagtatatggattccattgcctttagtggctcactgttgagaaggcctttctcctctgctttctgtgttcttgtatttcaaaacagggattgacagacactggtcattaggaaagcagttcactgtgtttgtacattgtgtatgtatatgtaaagttgaatattgacttcacgaatccatatttctggaggagcatatggtttttcagttttctcagaagcatatcaaactgacatctacttttatatatttatgtttttcactaacaaatatctccataataatactgcttttattagttttggcattatatttcaagtcaaactttatttcaggtagaattttaaacctaaaaatctttggtgtatctgttagatgaaagcaaaatatagtttgttagtaaaataaatttgaaaaattatcttgaaattcttgccaagaatttaattgggcccaaatttttatatatatgcacacacacatgtatctataaacttgggagaatttggttaagaaatagagatgtgggaggtctacctaggcaaggtgaagagatgagaagcgataggatatatgctgagaaaacagttaagttagagcgttcatgtagggaaggagacaaaaataaaaggraagtttggggcctggtggcagaaacttcaaatgaccagctaaaaagtttaggcaagaacttcaagataattttctagcaagcagggcctttgaaaagtaggcaattaattataamacaaatatagataaaatgatgtcctttaattattctgggaaaggggacacagcattgcccagtgctggagactggtctgtttctctcaagcaacgaataatttgaatcatgaattcccactttcaaggcaatgtcttgcaattacgtacggcaattcagagtgcttggaaagtgttttgttttctcagatctagccatttaatatttactgcttgcttacaactatactctgaaccttattttaggaagktgtacccaataaaagggtttatttagttttctgtccaggcaatgaagcatatatgtgtttttactttgggggaagtaaagcaaatgaactggcatttcttgagggccaggtataccaggcagtatgtaagtagctttatrtatgcatctcattcaatcttcactacacccttacaaaaaaagtagtgamcattttcttttatagacaagaaaatcaaggctttaaggatcragtctcaggcatatagcttataattgtcaaagagggtatccaaacatgggtctgtctgacaattgccagtcattcacagtgttactctttgaagcgctcaagtttatagtaaatgaattgctgtgctgttcatatacaaaagcttaaggttagcagataataaaagatggtgtggatggagagaggagttacaagtgatacttgctagcatgcaaaaataacagaaaatgggccaagaggaggattccttatagccaggcagaaatgtctgttagaatatgtaggaaaggatcacatcatcatagaacttgagtgaatatgagcctaagggaagattcgtagcagtgattttatcagaagtgagtcatctgacagttctaatcagaatcaccccctttattatatagctgaggtcatccctgtgctttctctgatgttcctgtttcaagaagaggttgattccagacaagtgaaacatacctgaagattctggtttggacattataaatggtctgacaagaaagtgagcttcagattttagaactcagtgatggtggtaatgttagaaatatttaacaatctgtgttcttttataacagcactttgcaaacttccattatactaaccctaaaggggaggaaattgaaaatgccctcaggagtcttgagacatcatttgaagtgatatgggagtaatatttttttttaagtctcttgctttatatttagggaaagcttttgttcatttccatatctatttgttttaatgaaagttaaattattttactggttgtctccctaccctcaccctaaattttcaagtaccattgacagcctagaaagagggtgcttgttttactgtgacttagtaggctgctaccctttggcctggaacaggtaccccagtgtgagaagtaccgtcttccagggtttgtgctgccacaaaagcatctgctgaggctctatagataacacagggggcgaccacattcttgttgactttaccacactttgtgactccctcacttttcatgttccttccccccctcaggttcggatttcctgtttatcaaactcccatggtttctttctttcacttgatcggcatgactttttaagggcgtggtctcttgatctgtccctctagttttatttttggagtttctttttttgtcttaccaggggaatgtaaccaaatatatctatctaattctagcaggtacatattttttcctcttgatgctgcttaatattttattggaggcacatttacagtatgtatgaccttacaaatggcaggcttaatatgggtattgtttgttttgggtctcttctgggtctgggtggcacaggtggtggtggcaaattgtcatttctgtctcttggatggaaggaaacaagctcaggccagtatataagaaaactagcttcaggttgcgaatgagtgccagcttatgtattgtattttctagttaactcccagttgacttccaatttttgctacagtcttgagtagagttcagtgcttcttgggaatttaatagcagcaagggtttcctttgcaaaatatttttatacctaaatcttacatgaaaagggttgtttgctgactcactgattaactagacttggtttatgttaagcctttgagtcctttgttacagacatcatttgtgcccaagttgctttctcctcctgaaaccccattgctgacctgtaactagtctaatcttgcttgattatacgtttcccccgcccccatccctctgtaaaaccatcttttgtaccaaatgccgttgtatcttttgaatgatgtccactacaaaatagctttttacatagatcttgtagattttgaaaaatttttaactaacatgtcattgtatcttcataacaattctatgagagaggcatttataaaatacaaaatagcaatccacccayggggatggctgttacgtattttgtaaatgaagaaacaagaaatgggtggacgcgacttgcagcttagtggcaaagccaggtttgaccaggtctctgggcttccagtccaccaaacctctagtagtgtttagaaacatttctggaagtctcccaatttttccaaaagtaggaaaaatttattatgtagattgagttgtctttaaagagacagctctaaaatattttacgattgatgttgttttaaaaaattgtcttaaattcaaggaagaaacggtgtgtttttctgaatayccaactaggacctgtccctatattagacagattaaagatgtttgcttcctaagaacaaagcagactgaatcagaaaagagattagtgagtggctaagtttttatttttctccttagttctagggatagtattttacccccttgaaatagtgtgagaaggtcatgggtagaaggatcacacctgtgattcctaataggaatttctgtttccatgaggtttctcaaaagtagaatcgaggtcctttagcaattgtaagagtttttaaacacctatagaaatggtacatttgcataaagtaaagctgtagaactgaaaatgtccaacgtctttacttttggctggaattttacgagcctgattagctctgcatggcagcaatgggcatgttaattatatttgaaaattgccgtttgtttgtagacaaggagtccatgaggagagaaaatcaagtgaatgttcttgaactgtactgcagtgatggggaatgtccacaaggtggcgcaaagactttgtttaactgctggattcctagctagcacctggaatacttgaagcccctttcaccttctccctctttgcaaactatggctcagctgcatctgtgccctcagttctggtccccagcttcccctgaatccccttcgtgctgttatttgggctttgtattggtacctaaccacattctacctgtagtgaaagctgaaggtcttggttcccactctaggtggtaagtttcttgagtggaggcaccagctgcatatactttaaagcatattcttttctgtatttccagcaatgccaggcacaggacctctgagttgcattgttgaattaacatcttttggttatttgtgagttaattgtggacttccatagggttctccctcagtatatttttggctttgaagagtatgtttatcttcccagctgcataaatgaatttttggggtgaaatggggattttatgtttgtagtacatagtttcatagactttacaccacaccccgaccaaccactttcagtaacttcgaagacagttggttatggaaatcattcccgtgcacgggtcttccctgaagctctgcaattggtcttggcagtgggaccttcatgtgtgacagacagcagatggccatggagttcccaggctgtgtgccatgtaggtaggagcttgaaaaaagcagaaaagaaacctcctttgtagctgtcgtgtctctgtcttatttgggctcacaagaaggaatcttgctgcaggcagagctgtctgatcaggaaagaaaactgactcttaccagggaagggcccgggaggggcagtaataccaatgagcatgttttagttggattatgtcagttattggggaccattaagtaaatagatgttgagtattttctttttcaaaaaagcctttttgttttgttttgttttgttttgagatggagtttcgctcttgttgcccaggctggagtgtagtgtcacaatctcggctaactgcaacctccacctcccgggttcaagtgattcttttgcctcagcctcccgagtagcagggattacaggcatgcgccaccacgcccagctaattttgtatttttagtagagatggggtttctccatgttggtcaggctggtctcaaactcccaacctcaggagatctgcctgccttggcctcccaaagtgctgggattacaggcatgagccaccacacctggcccagatgccaattggaaggaaatttgaaaaggtttagtaataatgttatttcattaatttcagccaaaccacacaactaatttatgttttctaggcctgaccctggctctggcttcttcattgtgtggatacctttccaaaatgtttgatatgacaacatatttagaagttctttgatcacaagcccaaggatgtgcaaaactcagagcaaacagcatttacatttatgtaatttaattttaaaaattagccctaattgaagtgatcctggagatggtaatgttgacttgacacctggctgcttctctaagggctatctgtttagttccctagtgaatttcataaactaaggccatgtttttatttctagagctgggagtacccaagcctgcagttttgacctttgaatgtttggagcaccagaagttctgattatgagatgaagagaaaatgacagcttttcttgtctattaaaaaaccaggactcactcatggcattcctttgtcctttgtcctacaaacagaacagagactgtgacccctgatctttgggttggcattattttatttttattttttgaggtggagtcttgctctgtcggccaggctggagtgcagtggtgcaatctcggctcactgcaccctctgcctcctgggttcaagcaattcttctgcttcagcctcccaagtagctgggattacaggcgcctgccaccacacccagctaatttttgtatttttttttagtagagatggggtttcaccatgttggccaggctggtcttgaactcctgacctcaagtgatctgcccgccttggcgtcccaaagtgctgggattacaggtatgagccaccgtgcctcacctggggttatattattttaaagaatgtgatcagaattgacctgttaaatactcttcttgtatgtgaatctctgagtcagtttattatttttggcagttgaatttaaattcattagaacagagtgggatggcttataagtacatttcagcaatgcattaaataagtatttttcagaaaaaatttgcgaactgttagcacaaattggcatcactaatatggctgctttgtttttaggtgattggcgaggacaacgtggcagtcccctcacacctttataaggtaatcctggcccgcagaagctcagtatctaccgaaccactggcgctaggggcctttgtggtacccaatgaagccatcggcttccagccccagttaactgaattccaagtgagcctccaggacctagagaagttgtcagkactggtgttttttcctcatttggatagaactagtgatatccggaatatctgctctgtggacacctgtaagctcctggatttccaggagttcaccttgtacttgagtacaagaaagattgaaggagcccgatcagtgctcagactggaaaagatcatggaaaacttgaagaatgcagagattgaaccagatgattactttatgagtcgctatgagaagaagctagaagaactcaaagctaaggagcagtcaggaacccagataagaaagccatcctagtttttatctcaagatgtgtcataccgtctgtaatgaagcaggcatgccctctttaggctaacatattttagtggctttgctttttgctttttaaaaagtttttctctttaagagatgtggtctcgccrtgtcatccaggctggagtgcagtggtggaatcatagctcactatagcctcaaacttctgggcttaagcaatcctcctgcctctgccccctgagcagctgggwctacaggcacacaccatcaccctcagctactagtggctttgctttaaagaaacagtggaatcctaaatttatgactaaaaattcccccaaaagatgaaagatctacaatgtttttgtcagtattatatttgactcaggaactaattattaakggagctttgacacctgcagatggagggctgatcttgtgtcaagttaacaggaagactgcccacagatgacactgcatttgtatccctgtggatgtagagtattgggaaggcatttgtttagtttcatgcctccaaaccatgcattgtctgtgatgtatctgcccagccttctcagaactcaatgttgtacatttttccctctaggacctgaattggtcttggaggcagcttttagaaatcctctrtgtagttcctgtccacatgcactatatatttgtttcttytttctcctctcatgaatctgctcgtttctctacttctgtctacgtagaagcactcrgcaactagtttctgctcattaaatgtgttctatatactaggctcagtgctttacatgtgttgtctcacaatgactctctgaggtaaatacactatccccattttacctgtgagaaaattgaggcttagagagcttagtgtcttaccygagtttcacttttccaaagtagtcatccacaaagtatgaggcagacagatctaagagaagaaagacagctgaggtagattcaaatcttttctgacatggatggtggctttttactcagaaatatatacctatttccatgggtatttgtgggcctgaggcatgcttggcaagaagagtctggtttctcgtctgctatgcaagccaaagggactttaatgttctttgaattgaaccctccttagctctgtggaaagagacagtcaggaatatttgggaattagacggcaatactttgtggggtttattagagcccatgcttgcctccagagatacagttcttttagtgaccagatactgccaaattgatgtgttcttgctttccaggtgagctttttgttcttaagattaagaaacctatgaaggatctgcagccaggcatggtggctcaggcctataatctcagcactttgggaaatcgaggtgggtggatcgcttgagcccaggagtttgagaccagcctgggcaacataatgaaaccctatctttacaaaaaaatacaaaaattagctgggcgtggtggtgcacacctgtagtcccagctactcgggaggctgaaatgggaggattgcttgagcctggcaggtcaaggctgcgatgggacatggtcatgccactggacgccagcctgggccacagagggagaccctgtctcaaaaaaagaaaagaaaaaagaaaaaggtctgcccacaaaatcactagcttattatttgcttcctgtgtgcctgcttgtctacctagcatagtaggccaaaggtccaaaggcatttagcattcctaggggaaattgtggctgtttttctgagccagatctcttgatttgggtttacacggagtcctttcatggactatcctgagtattgtcagtaaaacgtcttggggcataagaacttgtctgaatctgtcatacataccactgctgtcttttccgagtggtattacaagaaagatttttgtggtgtgtttgttctaagagaaatgccaaggctttcagataaagataagatgataatgattgacattgttctgctcttttatttgggtaaaaaaggaaagttgaggggtcagaacacagtagcctgattagtaccattctgttttgtcacactgttccccattagcttgtaccagttctcctcttctcggggatgtagagccaaaatgtcactgtgaccaaacaatctgttcaattttttctcctcaatggagaggtgatggtgtggcctgggtgtttctccaggagtgtgagtgggcagctctgtgggataagtcctaggtacctactgcccatctctagaggcgggcccccaactcccttcccctgttgctctgttctgccgacctgcattgccagcagccttggagttacttatgctcttcttgctcgttcctctccacctagatggtagaatctcttatttttagatcaatgaagtttttttttttttttttttttccactggggcattcctgagtttatttggggcacacccgggtgagggccctgcccctagaagaaggtgttgggcctcttggtgaagtgtggcttgtgcggatagtgcagtacctagtggggcagcaggaagttgatcttggagtcatggaactgcttgacggctggccggcggcacttgctggctgtggtctcctccaccttcatgatctggacggagtgggcccgggcgtggtgccaggcgcccatgtcttggtagcactgggtgacagcacccgcggtggtcaggtccccatattcccggcacatgttgtgggtgctgctctgggcgtcacagtgcagccagatgccgaagttcttcacccgcagggggcacttctcaaacacctgcccacagtagcaatctctcctgaagacttcttcatcttctttaactgagataccaagtaccaaaagcaggacttggcgacgacatgattaggtgcaaagattcgcatgtggtagaggggtagtgtatggcatttgggggtgggcaggcagcgacccaccaccttgtactctcatagtgtgcctgaggccttcatggcgtcctgtcygccctcaccgccacctgcaaaaggacagatcaatgaagtttcttaggtttttatttcttttgaaagatgctgcctggtcattgtggaaaatggagataagagcttgtaatacaaagttgcagtctgccagtcctcatttttatttatatttatttatttatttatatgatttgcacatcagacaacctttgaaaaagtttgttagtgtgtaacagtggtgtttgaaatgtatcaacactttcttcaagagttcccccaaacaaacttgaaatgtaaataattggttagaggttagaattttcctcctgtcataccgcttcagccctcaatgtggctgttgatcatcctggactcagatgcagcataggctgagcgtgagattctgcccttctgttctctttaccctcagacagtccctggtctgagggaaaggcagccgtggaggaagtgccagtctggacaggctcttctgctggaaacccacatcccaagtttctctctaccttcagtgatatctttattgtgaaattccaaactgtggtccctgaattgaggctgttgcaccaatattgttgtgtgttgccatacaacaaattgcaaaggttaggagactggatgtcagcccttaattaaagacctgcaaatatttctgccccttgcaccttgaccttcaagcaatggaaaacttgtctttccttcagacctttgattagaactctaggctgagttctatacttggaatgactctgaatgttaccatgtcacctacctgtgtcccctggcctcatccttgtgagtacataagtgtcattgatatcacctctgtgaatcgcaaacttcccattagcagcccatccctgaacctaaccctgcacccagggtgctgtttgttccctgcccaccccttcataccttcactctgtgtgtccttccccgtcctggcacacttccaagtgccttctgtatcctcactatagttcattctgatggatttggtcagggctgggctcacatcaggtgtgaaactcctgctcctgcctgtctccatgcctagcctccatctgggatgctttcctggatgtcatccttcttggagattgtctatcggggatccagtgttcctttttccagtctagccccaccttcagggagcaaacctcaggtcattagggccaagcaagatggactgcattgacacaggccccatgcaattcaggacagtgggggtgccgatgggctttcctactcctgaacatgccaactgtggtcaaggggtggactgcccctgagtgtgccaagtacctctaggggtcactgtggcctagtgtcactgcaagacttagtttcagctgtggcaccaccccagtatggaacttgcagctctgtaagccacaaagaactcagtcagcctcagacatcaggcaccaggcactcaggctggatggaatagcagaggttatcttgtccagtgggtctcatgtttggctcacatcagaatagcctaacagcttaataatgttcccctaaactttgttttgagaaatttcaagcctacagaaaagttgaaagaagagtgcaatgattgcccctccccccaaattttgtctcgtttgctttctcttttttccaaattattaaaagcaatttgctgttttttttaaaaaaagtaaattataggcatgacacttcacctttctaatacttcagcttatattacctaagaataagaacattcttattttttaatataattttaaattttattataattttaaaatatcacatctaagaaaattaccagaatttgatatcatctaataaacaattcctattaaaattggcccaggtgttccaaaatgttgtttatgcaattttttccctaaatataggtttcactcaaagttcatgttgttataactagtctcaatctagaataatctgcctcaaaaaatagattctctaactcttcttgaggttttgattctgtagatttggtgtgacgttggaatcagtattctctttttttgagagagagtcttgctctgtcacccaggctggagtgcagtggcgcgatctcagcatactgccacctgtgccacccgggctcaagcgattctcctgtctcagcctcctgagtagctgggactacaggtgtgtgccaccacacctggctaatttatatatatttttagtagagatggagtttcaccatgttggctaggctggtcttgaactggcctcaagtgatccgcccaccttggcctcccaaagtgctgggattacaggcgtgagccaccacgccagcctggaatttatattttctaaacaagtaacactgatgattctgctgataaaccagggtttcaagccagactggccctctactatacctccaccctctcccaatacatatagccactagacaggagtcctttgtcagataagtggtctttgagcttccgaatatctctaagggagtatgttctcctatccctttgggcccccagctatgcaattttctttatagtagatcttcataagatgaagttgaaaccttcccttgtaattcctacccatcaatgacaggcccaaactgccattccaggccacacagaactggctggcacctcctttcacctgatagtccttttgagatatgcagcttataaagacatgtggcatctcatgtcacgctcaggtgctcatgaatttcaggcccttcaccatcatgattttttatgccttcatgatgtggcagccacatctgagcaaagcattcaggacgcagtgatagcagtgctgaactgagtccaggggattgaccgctcttctcagggacgctccacttttcacactatataccattgcttcctgtggaactcggtccaactaactgcctcaggtctttttcacatgatcgatctgctgtcaaatcactttcccgttatgcacttacagagccaatttttggagcacaaatgtgagattttatgtgtgcccaactgttaggatttcatcgtgttacagtttctacccatcttcaagtgagttcacattcttgatgatcccgatttggccatctgacatggttagctatgcatccgagctttgagatagcagattgaataaacaagccttcaatgcgtttgttaaaagcattgaacaagacagagccatggaagatccctctggtagaaaactcactttacatggcaacccacttcacatacccagcaagtttcgtgtgataatgtgctctgatgttttctattaagttcattcctgtttgtttgtttgtttgtttgtttacttatagagacagggtctcactttctcacccaggctggagtgcagtggtgcaattgcagttcactctaaccttgtactcctgggctcaagcaatcctcctgcctcagccttctgagtagctaggactacaggcatgtaccagcatgcctggctaattaaaaactttttttttctggagatgagttctcgccgtgttgcccaggctggtcttgaactcctggcctcaagcaatactctcactttggcctccctaagtgctgggattatgggcttgagccaagtcactgagcccatttctgtttctttagaaggaaaaacactgaattgattgcattatggagaaataagtctccatcacaatttgcctgtgagtcactctgggatagggagagtgcctgccgcatctctgggtctacatggcatgactgggccaatgtttggatgccagcagtgggcagggaggctgctggggaaacttggggtcccacataatcatctttccacttgtcagtgcgggacagttgaggacaactgacttcatccttctgaatcaggttcctcacctgcaagcaggttgagaaggacctgcaggattggttgaggattgaataagataacatgtgcagtttggtaagctcttaataaatggtagccagttactgtgaattcttgagaatgattattggtgtctgatgaaagtcatcctgatctgagagagtgaaggacagagccgggcctcggtatggtgttaacctgaggtggtggaagtggttcaatctcttctcaaatcctaagactgtgatgtgttgcaaccagccctttgagcatatccgtgctttacagtttgcagagcgctttccagttagagcttatgcagtccaccatttgaatcggcgcgattcatcccatttcacaaacgaagcaacaaactctaggaacttaccaagattttccagtttccaatctaatgtttaccctcaactcccccctcaaggttgttgcagttattttcatttgctttcttttttttaatatatatatatattttttattatactttaagttctagggtacatgtgcacaacgtggggtttgttacatatgtatacatgtgccatgttggtgtgctgcacccattaacttgtcatttacattaggtgtatctcctaatgctatccctcccccctccccccaccccacaacaggccctggggtgtgatgttccccttcctgtgtccaagtgttctcattgttcgattcccacctatgagtgagaacatgcggtgtttggtttttttgtccttgcgatagtttgctgagaatgatggtttccagcttcatccatgttgctttctaattcggtcattcatgcatttacccatttcagccctacagtgccctgctaactctttagaggcaggaggataatggagttgattcttttctgaggcccctgcagggttttgcaaatagtgagtgacactcaagagatgttttggagttatgcagcaagtcagaaacgtggagcttatcctgcttgagtcctaatgtgctcatttcacttgggcagggggcgcagggacacagaagggtggagacctgggtcctgctatgtggctgtgatcaagcctgggtcttgaataacacccgggtactgagcattgctgaactcatgcctgaactcccagggcactttccccgggcaccctatgttaggctctgcagtctcgtctgtggtctgaggcagtcaccctggtgggaagatggaagcgtggaggtggcagtcagagtgcgctgagcaagggcttttgtgtgtttgaccctcggagaagcagagctaaaattaggtcttccagctgtgtgcaggtgtgaagccccacccccttacctacccccaaccaggatctcagaattattcccatcctctccctcctccagccccagttactccacaggcacaggatgaaatgtcctacctctggtgatgcccggatagaaagatctacccaaatgtccttcaaggctgcaggggtgggggcagtgacaggcagtgaccttaagtttgctgagcctccctagcacctttgaggtcttggtgcaaccggggcccaactggctccttcttagaccaccagacaggatgatgttttggttccctccctgcacacatgaagggaccctggcttctcccactagcctcttgattgatgtgctctgtgcccctactctgcccaccacttcagagagagcctttgacccctcgccacccatcaccattcagacacagatggaagagagctagtctgggggcagagatggaagagccctgccctggggggtcttatccaaggcaggtggagcccaggatgatatgatttgattgtgctctctctccctgcatgaggctagaataggaacagactggccctcctcagggataaatgtgcccctcactcctccttcactatggcccttggaaccctgctctcaggggttccccagctgaggctcatactctttcatgttctggtctggggtgagaacctgccttctacttctggctcctcggtgtacctgcgataggatcttagttaagtagccgctcctcactcttcagttcctttatctgtaaagtgaggggttggggctagacagtgtccagcatccctcctctttggtgtctcttaattgtccagggcagagcaatccttggagcaaggcagcctgctgcggtggtttgcagaagaggcacagtggggcgggctggaggccgcaggggcagagtgggccgagggcctctgatgaggtgtgaatgagggaggcagagcagggctggtgtggacagccctgtcccagccctatctcccgtctgcgacaccctctccacaccccagtgctgataagcgggtgtgagccacggccgccttgtgacaggcccttcggcagggagggtgatggtgggggtccactccacttctgaattcagacgtcagcatctttttcccccaacccccattgccctgtcagactagacaggccctagcaaccaggcaccctccctgacagtccctggcttggagatttgtttctgctccatgtggcctcagccttctcagagatggtaggagacagacctccctcagtcctttctggcaaaktgccaaggaggatgaccacctcccacccccatcaggcccgttcctgcagtgactgctgatgctggggcctggcacacacagtgcttcttatcactgggcaaacttcaatggctgatccttttgtctcctctcctcaccccatctcctctatcgctgtgaccatcagcttccagtcttccccctccagctccctagcttttgggccatttctgtgtctgggcccacctctttcctctaaggccactgttcaccagaaggctgtgccagaaacctcttatttctggattcactgggatggggtggagggaacggaaaagtcttggagaaagagagacagaaacttggagctctagggaaggggaaggagaagacaaataggaccaagccagaggctataggaaacccttcagggtggagggtcttggcccaggtgtctagcccctaggctctatggcactgaactctgaacttccttccatgctctaaaaggctctcttctgtgttcagatctgaagactattttgattagcaggctgcatccatactgctccgggcagtcccactgtatgtgtctgtggggaagggtgtgcctgtcctcctgtgtgcattcctgtctatgggttccattctcagcctctgcatagcttaggaggcatcagagcatcctgagagcacagacttgagccaggcttattagcctggggtcatatctttgccatcttaaccaggtgggggagctacagcaagtagcgtaactgccctgtgccttggtttccccatctgtaaaatgaagatgacaacatggatgatagataataccatataccttgtagaactgttataagtaccaaatgagctaaaataagtaacgtgttttaaaccgtatcgggtacaatgtaattattggccattagtaatatttttgtaaattttattttaatataatttcaaacttagatacggaaaagttgcaagaaattcccatatgccctttatgcagattcagcaattgtttatattttgcacatttattttatcattctctctttcctcatatatatgtgtgtgcttatgatgtactctgtattcgtatctacyatatatagtatatatacacatacgcacatgcacacacatatttttttcagagtcacgtgagaataagttgaatacatcatgccttttttgccctaaatacttgtgtgttttggtaaggacaaggatattctcttacaaaaccatagtatagttattaaaatcagaaaatctaacattggtctaatactgttattgaatccacagtccacgtgtatatttcatcagttgtctcatcatatcttctttctttctatttctttctttctttctttcttttttgagatggagtcttactctgctgcccaggctggagtgcagtggtgtgatcctggctcattgcaacctctgccttctgggttcaagcgattctcctgcctcagcctcccaagtagctgggattacaggcatgcaccaccacaaccagctaatttttatatttttagtagagatggggtttcaccatgttggccaggctggtctcgaacccctggcctcagatgattcacccacctctgcctcccaaagtacaggcgtgaactaccaagcctggcctatttctatttctttttcctgttccagggccactcattgtattcagtttccatgtctctttcacctcctttaatctgggagagttcctcagcctttctttgtgtttcttgaatttgacaattttgaagcgtgcaggccagttatttgaagaatgatgttgctcaaatcctgttggatgcgtcctcattatgactttcaggtgatgtgttttggggatgattgctgaaggtgatgtgtctttctcagagtcttacatcaggaggcacattatgtcaacttttccacttgttagtgatattatctttgatcacttagtttaagtggtgtctgttccccctcctgtagaattactattttctctttctaagtaataagtaattgtggggagatagtttgagactatattcctcatcaaacttatacccactagtttttgcccactaataatkttttacaccatcattacttctaaacttactawttggcccawtcatactggctcctgtgtcttttgacatttatcttcatccgtctttaagcacttttttgctttctggcacaataagatgttccaggttttctggtgttttcctggctctagccctgaatcagccatttcatcaaggagccctggttccttttaatggagaatgatatttagaaaccaagatttgggtgctgtaggtgctcattcatatggtgtgttattgcttccagttggtcctttttattatccrttcatttggatacaatggtgagggcgccactgaagaaagtgtggcttagggatggaaagggggaaaggagccagatgacctaggtagagactcccctctccccctctagctctccaggtcttccccactttctctttcctccctttccctcttcatcatgacctcatttcccttttcttgatcaaaattcctctggagattccagctgtgggaacctctgaaaccacttktgcagctacacgtgtgataccagaggcagacaactatgtgacctttgtgtgtgaaaagccaaaggcaaagacaatttatgagaaagtttttgctgagaacaatctggtgacagggtgattggggaagacacatttggaagatttccacctggacgtgttccttttccctgcctgaaaagcactcagagcagagcctgtgtggaggctgggatagggtgctgtgggaggtctgttctccagataagcctctycaaggctctggggmccaacgaggaggatttaagtgcctggtgaagtccactctctgtgtccacaagtcacagagacagtttaaaatgwaataactggagttcaatgaaagccacttaaatagctttcttagttatgtaaatgtagggtgaagaatgagtggccttggtcccccacctggagttagtttattgttttgmgactagatccaaagcctcctctccctgagatctctggtatgcaaagctggtccctggaggaagcgcatcagttgacagagggagcccagaatctctgtgagggaagaaaacactatccaactgctgctcctgggatttgaagtgaagagaatttgttgggatgaagtgaggtggccacaataaaggcgctgggccatggggcttctgaaatgagattaatatgrggaacacctgagtctagggtggtgcccggggctwacaacaagaacccacctgtgtttcctggggtaaggctgtccttagcatagtgtgaggctaactgctgggagctctggagactctgccatgctgacattgtgcctgtgctcctggccagggactgccacctagatatgagtcacagtggggggcccctgggctccagttgactttgaggagtgatactgtccctgtgaggacgctatgagtgtcctcaatagtgatgtggtagtgctggtcagacccacaatccctattttcyttgtttttttgtgtgttttkttttgttttttttttttaaacacgaaaaaacaaacaaacaaaaacctcagaaagtgaaaatccctaaagggagggactggacgtgtcatgtaaattcttgattggttaacagaagaaattaaaagtggattgagggcacctttgtgctctgtgcccaagggaaagttcaaacagctgcattcacagataccagagacgccagtgtcttcaccatcaccagcgacgtgtgggtgctgcctcaacaggtattgggaacttgctcttgtttacagcttggctcctcatggtagctgtaggaggcaggatctrggtggatgggacctgggattcattcttagaataggtccccaaatggtcatccattttgcttgccgagggctctgtggggcagacgtaggaggcctgaggggctgcctgggaggtgatctgaggaagcctcttatggcactttcatggctctcctagccagagaccagagacacctcctctcccacttctgagcgctccatctaccaattttgcatccgaaatagctcccaagcttctcattctctactatccccatcctggtccaagccaccctcatctctccctatagagatcacctgactggttattctccctcattgcactttgtactcccctaccccgccatatagttttgtaactataaacagccttgtttgtggatttggaggtgaatacctgttttcctaacttgattgtgagctacatgaggacagggaccttgtctggttttatctataagatgctcaatgtgtggttgctaaacaaagagtggacagacgcctcggtttccccagctggtccctatgtaggctgatctcacttgatgggagtgagtgagtgaggaaggggaccctctggttctggagcctctcatctggccctgctgctcagtattcattgatccttcaaatgtcagtgtgtccacaggagagaaagggtggcaggtagggctggcagaaggcagatgtgtggctttatagtgatcctatgcttggggctgggtgggtttcagctggggtgtgggagcagagaaattggctttgggaggctctgtgatgggggccttgcagcaggtgggtggtgagggcagcatggaggtggtggctggcctggaagggaggaggacactgggtggctggggtgccaagagagtcctggtgggggctggtagctgggaaggctgggcagggctgcccgcaatcaagagggtgacaatgagtatgaagagtatgcttagtggaagtgaaggcctgggaggctgggaggaccagaggttcgtctcccccagccgcgcccttgctccttgctctcatcttcctcacccttcctgcaccctggccgcttgggacctcctcttctccctgatctggtctttcagaaatctctggcctctaacctctataaccccttcctctcccagcctcccagccctgtccactccccgagtcacatccccaccagccctcctgccctgcctgcagcctgggccctgctgagctgccgtgcccttctctcatcacctcctcctcgctccctgtggcaccttggcaccagccccagatctgtgtgcactgatttcccaacattcctgtcctccttcccaccccactgccccaaagggaggggctcaaggacttgagacgcttcccttggggggcccagctttcccccagagtcagggagggatgaaggcagggctgctggagggctgggcccgcagacctgtggagctgcctagtgggaggtagagggctggagtgggagagcatgcggagccaccgtgggggcaggagatgcagccctgcaaggccacactgctctccccagcttcccactgtctattggtcttgcctggtgtcacctgcccttcccagctctgcctctgacttctgcatctcccctgatcctttcagtttctcatggtccttcttatgggtgattaaggagttgggccctaggccatttctggaaggcaggagttggaggtgagcttcctgttgccttgtgtgtgtaactctagagtcccgtaggtgggtggctgctggacgtgccctgggaggggaaagggacctgtaagggtgtgtccataaacagagcgattctagaactcagggatgctactgtggacaggacttagagattgttcagcccccaccctcttccacaaccatttatagatgaaaacattgggctttaagagggaaataggattgacatgaacgagtcacgtaggggttagtaatcatcatcactgtcatcatactagacatttattaagtgcttactatatttgagggatcattgtaaattctttacaaatcttaattttcatagtcctcacactaccctgggaagcagctgttgttattttccccattttacagacaagggaacagagactggaacagtgaggtcagtttccccagatcacacagaaagcctgtgtcagagcagtggaagtttatcacacacagggaggcttgctccttccaatgatgatgtaagcgtataagcattgttgagagctctttaaaacagtggcagacatttcaccaaagaagatagaggaatagccaataagcacatggaaagatgctcacattatgggcacggtggtgcatgcctataatcctagcactttgggaggccgaggcaggaggactgcttgagcccaggagtttgagacgagcttgggcaacatagcaacacccccatctctacaacattttttttttaaatagctcatgcctgtagtcccagctactcaggagcctcaggtgggaggatcgcttgagtctgggagttcaaggttacagtgagctatgattgtgccactgcactccagcctgggtgacagagtgaaaccccatctcttaaagaagaaaaagacatgctcaacatcattagtcatcagggaaacccaaattaaaattacaagatacacctactcaaatggctaaagttaaaggaaaaataaggctggaaataataaatgctggcatggatatacagcaactggaactctcattgctgattgaaaagcaaacaaatgctttggaaaacattttgacaatttcatataaagttaaacatacactattaatataactctgaaattcaattcctaggtctttacccaagagataaaaacatagccaggtgtggtggcttacgcctataatcccagcatgcctgggaggctgaggcaggcagatcacttgagctcaggatttcgagaccagcctgcgcaacatggtaaaaccctgtctctaccagaaatacaaaaaaattatttggtatgttggtacatgtctgtagtcccagctacttgggagactgaggtgggaggattgcttgagactgggaagatgaggttgcagtgagtagaggtcatgccaatgcactctagtctgagtgacagagtgagactctgtctcaaacaaacaaacaaacaaaatccaaaacacataagcccacacaaacatctatatacaaatgttcatggcagctttattcacaatagcaaaaaatggtaaacaactcaaatgtccatcaactattgaatggaaaactaactgtggtatgctcatataatgggatactgttcaacaataaaaaggaacaactgatacagacaatgacatggatggatttctaatgcattatgctaagtgaaagcagccaggcacccaaggctacaaacgaaaattcctgcacttatatggactctccagaaaaggcaaatctataggaacagaaaatcgatcagtgattgccaggaacagcagactgaccatgaaggagatgagacaacttcttgatgtgatggaaatattgtatatcttaattatggtgatggctgtactgcttaaacatttgtcaaaactcatcaaactgtkcatttaagaagggtgccttttattgtatataagttatactttcctaaaactgattaaaaaataaaaacaatgggctgggaaagggaagaaaataggatggtcatggtcatccttattgcaaaagtgacctctaagacttggaagaggaagcaggggagctagggctgatccctgggggaagagcattccaggtgggagggaacagccagtgcttcagtgccaggccaggacatgcttggcctgctcaggaacctgtaaggagtcggtgttgctgaagtggagcaagaggccggccgtagcggggctcagacaggcaaatgggcaagggatggatcagggctgggtaagggctgggtaaaggcttttcctctgggtgagatgaggctgctagagggctttcagtgagcgtgatccgacttgattttaataggaccaygctggctgctgtgttgagagcccgctggggacaaggaccagtgaggaggccactgcaagaatccaggagagagatgatggcggctcagaccagcgcagtggcctggttgaacttgggatatatttcgaaggtagagccaacaggatttccggccggattggatgtagggtgtgagaaacagagaggaggcaaggatgacgtcaagggttttggcctgagcagctggaaatccagccgggcacccccgtgggggctgttgagtggttttaactgtctcctggggcctgtgggtgaagctgagacagagaccgaagggaggggctgagccctacccctggctctgtggctcagggaataggctgcacatactgattattccattaccctttatttattggccttattggcttttgtcatttccttgtctcctgtctggagtgacagctataaatgtgatagattgatacaggatacaggagccccaattatctctcttaaaccggcttctcttaaacagggagggctctcgggcaagctgtccctgccctctgccttctttgccacaagtcctacagtcttccttacagaagtggcctggttctgccagggggggagcgatgcctgggaggatgagtggcagacatgggccccaaggggagatggctcccaggacaaatactggaggcaagttcggccccctggccagtcgcaccaaggatcccagtgcacactccctgatgctctgcctcacacagaggccagcacagagtggggcaggcgggaagacaggacatactgctggctgctcagcccacatccggggaagggggctccactctgaccttgcatgcctttctggaatccgagccggcctgtctgtccacagaggctgggatgatggggcttttctctccggcagcaggtgcctggcagctgccggggatgccagctccgtgagctggcatgggaggaagtgcttgtcaggatggtcattacacgtgctgggctcaggctggcctggccccgacccctgccactcaggctggcttgggatacccacatgaggatggcgcttcctgaagggaccctggggtccctctgggatgccctcggatggagcttggcaactgccagcctttaagtatcatttctgaactaagttcctcacccatcctctctgcttgactcttctctggcctgtctgcctacctctgtccctgggaaagtcctgagggccctggcccaaggaggtttgggacaggaagcctgacattcattctcgggatttgaggcatctccctgtgcccctcctcatccttgacagactgactacagcctctgtgccttgcatgtgcacaagtgcatggtgaatccacacgtgtttatctggcaagaatttcaaatggtcctgtgtctgacctccttccagaaaaacagagtggaaggtgggactgctggtgagaaaaggggcaggaaacttgaggggacaagaagggttcaaacggaggagcaggtccaggggaactcagcagagagtgaattggctgatcaatcagtttgtttcttctgcaaacattcccagctccttatctgtgccaggtgctggggcaggggctgaagactgtgttatgaacaaacaggtctggcctggccttgcacagcccttagactcacaggtgggctgcacagtaagtgtgcttagagcaatggtggggtgcaaaggtaccgtgccagcacacacagactctcagaagcagccaggggcaggagacgctagttcctgctgttcctctgagcccatcagtggctgccctttggcatctttgccaccacacccttgcctcactctcagttgctgtccccagttgctgtctctgcctgtaggagtgcctgggcttctgtctccctggcccctcccaacctcctgggctttgagtctcgtggccatcagggctgatatcggaggagctcctggcacgggggtagggaagctgccaacactgctgtggcccccagggtgagagctgacgtctgtccaggagcatctctctccctgccaagggctgagatctctgggctgcatgctttcccgctgacacaggagccagcatccgtcactcacagggccacccgctgcctggaccccagcctcaccccagagtgacccagtgacagctgcagccttgctgcaagcacaggcctcctctccctgcctcagccacttcccaggctcactcactccttccaggtgaacccacccacatcccaggccaggtgagggcccacctcaggcagccagggaagaccccacccaaggggccgagaagcgtgggctccaagccttggtttcaagaacaatgcgggaagctgcccgctggcccagaccaaggtggtagttaggatccctggagcttgtgagaaagacctgactcccctcacagcctcacagtggggtcccagcctccagcttccctcctttcctcacacataatagtcattgagttaccaccatgtgccagccactgagctagtcccgggatgcagtactgagtaaagcagacatagactctgttcttgtgctgcttttaagtttttttcactgaggttcctagtaagaagtttattttctatcactcaccaggatacacacatgggcactcacccacattttatatagagctgaatcaacagtttctccaaacaacactcactcttaccacatgggatatactgctattttaaattctgatattctttttaaaaaaaaaaaaacaaaaaaaaactggacatagtctgccatttgaaaagctctcgtgtggctggggaaagatgattagcccagtggtgaatggactatccctgccccggtgtggaccaaggaaccaatatcagaggtttcagggcaccgaaccacatgcctctcctatgaagttggtttacaagggaaataaatggcgccacccacttgggcccctagtcacatcaaggatataaaaaggggtctgagagagtggagggctgcgggaccctgggagtcagtttcttcggagagagctgctgctgtgctgtttccaggaccccagccttcccttgcaggaggttctggcaaggcttgtggcaggcacataccaccttctaactctgggcaggccaagggggcttccagaacttctcagagagctttaagatgttggagacacagagaactgggcctccaggatccaagaaagctcaagtggatgagcgagtgtgatctgactcccgccctgggaacccagaggaagggttgcaggccagctgcactgggggtggctgcagagggcactgctgtcagggcatgaccccacccagagtaggtggggcaagtgctccaactgtttcttatgggccagaggtgggcaggcgaagagagagccagtgtgcaccactgtgacagggccacctggagggacaaggggtcttgccaggaagggctaggctcatggttcccatgggcaaaggaagacatcataagggggtacccagaagagagagcccacaaaaatgccttgtgtgagagcatccctaaccatctgcctggcctggggaggagaagccaccagccaccctgtctctgacaagtcatgggatcgaatgctctcctggcctggctgagtctgtgtttataacacaaactgactgattaggtaaaataacctaagactgagctgcaaagctacaggatctgcccgggttttctccagggccagggaagatgatcgccactgaataaagctaaagagacaggaagggacagagacaaaggctgggttatattacatcagggattgtgtttgttcacataatgactttgcaggtatttgcaaggagtgtggagggctgtggcagggaagcatcaagagtggggcacatggtggggaggggaccgggctgtgtcaggggaggttcccagaggaaggggcattcagggaggtctgaaggctgagtggaaaggagaagagtgttctggcaaggctgggaggaggaggagcctggagcctttgaggggttggaagagatgctgttacagaggttggcaggactggggagacctctgaggggtttgccttgatcctgaggcaatagaaagccactgtgcagtcttatccagagggtaattatcttggatgaaaatatcactctggtagctgagtggagaagagtttggaatggatgaggttagaggaaggagcttccctggtggcctccatgaggcgatatgctggcctcacccaaggaagggacaataagatggagccaaaaggtgggatttgaaagacacgaaggaggtggagccaatggggcttggaccaggtgaggggtgagaggtgagggctgcatgcggctgaggatggatttgtgggaccaccttcacagataggctcagggtgaggcagaggagctcagagttggctgggctgggcctgaaagctctggagatgtccaaagtaagcagctgaatctgctggcctggggatccaaggagagacctggcctcaggaaaagatcaagactcttcaaagccataggaggggaaaagaacgtgttttccactctttctgggagagagcacagggcctaaagaacttgaacattagtcagacaccagaggatgttctgccaggggaggctgaaaaggcacagtcaataagatgggaggagacacaggcaacaaaataaaaaatagacaatggagttcatgaaaattaaagttttgtgcatcccaagacattatcaacagagtaaaaaggcaacccacagaatggggaaaaatatgtgcaaatcatatatgtgataaagaattaatatccagaatatatagagaacttctaaaagtcaacgacaaagaaaacaaccaaattcaaaggacctgaatagacgtttctccaaagaagaaatacaaatgacgaataagcacatgaaaagatattcagcataactgatcattagggaaatgcagatcaaaactacaatgaggccgggcacagtggctcacacctgtaatcccagcactttgggaggccaaagtgggcagatcacctgaggtcaggagttcgagaccagcctggccaagatggtgaaaccccatctctactaaaaacacaaaaattagctggtggtggctggtgcctgtagttccagctactcgggaagctgaggcaggagaatcacttgaaccggggaggtggaggttgcagtgagctgagatcgtgccattgcactctagcctgggcgacagagtgggactccatctcaaaaaacaaaaagcaaacaaacaaacaaaaaaactacaatgagataccatctcagacagattaggatgactgctatttgaaaaaaacagaaaataacaagagttgatgaggatgtagacaaactggaacccttgtgctgtgggagacagtatggcagttcctaaaaaaattaaaaataaaattgccatatgaaacagcaattccacttctgggtacctacccaaaagaattcaaggcaaggtctcagatatttgtgcactcatgttcacagtagcattatttacaatagctaaaatgtggaagcaacggaagtgtccctcagtgggtgagaggacaagcaaaatacatacaatggaatattattcagccttaaaaaggatgtaaattctgaaaatttatgaaaaaaattaagaaaaaattctgaaaatcctgaaaaaaattcctaaaaaggaaggaaatatgttgtgacctggatgaactttgaggacattatggtaagtgaaataagccagtcacaagaggacaaatattgtatgattccacttatataaggcacttagggtagtcaaatttgtcaaatattatatgattccacttatataaggcatttagggtagttgaatttgtcaaatattgtatgattccacttatataaggcacttagagtagtcaaatttgtagggatgaaaaagcagaatggcagctccctggggctgggggaaggcaggagtggggagttagtgtttaatgggtgcagggtggtaatttgggctgacagaaaagttcttgacatggacggtggtgatggtggtaccacagtgtgcatgtgcttactgctacagaattgtacgcttaaaccatggttatgatggtcagtgttatgctctctcagcaagttccccagacttgctcaggagaaggccatctcccaggccctcggtcctctgctaccactcttgtcaaatctcagcacaaggacagagcctagaccaggtcatgtaagccatttattggtttgttttaaaaatatgtattttatttatacatgaagtttggtgagaagtgctcgattagttcagacaacatctggcacttg

SEQ ID NO: 95974 - DNA, 13121 bp, Homo sapiens
cttactattggcctaagtaatttcttctttgtcaccagcagagagtgcagcactctggctgcacacctgctgggcctaggcctgcagcatgccatgcagccctcctgaggccctacagagcaggcagccatgggaggtctgcaaggtgctgtgcaggacactctgcagctgtcccacctggcagtgaccttaggagacacttagttcactccctatctaggcatcatgtgtttccgttatcgaagaaaagagtcaaactttgtaaaatatttggagagatttattctaagccaaatttgagtgactataacccatgacacagccctcaggagaccctgaaaacatgtacccaaggtggtcagggagcagctgggttttatacattttagggagacatgagacttcaagtacatttaagaaatacattggttctgtccagaaaggcaggacaactcgaagggcggggaggggaggggagcggagtgcggagcttccagtttataggcagatttaaaaattttttggttgacaattggttaagtttatctaaagacctgggatcaatagaaaggaaatatctgggttgaagtaagaggttgtggagaccaaaattttatgaaacagatgaagcctccaaggtagtcagcttcagagagaataggttgtaaaaatttcttagacttagggtttatgttgatgttaatgctggagaggtataatgaggcatgtccaacccctacttcccatcatgacctgaaccagtctctcaggttaaattttaagagcaccctggctgaggaggaagtccattcagatggtttggctggcggggggcttagaattttatttttggtttacaccattagctcagaggctcattgatgatatccctcaagtctgacaagcggagacctcttctggtggtgttaccgcaactctggcctgagttcttggctcactcataagtaaaaattaacaccagcgcaaataggaatttatttcaggcaaagtttaataggcttgtggctctagcagcacaacggagcagagtacagaaaaggagtcctgatgttagctcccaaaagggctctgctcttgtcattttaaggaagttgaggcaggaaaaaggagcaacgtgtaggcaatgtttaggcagggtcttctctgcacctacacagtgaggtctcatgcccaaacatgaggcacatgtgtcagaggcatttgaaccagagtcactccatcttgaatgggggctgggtaaaataaggttgagacctactgggctgcattcctgagagattaggcattcttactcacaggatgagacaggaagtcggcactaagtacaggtcacaaagaccttgctgataaaaagaagtggtaaagaagccggccaaaaccagccaaaacccaccaaaaccaagatggtaacaaaaatgacctcgggtcatcctcactgctcatgcattagcatgctaaaagacactcccactagcgccatgacagtttacaaatgccatggcaacatcaggaagtcaccctatatggtctaaaaaggggaggaaccctcagttctgggaattgcccactcctttcccagaaaactgctaaacaaggagtaatcaatcccttgtttagcatatactcaagaagtaacaagtacaagcagctgagcagccaaagccactgctctgcctatggagtaggcattctttattcctttgctttcttgatgaacttgctttcactttactctatggactcgccccgaactctttgttgcgtgagatccaagaaccctcttttggggtctggatcaggacccctttctggtaacacatgtacagaaaatggcagataacctccatcttgggtggagattttagtattacaatgagattgtagtgagaaaaacttggtgaaagctcagcactgaagttcatcttgttgcaaaccagctggatctggtcatgttcttatcaggaaggccagaatcctgcttcagtaatcttggaacacatagctgaaagagagaaatggttaggttcttccttttttggttttatgattaggaatccagcctggtcagctaagttaggatggaccctctctctgctactgtgactggggttagcttgttaaaacagacaagaaggtatggaaaagaatatgcccacatgtgtaaggcccactaggatgttgattatctgtcctgtctgccaggaccaagtcccttccctatactgtctcagtgcaggggctggatgctttgtctgtgggactgctactcctttcttttcataagtttatcctattgttgctgagcagcttaattgacaaaatgcctgaaatcagagggatttcatctgccgaaaactggtgtctaactgtaagcaaaagttggtttacggtggcaaaaggagaatgaaggggatccgaaggacaaacctgactttgcctctcttctaccctccaccccactatcctctggaagagagttgcccggtgttgggagctcaggagtgtcttcagaaatctctccacgaagcttcctgccatctgtcatgaaatctcctcacaagaccacatcagggaacatctcaaaatcatcctcagaaccctgcaccaatcatgtgctgatgagaagccggtggtgagcagttgtacaagatccacagagcttgatgggaatttgtcaacccccaaatgtttctaaagttgatcttatagatgctgaaaatgtcaccctccctttccggcctcttgtgccttgctcctgtcattcgaagctgcccatctgaagccctctagcctcaacctgaaggttattgccatggatctggcccagatgcacgcctgtcaaggacctggaaatgacctttacattgaagcatctgctgctctgtgtgcaggctctgatttcagtgtgtcaggaggactgcagtgggtccagcttgtagctcatggaagtgctggtgatgataatggctggctcaggtgccacaggcctccatggcaaggtttaggagacaatgaactcgatggttgcagtggagaagtcaatgtcagccaggatttctgtgggaaatacacagatgtggtcaaccacatcacacaacgactggactatgtactctgcagaacttatgcagctcaacgtacttgtcactcaggctctgttgtaaaagaagtgccacaacacttggtccccacacccaatgcctatctccagccagccagagacctgcagatgtgtctaaaacttttttccatcctgtccaaagtgctgctgaggccaaaggacaccatcacctcccaaaggcagtttcacagctaccctgagacagtgataaaggacatctgcaaaggcatgtgggaggacagccattgtgtcctgcctctgggtgctccctagctgcaaggtcctgttggtcaaacagatacaggaagtgtagtagggaatactgatacctcaaattctgaccaccctggaagaatattctcaactgacttagttaattccatgcaaaattattattattattatttttttaacaggaaaatattctgatttttatttttgcacgttattctcaagtacacaattacaataatgtcacacatccctatatgattttctttttatgtattttactttctttacaaagtgtacagagggagggacatacaatatttaataggatatttctacagaacaataacttatattatgtccttgtaaaaatctgtacctctttaaaacatttaactgaaacatccattttttttagctttgctaatcaaaattgttttaagaattaaaactaggttgtaactaatgtcagtacataacagtgactacaatttcattttctctttatacagacaagtatgttttatcatattcacttgaccaaacccttaaatgccttttaaaggttttaatgttgtgctttaaaaagaaaagaactgtgtatgattccagagtatgtaagagaaatataaaatgtgtgaagtgttgtgttctttatctttcagtttatttaaaaaaatatagttaaatgacccaatcatttatattttctgtattaattttataggatttaaaattaatacatatattttttaaaacctctggtgatgtgattaatgcagataaattcattgagatttaccctgaactctaaaaacatctagatgacattttcaacaacataataatagcagctgcatccaccttaatcacctggctgaaatgcatcaaaagcactgatagatagtcttatcatcaaaacaacattcaatatctgtataaggaactccttgttcatcttgatgattcagagagcgccatccaggaagcaattttagaggtcctttaagatggcggcatcctatcctcagatctgatgagggagactgatgctgtcatctacaagcagcactctgcattggctgggagcagcatctgtagcacatgcaggccttgctggccacacagtgaccagcattctgggctgggagcattcagtgtgatggctaggggtgggaacagacaccaaacactcattctaacctggaccagaatttgtgtcctttaagcctcctaaaaagaaatttcatctttctttggtttctgtctcctgaaatttaatatctcagtgaacagactaaaaggagtttgaaatcttaacaatcaataaagtttttcccattttaactatcatggaacttaaaaagttatatagacatatacattaagagtattttttttcttaggtcagtaatgctaacagtgttgaaaatagagtaaccagatctaattttgcttactctcttataagtagcagtaaagtaaaattatattttattttctatacccaagtgcctaaaggactttaagtgagtattgttatcataagctaatatttatgttaatacaaaggggaaaatgttgtgtatactttccaacaatcaaatattaataattatgctttattgtttaaagatttaatttaaaatatttattttttttaagtcttggagaattatatttcaattgttagtctatgataatttctcttactgttctacatgcaagttttcaaaaatattcctagaaaatgtgatatgcacatagtcttagtctatttaggctgctataacaaactacaccctgctcccagcccctggccagggaaggcggcccctccccagtcaccccacctttcactcccactacaaccaggagaaggtattcctgagccctctcccaccctcaccctgcctccccacttccccggctccagtctctgccagtggagcccactgtgccagacagtttcaatgctttgcaaagacaaagacccctaaactggagggaggaggaggaggaagaggagcggagagagaaggaagaagcgatgtgagctgggaagggggcgagtatccgggacactcacacccttttatctactccaaactccctcatgcccaaatcccagaaactccagcgtgtctccagccatgctggtaccattttcagattttaccttctttaactggaaatgtcaatgagaggaaattaacatctgcaagagctgcagtgagcaaatgctttgagcttgggccaggacaattccatttggggacctgagatggacagtcactcagcctatggagatgaagaaactgaggctcagagaggttaagagactccactaaagtcacacagccaatgacagccaaccttctgtggccttcatcaagcttgtcatataacccaccatgtctctggtgacagcatgaaagacaaagccctaattaaggatcatcagaaaccacactcggaggagggcggcagagacagcttccctccctgctataccaagacccttccttcaaggtcctcactcctcagagagcctggactgtcacagaggttaattacctcttagcttcttcggatgggaatggaaatcactggttaaagctttatcaagagacgttatcagctctttaaggattgcagaagaataggctactttattttctgaaaaggagggagttcctgccacccattgcagggaggtcgccatcaggacagtgaagatggtgaccctgcggaagaggaccctgaaagtgctcaccttcctcgtgctcttcatcttcctcacctccttcctgaactactcccacgccatggtggccaccacctggttccccaagaagatggtcctggagctcttggagaacctgaagagactgatcaagcacaggccctgcacttgcacccactgcatcaggcagcatgggctctcagcctggttcgatgagaggttcaaccagatagtgcagctgctgctgactgcccagaayrcgctcttggaggacaacacctaccaatggtggctgaggctccagcaggagaagaagcccaatatcatsaacaataccatcaaggaattcagagcagtacctgggaatgtggacccaatgctggagaagaggtcggtgggctgctggcactgtgctgtcgtgggcaactcgggcaacctgaggcaattgtcatataggcctgcgatagagtcacaattttatgctcaggatgaacaaggcacccacggcagggtttgaagctgctgccgggagcaaaaccgcccaccatctggtgtaccctgagagcttccgggagctgggggacaatgtcagcatggtcctggtgcccttaaagaccatgaacttggagtgggtggtgagcaccaccaccacgggtgccatttcccacacctacaccccggtcctcgtgaagatcagagtgaaacaggataagatcctgatctaccacccagccttcatcaagtatgtcttcgacaactggctgcagagccacaggcggtacccactcaccrgcatcctctcggtcatcttctcaatgcatgtctgcgattaggtagacttgtatagcttctgagcagatagcaaagggaactgacaccactactgggagaacaacctgtctgcrgggtcttttcacaagacgggggtgcacgatgcaggctttgagtctaacgtgacggccaccttggcttcatgaataaaatccggatcttcaaggggagatgacacagtgaagggttgaggatggatgcaccatcatgcctctgcgtttccagccccagcatcttgccagagccagtccatccgggatcttggagggtcagcctcaggtgtgtgcccaagtgccacttgcagcctcttgcacccagccgttggcagcatctactcagcaaggtcactacctatcatggcggagcatgtctcaaaacctgtcttgggtggggacaacgtcccccgactgctgccccagggctggggagacgctggaaaaggttcaacctccacatattaaaatcattttggctcctggggtgggattggggaacaaatgtggaagacgcccatattctgagagacagcatggtttcccaaggaagactggcagagaaacttgagtggtgattacctccagcacagagaaacgctgggcggtatccgcgctgggggtgagatgctgcccttctttgcatgaagcctggcctctcccttggcgtgataaccctgtcatccccttcttcccaaagctcatttaagtgccaccagaggcttctaccccaaagattttcacagaaacttgaggccaggtgccgtggctcacacctgtaatcccaacaacttgggaggccaaggcaggaggatcccttgagcccaggagttcaagaccagcctggacaacatagtgagactcctatctctacaaaaataaaatatttttttaaaattagccaggcatggtggcacacacttgtagccccagctactagggaggctgaggtgggaggatctcttgtacccaggagttcaaggctgcagtgagctgtgatctcaccaatgcactccagcccagagtgagaccctgtctctaaaagaaagaaagaaaaaaggaaaaaaaaacaaaaaacttggcaccatgtttctaactcctgaagatgcctcttcccaagcagctattcctttggataatcagtctcatggctctaatcgtggcaagagcagatctgaccgcttccatatgcctttgcatttggggaagaaaagcacgtattggctgaaataaggcaaaagcccctacttggggaaagggatccccaccagtggccccacttgctccgtagctggaaacatcttttctggtttcctgagctggcacctgaattagaacaaagctctgaggatattcagcgccccctagcagtgcgtcagaatgggaccatacattctttctcagactactcaatatggtgcccttaaccaccaaggccacacaggaggcttccagcagcattttccccaagggcctgagctcagggtcaagtccctgctggccaccttggggctgtcactggggggctgggccagggacatcccaggaatggcgactggcacatacctcatcttctcgctccccaactactctcttttcctcgttaggcttcctgattattgattgattttttaaaaattcaattgacattgtttgcactgtggctctgttggtggtcctggtgtgttggtggtcctggtgttttaatgaagcttgcctcacccagcagctgggaaatagggaggcttaaggaaggtttgtaggagtccttggacttgggatattgggggtatctagggcttggatggtttgtggaatgtccacagcatcctcccattccaacccaaccttccttcttcctcactgtggactggaattcattctcaggctaggagtctccaaaactctatgaaaccttattgctgctgggtggggagtgaagagtgacaggcatggtggggacagtgattgttggctccagttactaatgtttaagcagaaaaaccacttttctttaaaaaaaaaaaaatctcttaaaaggccactgctgccttgaggaggtgtgaccttttcctggtggagtgtgaaggaggcatggggcctgtgctcccaggctcagggaaaccccctctgcacactgggagggaggagcttggggacaccagtcatgggtaaaggtcgcttcaggccattcacaagagtccctggaagttgcatgctaagtttgtttttttctctgaatctctgcatatgagcatttttctggagagaggttccatagcttttattagattctcaagggttcagaatgtggaaagtgttaaacaaacaaacaaaaaacctgtttcagctttaacatcctccaaaactttaagacttttttttttttctgataaaggctggtaatcactgagtcatcattcacaacagacatcctcgaagggcagagctcacagacatgtatgacatgaagaattcagcaaacgtttcttgattggctagtcaaacactgatacaaagagcgatgctgtctcctgaactcttcctcttctcctaaaagctgactccatttagggatgaccggctcaggctgagcaatcgacttctctgggttttctttgagtaagaataggtcccttgaaatgaagatatgtctgtgtctgagccggatgctgcctgggtcggtcgtctgctctctgtctggtctccctccgttccactaggatggtcaagctgtgagatatcttccagcccccaaatccagctctcccattttactgataagaaaagcaaggccacattgcagttgggtggggagtggagagtgccaggcatgggaggacagtgattgttgactctagttactgatgtttaatcagaaaaaccacctatcctgttaagcacgtttcctaaaaggccactgctgcatggggaggcgtggccttttcctggtggagtacgaaggagggaagtgactggcaatcaggaactggctgggacagatagcacaagtcagagtttcagcaacaacggggtgttcctggcaccatgtttaaattgtctggaggcgggctttcccagcgagtctctattcagcatctggaaaaagtgtaaccagaatggaggtgtctgactctcctctgctctctcagcactgagctgtgtccgcaggctgcctgcatggccctaggcaagctcttgtctctgccttctcacaccctccagtgcaggagatggcatttctcttatgagacataaaagaagcccagcagacatctcttatgtctcattggcttagcaatgggcacttaacagaataaaagccaattgttgtggccagaactaaatgcaccagtttggcttaaaccaaatgcaaccctggggtgaaggtggctgggaattagacaagagtgttagccaaagggcaccatgcatgctgtcagcaggagaatgaggagcactcttgctgggcaggcagtggcaggggctccctcaggcccctgaatcccagcctagggctctttctactctgcaggcagagagctccttggagaccggccctgggctcaggcagggagtagacgggtccctgcctgcagcacccagagctgaacctgaagccacaaagataggctgacaaggtggcccatgaagtgtcagcaacatcccagccccctgggtctccccagtgagtcagggtactgatttgctatagctgagctacatgcccctcccctcccctcagtcaccttttaggggagaaaggagggcagatttgtaacctccggtgctctgcagggatcctgggctggaagaaagttcataaatggatgaatgccttttaaaactctggctagtcctagcatcattcagcaaagcatttggctaggcttagagagaaaagccagatatgagaaaatagaatgtaaaatagaaaaaaaaagtcaagaagggggagagggcagttaagatctgggtgattctttagggaaagggcttgttgagaggttttgatggaatcccattctctgatgtggccagaaagccatgctagaggccagtcccacctggatgtgactctggcttcttggcaaaggtagaataaaaccacagagaacatttagaacagggatgtttgctttgaggtaatctgaaaacaagtaacagagaaaccaaaagaactcactctccctcacctggttaggatcaaaactactttatgcagggaagcccacgccctgaggggccaccgtccagctaaagatcactggatgccaggcatgtgtcatcaggaaccagcacctgtcctcgcccctatgaaaagccctgggggtatcattatatccatcatgaacatctggtttgcagcaaatgtgactgcatgccaccaggatcatcctgccccatggactgggctagctagttttgatatagagtcaacctccctcttcttgtttgccatgaaaacaccagctcctgcacccctggggtgctacctgacacctgtgcaaagaaaaggaggaagacttagaagaaaaggcagagacaggcaaagcagcatctcagcttgtcaggattaggatattaccgattttttttcttatcaaaagagcactgaatttcctactgacagtgagccgcctttgcacctcctgttctccctcccagcctatcaggtgataccatcacccagcctcatcactcagcttcttcctagtacaaaactgccatcggttgcatgttctgagctccgggatgtcagatttaaccatagcctgcatcagggcctccccgtccaagcccctgcctcttagggtgattatgggtttattcccttcctcctacacagtcgtttccctccactgaattcccttcaaaaccaaagtttcttgagcactttttcttctgtgcagtcttgtgtgtttggctgttggtgttttaaaatttgctctctattctcccttacctctctccgtgttgttgtgaagctgagcactggttgggatgcatctgaatgatgttagcaagatcctgttttcctcatcccctgctctgttttatttattgttgaatatttccaatgatccaaatcaaagtgaataaaaaaagagctattttattaaaaaaaaaactaccatagactgggtggcttataaatgacagaaacttatttctcacagttttggagtttcggaagttaaaggttaaggcactggcagattcggtgtctaatgagggtgcacatcctaatttacagacagctgtcttctcacctgcccatggctaaaaaggcaagggagttctctaagctctcatgtcccagaggcctcacatgacactgggaattaggtttgaacatatgaatttggtggggatataaacattgtgtatggcacacatattctaatttatagataatttaagtagataattattcacatttattgaaagggttattttctttacgatggaattccctctgggttctaattagttgcctccaactcattcaaatgttactacaatacctttgggcaaagaagccagtcttcaaatgcgaaaggtcagctactctccaactgtgttcatgaaggcctgatctcaggactcagtatttcctaatctttttgatagccacaaaacagatgttccagtttttgaacataatatgtctggcataatatactagaaaaacactagattaggaagaaaactaggttctagtcttgactctgcatctacaattatgtgaatttattcaagccatttaatgtctttgggtcatcctctgtgaaacaaaggagttgaacatttagatgatggtcaagcatcctttctgtgctaatactcaataattcaggagtatggagtaaaaataatacattttaaaatgttctgtaactataaaacattggcatccgacaccagggagaggccatttcctgatggtccacacctattgcactaaagtgttcattgaatgcagatgccagtgagaagcaacttcccgggcatgtgcattaagagacaaaatggtagaacatgagcttccgggggcacaacaccagaaaagggaagaaagcctcaaatgggcatacaaacaactttctaaacacactgcttgtgctcacctcccaagtgtaacgagggcactgcacatccaggcatttcaccttaa

SEQ ID NO: 95975 - DNA, 161754 bp, Homo sapiens
  misc_feature (1)...(161754): n = A,T,C or G
ctccctgatgtctcccacccagcccacttcatgttccctggaagtatgtacatttgcaacaccggttagcactggcttctctctaacagtgccttcaaaatgcaaatactttgaccagcccttcataccccagtgcaatttagaccatcagaactccaggcttagagaatttttgcaatgtgttgcctttaattggggcgagatgaccagggaattctgtaatgagggtgaagggaataaccgaaggactcaattgagggtatgaagaacaaacttaggactcctctcaatgttttacttggtcctctggtgtgcttgcaacccccaccccgtttcctgcctatgccctcacattctttttaatgccttctctatgtggacagatgctgggaactaggagatgcagacagtttctggggtgatccagcattctcaacccacccaggtcagcccagcttagcggggacctaggttctggtcctgaaagctgaatataggaagccatggacctacctggctggtctccgggaaaacaggaaggctacagcgaaggtttagcgcgccatctgttggtcatttaggaaactgcatctctgacaaacggtctgcatagagcttcaggcatctgcaaatttgccagccggctctcaggcaagaaattgtttttaacctttccaaggtctcacaccctttaaaaagccgctgcacacttatgaaccttctaccccagcaaaacgcacttgcaattgattttgcatataattccagggacttggccatcttcaggttaagatcttctgagacccagagatgccaaggagtttccttgagctcacattgcacattagtggaagtgccaggtctggaaagcaggtgttccagccacaaatctagtgtttttaatgctcaggctgcctctttaagccttaaagtgttcttccctctttattctctgccagagtcctgtaaatatctggaggagtctttgacatgcccagaaactataatgctcctacctctcctgggggttctgggctctcagacaaccctgttcgctgttcatttttcctgggtcctacagaagcatgcccccggccactttagtgacacccactttgctcttaggaggctcagaccctgcatcctgaactgggagttaggacaggaaactgatctgtcactgataggctgctgcccctggatgaattgtcaaaccttcctggatcttggcctccccagtgtaaaacgctaggttggaggcagccatctccaagggcccttccttactctaactgcagaactgaccaatgggtgccatccttcacaacaagcaggtccaaatcactttcccagccaaatacccagagacagggtcaaaagcataattcctttccagaatcagaagccctgggtggacggggctgcttaagggagagaggggacctacgcaccatgggaacaggaaggacacagaggaggcaccccatgggtcttccaacacctccaacgggccagcaaggcaggacaatgaggcagaccaaggggcatttcttggggatgaagtagtgtgggaaatggtaagtgatggataaagggatggcttggtaggttcaagggcataatgcagaggactaggtatatagttggtgtctaataagggagacattgtcatcacatagctgaaccccagcttaatagtaaactcttcttctacttatttaaacaaacatttgttcggtttttggtgggaacagaggttctcaaacttgagcatgcatcagaattacctggctggcttgtttaaaatgcagattgcagggccccaccctgagggtctaattcaggtggtctgaggtggggacttggaatcagcatcactagcaagttctcaggtgatgctgacctcatcattcagggaacacgctttgagaaccactgccttggagtgacggatgagacagaccaccctgccctcatgagggcattgaacaagtaaatatcacagaacttgtatgttctgaagagggacatgcagagtgcttggggctgctcccaagtgggggagttcrcgctaagacttgaaggccgagtagagccagcccaggaagagggatgaaaattttgtgaaacacttacttagaatgtgccaggctctctctcatatcgttcatctgctcctcccagtcaatgtcaggaaggtaggattaacgcccattttacagatgaggaaggtgaggctgagagagagaaataactggccccagaactcatggcaagaaagaagcccaggtctgtttgtgcacaggacacctaccagcagccacatcccctctgctgcacccccaggaacccccttcttcccaggggagctgccacctggacacagctgccggacccggccagccacactctgtccatttcccccccctgaagcgcttcaagtgttttcactgctgggtgaattcagcagatgcctttcgatcacagcctattaaattagcccctctctgcagccaaaagaagataattatgttttcattagccctggataatgtattaccccctcagtgacagccacgtcagtgaggccagcctcctcccttcctcctcctgcccagggctccgccagagcactccactcccctggggtccacctctgcactgaggggtgggcaccagtgagggtccagagtggctgggaggctgggggggaagggacaccctttacacccatccaccatccatgcaggggttgaggggtgtggtcctgagagaaggaccaagaataattgttatcacggtgaccatttatgaagtgcctgccctacgctgatgcctggatgggtctcagctggtttgatcttccaatagctcgagagaagggtggcacaaccctcatctccccctgaaccccagagaggtcctggtggaatcaggttattgtgacagcccagagcagcttccaaggcactacacccaaggggcattttggggactgtcccaaggccacctggttgatggtaaaagtctcttccctccacttgctggggatctctggagacactgtccgtactcatgtggtaggggtccccaaacaccaggagccactctccccaaaccctagacactccccagatggctctgacatcctccctctccctctttctccacaagacagcggcgaggaggcaggaaaagctccactttggggtcccgagttctaatatctgctttaccacagattacctgggtgacctggagcaagtcactttgcctccagagcctctattttctccctctgtaaaatgggaataagaaagggagtcatttcttaccatttttatgatggttcagtgagttatacctattaaatgcgtggctcaaaaccagcaaaatgggaagtgctcaacagaagatggccattgttctctttactaccgcaactagtgttgtccatagttcccgttaatcctggggaaaccaccagagggagggaagggaagtatctggctctgtctgtcactgtccgtctttctctgtatctctgtctctctttcctgtctctgccattctctctctgccaatctctctctctctctgccaatctctctgccaatctaccaatctctctctgcctctctctcttctcttactctgtctctctttttctctctgccaatatgtctctctgtgtattttttctttctgtctctgccaatctgtctctctctctctgcaaatccctctgcctctctcttctcttactctctttctgccaatctgtctccctctgttttctctgtctttctctctgtctctgccaataagtctctgtcttcctgtcaatctctccgtctctctctttttctgtgtgttttttctatctccgtctctgccaatctctctctctctgccagtctttctgtgtgtttttctatctctgtctctcactgtctctgccagtctctgctgtctctgtctctctctttgtctataaatctctctgcctctctctcttctctgactctctctgtttgtgtgtgtgtgtgtgtgtctgtctgtctgtcttcgtctctcatctacacacacacacagagggcacctcatggtccctggctccayccgtgggctctgaggctctgtcttcccagatctctgtctcaagagctacattctaaggctttgcttttaatcgcaccagggcacctggaagtgaggagagaactgaggggagtggggtttctgtccccctctccccaaacccaagccaactctgccttctgcaggcacagccagccttggcccgaccccactatctccaccatctcgtggccgtgcatcccctcccaaccacccttctccccaatttcaaaaaagcttgtgctcccagagaggaagtgcccctactctgagcttcttttggccttgacccacacataggcagacgtggactctgttttgagcaggtgaaccgccagcccagtggaagagcagcttcccttcccctagcttcctgattttccccagttgccatggtaattgagggagcagtgttctgagaatgacaccactgaaacccagcgctcaactttgaaatggttcgggcaagggacgctggacccaaaacaggaggggaccagactgcaaggactcagctccagcctcaattttctgggacccaccccccatccagcctgtatgctggattattctcatcatcatcaaaatcaccattattgttggcaactgtttcctgagcatttactatatgtctagcaccatgtcaagggcttcaccagcatcatctcattgtgtatatcctcacgacatccccaggcccatccatggctcaggaaacaggctctgaaacttgcccttgtggcagccaggaagtggcagagccctggggctggtggcatttctccaggcctccttccagcatgtggaagacagcatagacctccaggcaccctcgtcagcttattctttattccttcctcccctcctcatcccccacacccttcttcctgcccccaaagtcacacaccccctcccctgctggatgtgcaagacgatctgaaaagcatttattagtgacaaagggggtggtggttttcctctttgcctcttctctgcgcaactcgaagcctgagtgggtttgctccgcttggcaaggctggggaggaggaaaagatcaaatcacccagagccaggtgccaagtgtgtgtgtgtgtgtgtttgtgtgtgtgtatgtgcgcgtgtgcgcgtgcgcgtgtgtgtgtcctctctttccttgattttcccccgttttcccaagactgtgtgagcagcagcaacagcaacggggagatgcaaaatcctttgcaatctgcccaggaaaagacagattttgagtcgggtttatatggttacccatatgttagggcccctaagaaaggaagggaagctgcgttctctgtgtcttccctcctccagcccagaccttggcctctccacacctgtggggctcccaggccacagatgaacatgtgccctccatccttcactctccccagatgccaggcctgagtgtggctccagaaaagaccagaaccaggcaacatttcctgaacaggctgcttttctccgtctgtccacccgagagccaaggccagaacccaggctgcaacctctgcgggctcctgggaggggctcccagcactgcccagcctgggaggctgtgtgttccactgtcccattaaggaatgctatcccaacactgatgtagaggcagaaataaccatccctgcctcccatggggccttctctgcccaaatagacctgccctcccctgcgtggctactacattcagccctatccaggctcccagaaattgtcattgtgtgtgtgtgtgtgtgtgtgtgtgtgtgtgtatgtgtgtgtgtgtgtgtgtgtgtgtgtttcctgatagaaaaaaaaaaatggaaattaggttatataaaagatgtatgctttggagcccagagcggctcttttaatgagggttgcgacgtctccctccccacacccataaaccagtcgggttggacgtcactgctaattcgtttcagtgatgataggataaaggagggacattaagaaataaattccccctcacgaccctcgctgagctcacggctcagtccctacatatttatgccgcgtttccagccgctgggtgaggagctacttagcgccgcggctcctccraggggcggccgggcagcgagcagcggccgagcggacggggtgagccaggggcgcgcgcggggcgcccagcactgcgccggggaagcccgcagcctccgtcccgaacttgggttcgctgaggctgagggaggggacgcaaggggagggaagaagagaagggaggagtgggggctaggggagagggggtggggagggatcttggaggcacaaagcggaggggaaggggagggacgcgcgcggctcctaccaggaggcgagtgggtgcaaccggcgccctccagccgcgcggggcggcggactcggaggattcagaacccggagcgcggcggccgcgggcgcccgggaggaagaggaggagtacgaggcgggcgggcgggtgcgcagcgcgaagaggcagcctcggcgctgcccggctcggcgtcaggtgagttcctgatccaggcgtcccgcgccccttctccgtccccagggctccccrctcccgcccgagcccctggtgtgcgcggaaggctcgggctttgctgcgcgtcccaacttggttcgggcggcctcattttcctcctagcgggcggcctcaggccgggggctccggtccgggggtctacgcgcccaggctccaactttgcaagaccctagtcgttcctcagccgcgcgcttggctccgagctgtgcgctgscggtaatggcggagcccttggcacagctcgctaccctcccgcgggcagcccgggctgggggatgccagtccctggggaccgttgtacctgcccaagctcaactttacgccttcctcggtgcccgactctgcggccgaatcgcaactgcgagccgcaggtaatggcggagtctttggcactgccagctgtccgcggctgggggcccgaggctgggagggctccgctcccggaacatcgctccggcctggcctccaactttgcgaggagcctccttgcgctctcctcccgcggtcatggcggggccgcccgcacctctcacttcttccgtctgggcgagattggggtgtaagagcgccgtctccaaaacctgggaaagttgtgcttctcccgcaaaggaggctctagggaggccgaggggcgcgttccgccacggttcggggctgggcagtggaaggagcgctcgatgaggttgcttccaggtggccagggttcggagcagggtccccgggggatccaacttccagggccactcaggggccttgcgtccgaggtcccggaaggggctctctcgggactgcgccccagaggacgccagacgctcgcccccacccccagggcactgtgaccagagagctcatggctctccaagctccgcatcaggctgtctggggtagacatctagagaggagaggctctcacggagaaggcagccgaggagggcaggaacctttccagtgactcccctgggttctggtcctagatcgacsctttacttgttgcgtgaccttcggtaagtctcttcatctttcccagcctcagtttctcatctgtaaaatggagaaactacctttttcgtggggctgtcatgaggaccttaaaaaatcataaatgtgaatatgaagtcagggtaagcgttcataacgcaggaagtgttgctgatatatatatatatatatatatatatatatatatatatatatatatatatatatatataaaaccattattgtaatgctctgggaccggatctgggagactcgcacgcaggtctagggtttccccaccagtaggaaccggggggtctaccccacagggtactacaggctgcggaagattgctctcgcctccatctctaccccagtaatcctgggaaagacgcatgggattcttccctctactcccatagcccagctcaaaccctgcgctcaggcctaagaaaagcgcgcacgcagccaccacggagggagggtccccagggacgccgctaggcaagggtgcggtgcaggcgagcgygcccataggcgcctcatctcacctctggcggcccacgacattgggagacarcagaaaggagaccccagacctctcctcccgagaggaatgagggaaaattgctgcctttctttagtgcttctctaattggggtcggggcaaacgcaagaaattcgtaaacaccagggaacactgacgcagctctctggagcatagattttttcccccgttattttttcagaactgaagataaaataggaaaagggctcttgtggcagctccccaagtgcgcaggggtcgcgtccattctccgccctcaaggcatctcagcggatggtttgagaagcctcggcaggtccctgaaggagggggtgtccgccccaccagcaccgccacggcgggccccggcccctttccactagtctggatttcagaagcgccctgaggggcgcacggctctgccactgacagctccaaggcactgtcacacgtattattcacctggagcctcttaactttcaggttgccagtgcagccatctgaattccattttgcagctgcggaaattgaggtggggcaaaccaaactacctagccatagtcacctagctggtaagtggcactacccgagacctcaaccccaattttcggcttcttaattggggcattttgcatgcatctgggcatctacgcagtctggcatgtgcctgaaccttagcacacacagctgtatttcctgatacatctgttcagccagaggccaacgctatggtcaggggcatggctttgtctccacaaattgtgtgatttttttccccaaagtcccaaatcatgtagagaaagagtgagcagtgtggtagagagacctggtgaagacctcagcttgaggccaagcttagctcactccatggctgtgtgacctcaggttgatcacttaacctttctgagcttcagttctgttatctgtaaaatgasaacagtaactcccacacggggctgttttgaagactctgtgatgatgtatgtgaaaggggttctggaaacaatgctggtatgccaagactggtgattgtaaggaaggaagggaaccygaaacagagggaagagtgtcccatggagccatttggggccaatagtgtcatcgtggctttcagagcagcccgctttttgccctttctgtctcctctttatatttcccaaatggccaaagccagtccccaggagcctccatcttccttggggaaggaccgcacggagaagagtgagagggsgggggtattgtgatgggttaggctgctcccagtgggtctctgtgagtaagatgcaaagagttgtccgaggtaccattcagtcagttgtccagaaacttccccactggggggccgctgatttcccaggaggcaggaagatttggaggtcaattcgcctgcatattgtgagcacagacaggtttggctgtgcctgttgcgctcacaatctgcagatgttttggggtgtcttatgacaagacttcatgtgttgcctgtyactcaggttctgtgggtctgtgcggggcttggaatgtggttaagagccacaggcaacaatccgtgctcgtgagaactggggctttttcccattagaaactggaatttgtggaagttgaatttggcatttcaggacccattttaatctggattgtttgaacagaggggcatgtttcctgccatggatcagtgtgggtttgtgtagttaacaccacataggttacagacatgaccattttcctcgttctaatatatgataacatttaaacatcatctaatccagcgaacgccaaacatcagcccagtggacctttagtgtcagaatacagcaagtccctggttaaaagcaaagatgccagaccccaccctaaatctaccgaatcagcattcctgggggagactggaaatatctctatttttaacaaggttgctccaggagattctaatactctcagttcttgtctgtcaccctcgttgtacaaattgggaaactgaggcccagaagaggcatgtgactcgatgaaagtcacacagcacattactgccaaagctgggatagaacctcagtgtcttgacttattgtccaatcctcatcgatgataacttcatgtttccttcagtacaagccccgtaaatgccggactttaaagaaatttaatttcatctttctggttgttattctaaattagaccaactgctcagaggagactgaaaataattcctcccaccttgaccttgctgggtgtcagccctgagttcccatctaatcttggacattagccccactatttgatctctccctttcagagggaaggggcttcgacctcctgggctcaaatgatcatctctcctcagcctcccgagtagctgggactacaggcctgtgccaccacaccaggctaatttttgtattttttgtagagacggggttttgtcatgctgcccaggccagactcaaactcctgggctcaagccatctgcctgccttggcctccttaagtcctgggattgcaggtgtgagccaccacgccaggcctagaaaaattccttttataagtgacctatcaggtataacttctgcaaagaagtaatcacagagctaataaacccagtttaactaccactgatttcaccaaagccattggtttgagttcatttccacagcccatcggccttccactcagcctttgcaagtgtgtttatgttgctcacatgcccatycttaaggtggaagaatgatgagcagcacctggcaatgctggaaaattgagcccattcgaatcttttaaatgaaaatgacgtgtcaacagaaagtgcccctaagtctctaattcaagtatggttaacagggtatagtggacatgggtcttggcacagtcgtatgatgctaaggatgaacagcagttatcgtgggctgttcggcagcagacgtcagcacatttattgtatgtgtcatgacacgtgttaaatggcaaggccagtgctagaccccaagggcaggtgcccagataaaggtggtgtgagccccattctaatgaaacctgtagtctggctaagcggtgagcaccagacaaaccctgtacctggcgtgaagtttctgcaagagaggtggaggtgaggtgctgtggtaggacccaggacaggtggttgaaggaatcagggaggacttctcagaggaggtagcatcaaagcccatagcctgatttgtggcaccctctcagggttggggtccccagtgccaaactgggccagcagcagccaggttgaaagggagggcctcacactgagaatcatcttaggaaacgtcagaggccagcttgggcacttgtggattctgtgactcagagtgagagaattaacatctctgactctccagcatgtyattcatacagcagagattataagtactacagggagttgttaggaggatttaatgggatagtgtgtgtgtttaactctggaaaggaaacagcatccagcccatctcagtgatcataacaaagaaaagaaattttaaaaagagccagccagacacagtggctcacgcctgtaatcccaacactttgggagactgaggcaggaggattgtttgagctcagcgtttgagcccagcctgggaaacagagtgagactccatctctacaaaaaaattagccaggtgtggtggcgtgcacctgtggtcccagctgctcagcaggctgaggtgggaggatagcttgagcccaggatgcggaggttgcagtgagccgagattgtgccgctgcactccatcctgggtaacagagccagaacctgtctcgaaaatacataaattaattcattaattaatttttttaaataaaaaagagttagccarttggtgtagtctgagcccctttctcttgctcagcctctgttttcttatctgtgaaatggagttggaactaaagggcatctcccttcagagacctgcagatatgttctgttagtctggcagagggcttttttttgttctctgtttgtttggattgggggcattgttttgttgggttttgtttggagagtattttttttcctttaggtcaccagcctcaccattcaatattgtttaatttgcttgtccgggcccttcgaggcattttagtttacaaccccaggacgcacttcccacaaagaccttttcagctttaacatcttctgccttacctgagagcaacattggcccaattatcatccatcaattgcatttatgatttctgctgacatttcctaagagaaaggtggccctattcaggtggaaaatacagaagtcctttgcaaggggcaaagttcccatttccagcctgggcatttcccacctcttatttgtatgtcctgttacctactaagactgggatttcctgggaatgatgagccttttctttttgaccatccaagatgctttgggagcctacagattttcagaggtgccctgaaaagcatttcagcttctgctgggaacatttgcccactggcattaaataatactcgagaatctcttctttattcaaaacctgacagctaaattttgctaccatgaggattaaaaaggtgagcctttctgaaacccatttccagttggaaatgaagaaggaatattgtgaattcaaaaagcttacgcaacttcagatagtatccgtgtacaaccgtcgtttcccagctaaagcatttcttgtcataaacgagagtgaagttaaccacttcttcatttaacaaacacaacctgagctcccagctctgtgccagtccccacaagagaggcttcctcataaagaaagggaagacagagtccctaccctcaaggtagctcatggtgtccaaaacaggcatccactcaccaataactagatgtagtgaggtaaatgatgtgggcagtccatcctatttagtcactaaaacagccacatggatcacattgggctctatgtcatttccaggaattttcagcataaaaaaaaagtaacctccggggataaatcagaatagtactcgatagcaactgacatattttgggcatatttttctctttaatttttttgaagcagtatctcagctctggaatactcagtaagaaaaatgaaagccagttatgttcatgtgccagaaaacaggtaatgaacacagtcaatagcatcgatgtgcttgtttgttataagtcttagctggcaataccttcagttatcattttgcttctaatatcatggtagtcactgaaatggaatctctttctttctcccaaagcatggtataaaataatgggactgggtgggtttcttggcttgatatttttattgattttgatgatttttgtaacaaacatgccaaactcatatacgtagataaatattttcgcttccagctgccggcaaggtgtaggatttcttgagggtcccttcttcaagacttgccttcagaaagcatgatatctctttctgaatctccctactagtgatatcttattgggcttttgaggatgcagttgaatttcagaaacagcaagaagtcattgagagccacatatttttttggctaaaatgggtgatgaccttggatgaaatgcagagatttggtttttgtttgtttgtttcattggttttttcattgttgttttgttttgcttttgtagaggtggattctcaccatgttgcccaggctggtcttgaactcctgggctcaaatgatcctcctgcctcagcgtcccaaagtgctgggattacaggcctgagcccagcccaaaatgtggagatttagttttcgtttagaggagggctattttaaaaaaacaatatggtgtgatcaggattccctatctggttcaaaactgacatctaagtcaagcattgtgccccatgtacttcatcttgtgactctgatgatgggaaccagcctacatgatgctaaaacccttccttcgcaagaacccttgacacctatttctgggaaacagcttgtctgcttctctctcctaaccaacagggatgagacttatgacttgaattgtcattgtttagaaaacaaccttaactgagtatttggggaagttgtgcaagtacagtatatagttaattttcttaggtgtaataatggtactgtgggttttgtgggagtctgtctctacgctgaagataagtgtgcttaagaatttagagctgagacatcatgattctgcaacttgttctaaaatggttcattgtgaagataggtaagtaggtaggtagataatagatggagaggtaggtaggtagatagatgatagatagacagatagatagataatagctagaggatagaataggtaggtagatagatgattgatagatgggtagatagatagatgaatagatagataacagatgataggtaggtagatagattggtaggtagatagatggatagacagatgataggtatataggtaggtagatagataggtacatgaatggatggatggatagatagctaggtaggtagataggtaagtaggtagataggtaggtaggtgggtggatggatggatggatggatagatggatggatggatggatagatagatgactgatagagaaagacaagtaggtagatatgaaaatgctaatagctgttgaattaagttgaaagtttatgggtgtttttacaccattcttttacattttctgtttaaatactttatcataaagttgggaggcaagaatggctttcaactttcctccatgttaaatttttccaagtttcttaggagaataatatttagccttctcgtttctatcccctcacctcccacacacgaatacatgtgcacatgcatatacgcacactcatgaacacacacatctctctctctctccctcttttttcctggaagaaataatcctgcagtttagcagaatgtcactgtttttcatggcagtttctctttacatttttccctcagcattttaattagggctgtgagtcaccatgctttatgaaggctggtgacaatgtcatttacggctgtttagcatcccaatcgagccctctttggcggtgctcattacatcaggggcattgagcagtgagcaggcgacagttccctctgtcagcaacagaacaggctcagggcctcttgagggactgagaaatgagcttgaggtttgttcctggaatagcttccaaagttggtttttccgtggctggcggtatagcccaggcgtgcctgaatgcacttgagcttgagagggttgtgcagaactgaagctctgacctccttctcagtgatagcaagctttcccccaggcccacgcctcttgcctccagagtgttcagtgccatgacatcggctcttgaacactgtattatgtatgcatgtatgtatgtatgtatgtatgtatgtatgtatgtatttctgagacagcgtcttactctgtcacccaggctggagtgcagtggcgtgatgatggctcactgcaacctcaactttcctggctcaggtgatcctcccacctcagcctcctgagtagctgggactacaggtgtgcaccaccacacctggctaattttttgtagcgacggggtctcaccatgttgcccaaggtggtttcaagttcctgggctcaagcattccacccacctgggcctcccaaaatgctgggattacaggygtaagccaccatgctcagcaggttcttgaacactttagacccctctggatgatggagaagaggcaggattctgaagcccatcaaagctgggttcaaatccaaccactgccatttattcactctgtaaccttggcaagttatttaatctctctgtaaatctcattttcctcttctgtaaacacaggaataattctacttcactgcattattgagaccattaaatgcttggcacatgcagctactccatcagtttcttggcaaggttgaggttggtgattaggatgacttggcttagacatgtcatgcccttgactatccaggttccttctgatattcctcatccctcctcccaaggggcaatggaggtgaagatttgtcagtcagggtctaagcaggaaacagaaggcacctgcagctgggatttccaagtaatttaattaaggagcagcttatggacacaggttaaggcaccaacaaaggggtgcttaagtactcagggactagcaaccagggcagcagttgccactccaggcctgaaggagcagggggaagcgacagtgttaccgaagccctttgggtggtggaatggagtgggggtgctggcgaagggaagggtccctgtagaagctatactcagaagggaatgcagaccctgccagactacagcactaagagagggagagagcagagaaagaaataccctggcttctcggcttctccctcatctcmtgtctccacatcccattggccaaacccaatcagatgccagagggcaagagacttttttttttcttcttcttcttttgagacggagtcttgctctgtcgcccaggctggagtgcagtggcgcgatctcggctcactgcaagctccgcctcccgggttcacgccattctcctgcatcagcctcctgggtagctgggactacaggcgcccgccaacaggcccggctaatttttttgtatttttagtagagacggggtttcaccgtgttagccagtatggtccccatctcctgacctcgtgatccgcccgcctcggcctcccaaagggctgggattacaggcttgagccaccgcacccggccaagagaccttttgatgtccatagaggtcagcctcttcgggagcccagataagtttggagaatgaatctgggggcaaaggatgacaactagcacagatggggggaaagaggaagagttcaccaataatggtgagtaagaccaatcccagttcatcagctctgagcaaaaagaagtttccctgagttgggacatcctggaatgtctccattttgcttcctggatccaggacatgctggtgtgtcttcagttttctgtagggtccttatgaaatccttaaaataaatcaggcatttgstttcatttcaaacacacaaggtactttgagaaaatgggagtgggtactataaaatcaagtgaacagttccagggcattgcaacttagcctgcaaattgtagrgtggagtcctaaataaagcacccagttaattgaggaggtgtgactcattgaataatctgttgaaatagctttggtgtgcagtcaacaggtaactagtaagtgcctgttgaatgcccactctgcattgtccgtgagcacgtcacacatcgtcccatggcaatggcgtgctgtgccctgctagccaggaatgcaagtcttatcaaagcacaaaaggttcatagatttcaaagcaaggttttctaatgatagcatctcaggaatcctgagattttactgctgacttccaaggagagttgtagattaaacttggagaaactttcttggtggaaatgacaatgatactgtagaaaaaaactctgaagtgggagctgagagtctgtgtgtctctggcagtaataataacaccagccggccaggcatggtggctcacacctgtaaacccagcactttgggaggttgaggagggaggattgcttgagctcaggagttcaagaccagcctaagcaatgtagcaagaccccaatctctacaaaaaaataaaaaattaaccaagtgtggtggctcgtgcctgtagtcccagctattcagaaggctgaggcaggggtatccttgagcccaggagttcgagactgcagttagctatgatcacaccactgcactccagcctgggcaacacaacaagacccagtctcaaaataatgaataataacaccagccaatgttcttcatgtacttgctacagactaggtaccatgctaagccctgggcctgtataagcacaggtttccaaaatatggtggatactccactggtgggacccattttttattgttttatttcattgaggtaaaattcatgtaatataaaattaaccattttagagtagcatttgtgttgtgtgatcattgcctctatctagttccaaaacatctccattaccccacaagggaaccttgtacttcttaagaattgaaaagaagtattcaaacaaaaactttcccatgtgtgttcatagcactattcacgatagccaaagggtggaaacaacccagatgtctgtcaatggacgagtggataaactaaaagtggcttatccatctatctaatggaatattactcagccactaaaagaaatgaagtgctgatctatgctgtaacatggatgaacctcaaaagcgtgatgctgagtgaaagaagccagactcaaaaagcctcatcttgtaggatttcatttatatgcagtatccagaatagacaaatccacggaggcagaaagcagattagtggttgccagggggcgaggagaagggaaaaggaacaaccactttactgatactcattttttgaaaaacttttattttgaagtaattttagattcacggaaaagttgcaatatggtacaacgagtttctttataccctgacctagtttccccaatgttaatatcgtacataaccataatctaattatcaagaacagaagattgacaatggcatgatattaactaaacgacagaccctattcgaattgcaccactttctccgctactgtgctgtttcggttccaggatcccacattgctttcggcgctgatttctctctgcctcctctgatctgtgacagtttgtcagtctttccttgtctcccacgggcttgacacctttgaagatgactggtcagttacagtgccactttgtgtgaatttgttccatgtgttttcatgattagatcaaggagccattttttaaaaaatttactcattaaatatttgttttgatagatcatagaaaaaagcagttagcaaatttatacgacgatttcgtggatattagcttttaggatgaggctatagtatctaagatagaaagtgagttcattgtaagggaaaatattaaataaataattgcataggtgagacacaggtatggtgcaaagatatgatgttggtaagagcagcatgggaaacatgacgttacttcatggaatcttcacaagagtcttgcaaagtagattcaggactattgttttttgccattttatagatgaagaaacggaggcaccaagatgctgaagcccttgaccgagtcacgtgtcagtaaatgacagaatcaggatttgaatcccatgcctgtgaycctgaaccatgacattcccctttaacccttccttccaacctctgcgacatcagcttatagactgttgaaggtgacaccgttctcttctgtgatttttatttcaggggttatttgcagagctctgttcagtaaagctgactcaggtggggatgtgtccygcagtgtcgaggtagggtgtcctccaggggcttcccaggtgtgctggtgcaacacgagataaagaccaagccagttcaggtaacccccaggtagagtcactaaaaaaaaaaaaaaaaaaaaaaatgtaggggatctgggactgaatcttcccttggaatggaggaaggaagttgcattccactcagctcctgttagaatgagtatgcaaggactggtttgacatcaaaagagaaagcccaatttagacagaaaggtgtcactccaggaagggctttggtgcacacccaaagtgaaagaagaaacagattcagacttcaagatgatcgtgcaaagtgctgcgtcactctcagtagatttaacccagggagaacaaggtcagtgttgagtatcagccccagggcacaagctggggtggatgctgtgatctcatgcggaggtggggatcccatcaaacacctggatcgactggaaccacccaggacaagacccaagtcactgagcatgctgtcccttcattgagtagcttctgaaggtgaccttccttgttgccctttaaaactcactcactagcaggggtcccacagtcaaaggcctatagtgaaatacttatttgcaagaaacaaatgaatgacgggggccacagggttttgcaggggaaccagagagctcatgccccacctaaagggggaggcgccaccacctactccagctgtttggagtgtgctcaggaacacaggcccagtgtaaacatatcttccatggctccaagaaagccagaaatttctatctttgatgaaacctccagttttttgtttgtttgtttatttttctttttttttttttccttgttttgagacagggtcacactctctttcacccagtctggagtgcagtggcrcgatcttggctcactgcaacctccgcctcccaggttcaagcaattcttctgcctcagactcccaagcagctgggactacaggtgtgcaccaccacacccagctaatttttgtatttttagtagagacagggttttaycatcttggccaggctcgtcttcaacttctgacctcaagtgatccaccttccttggcctcccaaagtgctgggattacaggtgtgagccaccatgcccggcctgaaacctccagtttttaaatggtgataacaaatttgggggraaaaatttaactgtattaaccaaacgcaattcatttgtatacctatgggytgtctttgatagaatctgaccagagcctgattgaagaatgtgatatcctggatctgaagcattttttgtgcagaacaggtgatagtttgagttgaagttgaaatttcctttaaaatggccatttgtgtaggtcacaaaaagtcacacggggctttagaagcaaaccgtaccagtgtttctcaaactccagtgtgcacataaatccactgggggatcttcctaaaatgcagagcctgagtcataggtctgggctgggccttgggattctgcattgctgacatgctcccaggtgatgctgctggtgctggtgcatggaccacgctttgggtagcaaagcattagaccatgttcatcrctggtggttttgcaaactccattaagacccaccccacattgtcgttcctttttctgaatccaagttttgtttttgtttttgttttctgagacagagtctcgctctgtggtccaggctggagtgcagtggtgtgatcgtggctcactacaacctcagcctcccgggttaaagccattctcctgcctcagcctcctgagtaactgggattacatgcacgtgccaccacrcctggctaatttttgtatttttagtagagacggggtttcaccatgttggccagactggtctcaaactcctggtctcaggtgatccgctcgcctcagcctcccaaagtgctgggattacaggcgtgagccacggcacctggcctgaatccaagttttgttaaccaagtgtctgaagtctcattcattcactcatttgtaatgggccatgccatcacctccctgcagctgctttcaggaagtgaagtgagaccagtcttggctttctgcatggcaaccactggctggaactgctctccaaacacggcatgggccctccagttctctacagtccccactgctccctctcacctctcacagggctgcttcattcaatagctgtagacttagagattgagaccctgattcactgagtacctattatgtgccaagtcctgtgctatgcacaggtggttgtttttttgtttgtttgtttgagacaaggtcttgctttttcacccaggctagagtccagtggcacaataatggctcactgcagcctcgacctcctgggctcaataatcctcctgccttaacctcccaaagtgttgggattacaggcatgagccactgagcccagccctaagtgttaattgataaaagctgagtaaatgaaggaattgtagcagacgtctctgataccataatcattatttttatttgattttttatttgaaaaagtacattatcatctatggttcccttacagcactaaatatatattttaagcttcttatcctaattatgaaattgattgtttaaacatttactttgacaagtgactagaatctgttagccttgtcccctcatctcacttgtagtggtatcttcagataccctgttatcgatcctcaggaggcggataatttttggaggtatttcaccaggaagggaggtgagccaatatttgactgttgggcaataatttaaattgttaagttccagcataacaagacagaaagagcatcttgcagccgggcgcggtggctcacgcctgtaatcccagcactttgggaggccgaggcagacggatcacatgaggtcaggggtttgagaccagcctggccaacacggcaaaatcccatctccactaaaaatataaaaattagctggcaggcgtctatagtcccagctactcaggaggctgaggcaggagaattgcttgaacccaggaggcggaggttgcagtgagccgagattgtgccactgcactccagcctgggcaacagagtgagacactgccaaaaaaaaaaaaaaaagcaagaaagcaaccaagcaaccaagcaagcaagcaagaattaatcataatagcccgcgtttgatcttcgttctgactctgtttctaagaatcttaggcaagtcctttcctgactatgagcctgtagctcctcatctccaaaatgtaatgtgaaaccagtgacttctacccttgttatttattgtgtaatggaatacttggaaaattgtattaatgccatggcctgttttccccatataaatgcacgtatcacaaaagttgtgcacacaatttcaggattttcagggttccctgagccctgtaggaggtttataaaatcaatattgtgaattggagtagaaaatccctagcatctctttcaactttcaattactaaaattgtagaattgagctaaaaatatatagcagtacttagaacattagaaaagcaaagacgttgagttcagacaaacttgacttgagtccccaccactgacactagctgcataacctatgacttaatgtctttgagccttgattttaacatctataaaatgggaattataatgtcatgtcatgttcatatcgtgttgcaagaatgaaaatgagatcttccaataaagtgcttacatataaaaatgctcaaaatattaagttgaactgtacgaaattgaaaaagttgatcatttgcaaaactgttaatttcatatatttcaacctaataagtactcagtgtgaatagttgagcgcttattcaccaaatacttatttcatgcttactaggtgctaacatattctaagaagaaagtcaattatattgtgcagatgaaagcagacctgtggtgctttagctccatgtggccagcaaatgtatactaggctcaggcctgccttaatgaatattttccctcctgtccttggtactagtttacacattcatrctaaggtagggcaactgcaaatacattttatacaattgaagagtcttgatcttttactcaagtttgacccaattgcatttattgttattactggtatatctgacatatgtggaattatttctgccattgtagtttatgttttctatttaacatgttttccctttactgaaattcatttgtaactgattcaggcctatatggatgttgtggatctatgtaaaggcaactttcgagtgaagggaacaaatcttattactgctctcttaaaatagttattcttacttcttttttcttccctgagcaccttttgtcagccttttgactcagctcccctacaccagaaagcacccaaggatgccaggcatgagaggagaaatttgattgagyctcaagttaacactgatgtgcaatttggagaaaacagttattatgttccctgaaaaataaacattcaacattgtcattatagttgacatttacagtttacaaagtgccctttacrgtgtccatcttgcttaatcattacraaagtcttggcaactagttgttattactgtttcgatttcacaaaaggaaattgagagtcaaaatgttaaatgacttatccaagatcaaatagcttataaatggcaaagcttggaattgagccaaattgagcatattttttgtagctgaattctcagaattatggaaatgacgttattaggaaatgttgattcttgcaatatactagaccacaactaaattattactattcatgaaagacagttctatgaaatgaatttcattcattcttattctttctttcacccccattttccttccttccttccttcctccctccctccctctcttccttccttccttccttctttttgacagagtcttgcactgtcacccaggctggtgtgcaatggcacaatcgtagttaatttttttttttttggtagagatgggggtcctactatattactcaggctggtcttgaactcctggcctcaaacaatcctctcgcctcagcctcccaaagtgctgggattacaggcatccagccctttcaccctatttttaccccattgttcaggtttccctctctcaggaaatccttcacactccttctactagtggaagccaggagctgggaggtcactgcagacacctccttctccgttagcttctgtatccaattagtcaccaaatcttgttgactcaatcttgtaaacatctcttaaatcgacccacttccttccttcctccctttcaccacctgatccttaaccaccatcattgctcatctctggcctgcagcagcctcctaaccaggctccccatacccagccttgcttttcccacccatttgccatccagcagcagccagagtaatcttcataaaatctaaatctgaccactgtacttcttgtctcaaaaccctccaatgcttgccatcgctctaagaataaagtccaaaattgttaacttgcctttcaagagacctgatgatccagcccctgatgacctctccagatttatctcgtgacatggctttcttctgtcaccccaatgccagctccatcctaccacagtgccttctcacacgctggtctctgtcctccatttctcacttcctccatccaccttcttatytggccaactctggatcctgactcttcctccaggaagccttccctgaccaccaccacccagaccatgttatgtcccttatgcaaggtctcgttagcaccctgtattttcgcttttgttctactcattgtttttatcactaatattaatctccaactacctccaccctaggttgtaagcttgagggcagggatgctgtctatcttatccacccctgtaatcccaatgcaagctccacgctgactgccctgtcctggggagagctatgtatgagtaggcaaatgaatggttggcatgaaggaaagaaaagaaaagatgagaggaggcaaaggagagaaagagggagggaggaaaaaaaaagtaaaagagtataatgttgatgggggttagaaaatatgtgccatcttattttaatgattgttaagaaaagtttccgagaccgctgataatatgtttcctttttatagtaatgaggctgtcctcttggccatgattatgtttgcatatctagcctgaaatggttcaattatcttgatgtgtaatctaaagtgactctaaaaataatagtcaacagtaccacatgctatagatgaattatcccctctaatgcacttccatttaaattatcccatgtgatttattggtttccatctttaaggcagaaaccagaattgttcccactttacagatgaggaatctgaggctaataggcagcagaggtgggtcacaaaccctggtttttctagctccaaattcatgcctttgacccccacacagyatttacagcaatggggcaggtatgtaggggcaagggtgggaggcagaagtgcatctgtgccacttttgtgcttttgtgccactgaagcgtccatggatagaaggaacttaagaaccttagccccaaactctgaaattttctgtcatatgatggatggatatattggtctcccgttggccgaactagctcaagtaaatgagctctgcaaaacgaagctgaaatgaagactctgtgattccccagatctattctaacatcgggatgacagccctgcagctctctccctgtgatgaaccagaccgtcctcctcatcccgccctagtggtgtygactcaccaccaagttctggggcctcagtgcttctggatgcatctttcatgtgccgtgttccgacaaactgaatcctgcttttgcagcattccgaaaaggagccaatgacagtcatcgactcccatgggagacargaccagtccacgtgtccgtaccttttacctggtctttcaacacaaagtgccttaagcagcacatccaccagacactacrgatgctcaatagaaaaatgactgcttacgtgatgataattagtaatagtggtggtaaaaggatccatttcctgggcacttacctagtctatggtgcattgtaataacatagaaaacgttaactattggctgggcacagtggctcatgtctgtaatcccagcactttgggaggccgaggcaggtggatcacttgaggataggagttcgagaccagcctggccaacatggtgaaaccccatctctactaaaaatmcaaaaaaaaaaaaaaaaaaaaaaaawagccaggtgtgatatcagctactcaggaggctgaggcaggaggatcacttgaacctgggargcagaggttgcagtaagccaagatcacgccactgcactcagccygggcaacagagcaagattacgtctcaaaaaagaataaaaataatagaaatttaaaaattaaaatacaaaaattagccaggagtggtggcgggtgcctgtagtcccagctactcaggaggctgaggcaggagaatcacttgaacctgggaggcagaggttgcagcgagccgagattgcgccaccacactccagcctgggtgacagagtgagactccgtctcaaaataaatacataaataaaaaaggagaaaacattaactattatctctttgtatcctcagacaccctatctatgtaggcactattatcacccctatttaatagatgcagaaactatgactcagagagagtaagtaacttgcccacgatcacaaagccaagtagagaatcagacagtctgacttcaaagaccttactcttttcttaaaattgatgcaaaaaacattgttaaaaaataataatttagtccaggcacagtggttcatgcttataaactctgcactttgggaggtcaaggtggaaggattgcttgaggccgggagtttgagaccaccctgagcaacatagtgagacaccgtttctacaaaaagttaaaaaattagccagtcacggtggtgtgtgcttgtagtccagttactcaggaggccaaagcttgaggataacttgagcccaggccttggaggttgcagttagctgttattacaccactgccctccagcctgggcaacaaagcgagaccctgtctcaaaaataaataaataaagaatagcaatctaatatgaaggaatatacaataaaaagtaagcttccttcccacccaatttctagccttccagccccctttcctagaagtaaccactgktactgatatcttgaataattttccagagctgttcagtgcatctccaagcttatgtggaaacatggatgaatgcatgatgaagctgtaggatggacttataattatatttctaaatgggtgtgctccaccttgcttttaaatttaacactgtatctttaagagcattcctcactggtctggtctttttagctctaatctcctgcttatttaatgcctgcccagaattccgttgtatggatgtgccatagttgatttaatagtcttctattgatgggtacttaagattttctcaatctcttgatattcagatattcagaaccctgcaaagaagagttttgtrtgtgtttaaggatgttcctttcaggttacctgcaggagaaagtcctgacatttgaattgtcaggccaagatatatgtattttaaatttggaggtagatattgtcaaactgccattcaaagaggttgtatttggcagcaatgtaagagagtgggatttcccaaagccttgacaacagagtgtgtgtcacattttaaacaatcattaatgctcgtgcttgtaactctaagctgagcctgttactrcctctgagatatgggcatcagaggtgggaagattgacatcatcataggcaaactgtagccatgaaactgggggaattccrtggctgaggagactcaggatgcttgtgtctttgggatccccaaggcaaagaatgtcaacttaacccccagatttgtggggacttgtgggtttgccgccatgacttaccggcatgggagaaagcacttcagcttgattcctgggtggtgatctctctggggaaagactgcaaattagcagttcaggaaatgtaaagaagctggtggttttgcattttttaaaagagcgcagttgggtttacgctttcagtcttttgtttgtgttgggggtggcagtattttgttttgtttttgaagacttggaggacttggagtttgtttttaaatgagattggagggagatgggaaacagggctgaaactccatcagatattttgtgggtgtataaactgaaaagagtcaagacttcacaggcaggctgggttttgttttctttgatattattcatgtaaaaccattgatatccgtttcctccagaataacctttacatttacatatacagaactgacttgcttgcaccttaatggtataccttggagttcatttcttatttgcagatagagatctgcctcattgtctttaatgacacatttattgtacagatgagttagatttttttaattttattattattatactttaagttttagggtacatgtgcacaatgtgcaggttagttacatatgtatacatgtgccatgctggtgtgccgcacccactaactcgtcatttagcattaggtatatctcctaatgctatccctccccccaccccacaacagtccccagagtgtgatgttccccttcctgtgtccatgtgttctcattgttcagttcccgcctatgaaacagggtcttgttctgtcacccaggctggaatgcagtggtgctatcttggctcacggtagcctcaacctcccaggctcaattgatcctcccacctcagtctccagaatagctgggactacaggcatgtgtcaccatgcctaatttttattttgttttgttttgtttttttttgttttgtttgagacagagtctcactctgtcgcccaggctggagtgcagtggcgcaatctcgcctcactgcaacctccgcctcccaggttcaagtcattctcctgcctcagcctcctgatcagctgggatcacaggtgcctgccaccacacccagctaacttttttgtatttttagtagatatggggtttcaccatgttggccaggctggtcttgaactcctgacctcaagtgatccacctgcctcggcctcccaaagtgttgggattacaggtgtgagccaccgcgcctgtccaaatttttgtgttttttgtagaaatgggatatcactatgttgcacaggctgatttcaagctcctggcctcaagcaatctgcctgcctcagcctcccaatgtgctgggatgacagccctgggttagattttaactgacacttggaagcaagattttggatrctggactattagcccaggggacattctactatgacctctctattcatatggttctgggtggattttctctctttccatgctacccccaccatgcctattcccagaggtcagtttcaaaaggtgacgtgatatttgcaaaccctctttgtcatttttctggtttctttaaaagggaaaactttaagaagtgtcttctgcctggctgttaccagtaggttcttgaggagatccagggatggtaggctacagaaagaacaacggtcacactctagacccatgctgcccaatggcaatataatgcaagccatgtgtgtaatgttgggctttataagtcacattaaaaagagtaaaaagcgcggccgggcacggtggctcaagcctgtaatcccagcactttgggaggccaaggcaggcggatcacaaggtcaggagctcgagaccatcctggctaacacggtgaaaccccatctctactaaaaatacaaaaaaattagccgggcatggtagcacatgtctgtagtcccagctactcgggaggctgaggcaggagaatggcgtgaacctgggaggcagagcttgcggtgagccgagatcgcgccactgcactccagcctgggcgacagagcaagactccgtctcaaaaaaaaaaaaaaaaaaaaaaaaaaagagtaaaaagcagctgggtacagtggctcatgcctgtaatccctayactttgggaggctgaggcaggaggattgctcaagcccatgagttcaagaccagcctggacagcatggcaaaacctcttctctacaaaaatacaaaaattagctgggcatggtggcgtgtgtctggagtcccagctactcagggggctgaagtaggaggatcacttgagcctgggaggtggaggctgcagtgagccaagattgtgccactgccctccagcctgggtgacagagtgagaccctgtctcacaaaaaaagaaagaagagtgaaaagcaatggggaaaattaactttcataataattttatttaacacaatatatccataacagcataatttcaaatataatcagtaaacatcgtggagatgtttatgttctttttctcatactagtctttgttttttgttttttaaatttttttatttcaataggttttttggggaacaggtggtgtttgattacatgactaagttctttagtggtgacttctgagattttggtgcacccatcacctctcatactagtctttgaaagtcaatgtgcactttactcttgcagcacattgcaactgaacctgccacagtccatgtgctcaatggccatgtgtgtcaagcggctgccatattggacagcacaggtctggatgctccagctatggctggtccatgttgaatgagccctttgcttctccaggcctctgttttctcgtttctgcatgaggaagctagactagataggcttggtggctcctcttcatcctaacattcttcatctttcaatgctaaaaatggaaagcacgggtaaaccaggacaagcaggcttccctgtgggagctttgttttctcatctataaaatggggcaatcaaatatgacccagatccacaggcgaggatgtgctttgtggaggaaaaggagggaggcatagtgttgtgagattattttcaggactgtgattgaccactcacttagacccaggtctacctccttgatttatgtccctgaacctcatctgccttatccatccgtaaggtgcagataaaaatggcgcttacaaggcccagcatggaggctcatgcctgtagacacagcaactcaggaggctgaggcaggagggtcacttgagcccaggagttcgagaacatagtgagactctgtctctacaaatataaaaacaactagcttggtgtagtggcatgcacctgtagtcctagctactcgggagactaaggcaagaggatcacttgaggcacagagtttgagaccagcctgggcaagatatcaagaccctgtctctctctctctctctctctctctctctcatatagtctgtaacaattaaataaaacccctatgcagagggctcaggcaccaatgcttagtgcacagtaagctctcaaccacaggaggctgctgctgttacctttccttctgttgcagaaatgaggttcagggtggagagggacttggccaaggtcgcacagagaggagggagtagcagacgctggcctatttgggcttcctccctctcattggcagccatccccgatagtcagctactaatttcctcacagcaaggtaaatgcaataaatacacccgaagccactgaactacttgaatgaggcttgggtccaagtattgtttccatggtatgtaccctggcaagcatgcrtatgtgatttgtttaaaatcccagctcctgagggcggaggcagggctctcaggcaattctatccagcagccgtctctccctagacggtgccccccacccagaccggcgtgagatgcctcggtgtgatttcaagggaagggcccccttctacatggcgcctgaagtacctttggctggacagtgacagagtagaaagtgcactgaattaaaagccaggaagtccgaatcgttatctattacataacaataataggaagccacttttctgagttctcactactgtatgacattgccaagttctctgcatttactgtttcatttaaccctccccgttactcagagacgaggygattacaaatgaccgcattttggaactgaggtttagagaaaataaacaactcacccagaaacacccggatagagccaggaaggaccttaaaactcttccctggggcaggaggcggccagctctccctacggagcctcatggaaactggacattcaaaaaccgggacaagcgggtgtccttatagcagcttaatttattcatctgtaaagttgggggacagccgaacctgatgttggtsaggacaaggatgaaaaataggatagatgaggatgttttgcaggaggaaaaggaggcagagaaagtgttgtggaattgttattaagataatgattgacggccaggtgcaatggctcacgcctgtaatcccagcactttgggaggctgaggcaggcggatcacttgaggtcaggagttcgagaccagcctgtccaacatggcaaaaccctatctctactaaaaatacaaaattagccaggtgtggtggcgggagccgtaatcccagctactcgggaggctgaggctagagaattgtttgattccaggaggtggaggttgcagtgagctgagatcgcaccactgcattccagcctgggcgacagagtgagactctgtctaaaaaaaaaagaagctaattgacagagctcagacccagagcttgctgtctccctccctctctgtctctgtctctcagcagacagaaaatatatctgcctctccccagcccagcttccttccaactccttccaaagatcaagtttcctttctacagccaaggtgtgagagagaaacagcacaccaatttcccaagcaccagcccagagccctccctgattctaggatgcagcagagaaagagagaagaacgtgctgagagtggccaggggctgttgccaattgcttcatttctgttttcttttttccttaagcaaagtacaccaaaggctaattcccgcctctgtcctttagtaaggtctggcccaagccagagtctggaggaagtcagcttgggggccttgcctccccaagaggtcgcctttcagttgcttctttcattaaagaattaagccttaatgccaaacgggatgctcaagagagctctggaggtcccggctgtctctgccaccaactgaacagtgagcatcctgggtttggtacctgcaggacatggggcttggggagggttaaggaagcaaggagagagaagggcacagcggtcctggatgggtttccctgcaaaccagaacccagcagcaagatgccgaaagacactcagccggttgacacccgggccacacacagcagagaaatgacacagcacgcgggcracgcatgaatacacagaaacacacacacagagcaacgccagatggagaacgcagcccrggctgagcccggggattcattatttcctcacccacacagaggggctgacagagttacgtaatgcaggctgcaaaggggaggctgaacttgctaattatcccccccacacacccccccattgaggggatccaggaggtggcacctccctctgggaggggtctctgcacccaccttctgctctcagaggcagcaggagcttgtcagctgcctcagccctggggtgaccctgggaagtcgctaaaagggaaatgaggaagtgagtgtcagtttgttagtcatggcagatgggggctccctcctggtgctgaagcatggtgaggwtgctggcaggaaggggctttgggacagagatggaagtagcacttgagtggggagcagggaaagagatggaagggttctctgatgtctcctacccatcttgctggtattgatgtttgtagtgtgaccaaacctatctttttgaacttgcamcaaactaataattacaagtagggacgggcggctacttcccaccctacccacacccacagatcacctgccccatcccagatgtgccacactgtgcatgtacacggccccgtgggcacatgctacaggtgcttgcccctcacctgggccacagcatctccagctgggcccccattggcctttggtaccccaaccagaccccatttctttgagcctgagagagtcagtgacttgcaagatkccagcatttcagggagaaagttaggagttaagaaaataactagaatataaatttgattttggcggggggcaggggagacagagtttcactctgttgcccaggctggagcgcaatggcgtaatctcagctcactgcaacctccgcctccttggttcaagcgattcttgtgcytcagcctcctgagtagctgggattacaggcacccgccaccacacccggctaatttttgtatttttagtagagacgaagtttcaccatgttggccaggctggtcccaaactcctgacctcaggtgatccgcccgccttggcctcccaaagtgctgggattataggtgtgaggcactgtgaccggcctgattttttttttaaataaatagagaaagggtcttgctatgttgcccaggctggtctcaaactcctgggctaatgcgatcctcccacctcagcctcccaaactgctgagattacaggtgtgagccaccatacctgtactataatataaatttgaaagagctagagtataagtttaaaagctcaggctccaggtcaaatcctccccctgccattattctctatgtgaccttggacaagttactgaaccttcccaagcttccctttcctcttctcttgaggggttatcgtgaggatcaaaggagaaataacaaatatgtgttaagagcgaacgtgctcaaaaagtgtctgccgtgtttagtctttgggatttttccttcttcagtcaacgaatgttcattgagtgcctacaatgttcctatgtttccccttctccatcagagtttcagctgtctgtggagcacaagtgtcttccacaattttgtgtggacccatcttcttagtatttatgtttgtagtgtgactaagcctatccttttgaacatggaacaagctaataattacaaaaatggttatgaaggccaactgacattcgtcatcattgtgtacatggaaggcagtgtcattcccgttccactgggctttgggagtggctggaacagagagcccaaaaatctgtgccagctgagcccccgagctatggatggaaaatgtatacaagacacagagagcaactagaatgcttgacaagttggactgatgacctctcgtggtgggaaagagataagagaggtcttttgattctcgtcacttgatttctggggctgactgtccatgtttgcccagggagacccttttgtcccagagggctttgatcatggaagtgaaactaggtaatttgcagctaaccttgaaaggtgccccctccaggaagaaggattttgtttctaggttggcttgaaattctggagtgtcttgtgtctagactttgtcaattggctgcattttctatctcagttttcaaggtggtgttgggcactctacttcaatctctttttttaaattcttttcatcccctcctgttcttcctcttcagctcatgatgcctcagatctgatccgcatctaacaggctggcaatgaagatacccagagaatagttcacatctatcatgcgtcacttctagacacagccatcagacgcatctcctcccctttctgcctgaccttagggacacgtcccaccgcctctcttgacgtctgcctggtcaaccatcacttccttagagaataaggagagaggcggatgcaggaaatcatgccaccgacgggccaccagccatgagtgggtgaygctgagctgacgtcaaagacagagagggctgaagccttgtcagcacctgtcaccccggctcctgctctccgtgtagcctgaagcctggatcctcctggtgaaatcatcttggcctgatagcattgtgaggtcttcagacaggacccctcggaagctagttaccatggaggatcacatgttcggtgttcagcaaatccagcccaatgtcatttctgttcgtctcttcaagcgcaaagttgggggcctgggatttctggtgaaggagcgggtcagtaagccgcccgtgatcatctctgacctgattcgtgggggcgccgcagagcagagtggcctcatccaggccggagacatcattcttgcggtcaacggccggcccttggtggacctgagctatgacagcgccctggaggtactcagaggcattgcctctgagacccacgtggtcctcattctgaggggccctgaaggtttcaccacgcacctggagaccacctttacaggtgatgggacccccaagaccatccgggtgacacagcccctgggtccccccaccaaagccgtggatctgtcccaccagccaccggccggcaaagaacagcccctggcagtggatggggcctcgggtcccgggaatgggcctcagcatgcctacgatgatgggcaggaggctggctcactcccccatgccaacggcctggcccccaggcccccaggccaggaccccgcgaagaaagcaaccagagtcagcctccaaggcagaggggagaacaatgaactgctcaaggagatagagcctgtgctgagccttctcaccagtgggagcagaggggtcaagggaggggcacctgccaaggcagagatgaaagatatgggaatccaggtggacaggtaagctccacaggggtgtgtgtgtgtgtgtgtgtgtgtgtgtgtgtgcatgcttgtgtgtgtgcatgtgcgtctactgagactcagcctcatagcccagaagccaacctgggctgtctcagatacctgtttttgcataaccacttgacggcccccttgatcttcacttaaaattacattcacaagaggccacagggcatagcttctaggatgcttctcttgtcacaaaacccagagcgaattaatcatcatggtagcagacagtgtgtcttctcatctttatcccctataatcctccaggaaacttacttgcatttttgcaatctatgtttcacaagtgagaagacggaggctcggagtggaggctgcccttcctgaggttgcctagcaagtgggaggcgtgtgtgcgtggcaccctggggtgtgtggctctgcaaaaacccttggaagacaggagggaagagctgagccctgggcaacccttagcttaaatcagctttctcctcattgcagccagtccaggatgcgtaaaattctgaaggagtagaagggaatcaaagtctagaactggccccggttcctaaaaaccgcagtcttgctgggattatgtgggagctgggactagaacttaaagaactgggtaccagccctctgtgtttgccagattaatgttttcaattctctgcaggaggaaagctggcaacagagtgggtgatgctagctccttctatggggagaaaatcagcagctgggccaggcagtcagagaataatgggtcaggagattaaacacagagagaagtttctctgtcccccttccatttgcatcttaggtctggcactgacgytacagcccccartgctgccagggtgggtctaggtatacccagagggaggctcagtctgaggccaccaaaaaatccaggccaagatttcccaaccctttccccaagaaccccaaagtgtcctcagagcacttagagatcttcaggaacattccgccccccacaatctgggggcctgggttaaggtagctccccagacccctgcattcactcatttaacaaatgttcattgaggacctactgtgtgtcaggcactgtcctaagctctagggtagagcaatgaatgaaatcaacaaatcccctgccattggggagctcacagtatagtggggaggactggtggtaaataagataaatatataaatatgtaatgaggtcatgtgctacaggtgcataatgatgtctcagtcatcaaagggccgcttatgtatcagggatcccattagattataaaactgtattgttactgtaccttttccatgtttagatatgtttggatacacagatccttacaattgtgttacagttgcctgcagcattccgtacagtcacatgctgtacaggtttgtagcctggaggcattaggctacaccgtatagcctaggtgtggagtaggctctcccatccaggtttgtgtaagtgcactctatgatgttcccacaatcactgaattgcctaatgatgcatttcacagaatgtgtccccgtcattaagcgatgcatgaccgtctgttagggatatatgtaaaggagataaagaaagcaggaaagggattagctgggcgtgatggcacatgcctgtagtcgcagctactcaggcggctgaggcaggagaatcacttggacccgggaggcagaggttgcagtgagctgagattgcgccactacacttcagcctaggcaaaagagcgagagcragactgcgtctcaaaaaaaaaggaacaaaaaaaagcagggaaggatgggatcagaaatattgagaacttttaaatagggaggctagggcaggtctcactaggaaggcaacatttaaataccgccaggcaaggtggctcacgcctataatcccagcactttgggaggctgagacgagcagatcacctgaggtcaggagttcgaaaccaacctgccaacatggtgaaaccccatctccactaaaaatacaaaattagccaggcrtgatggtgggtgcctgtaatcccagctacttgggaggctragccaggagaatagcttgaacccgggagacagaggttgcagtgagccgagatcgcaccactgcactccagcctggaccacagagtgagactccatctcataattaattaattaaatgcctggaggaagggagggagggagtctggcagctttctagggggtgggagaggggatgggcactccaggtagagagaagatcctgtgcagagtcctcaggtaggagtgtgcttaacgtgtttgaggcactgcttggcatgcaccttcctcccaaactgccctttgrtggcccctcagtctgtcacagcccacctcagcctgccagtgcatcagagttttcctaacttctcacacctggacaaaaatggggccaattccagtragacccaagagccccccaaggagtaagacaggggctccatcacaagtccctgggcagaggggaaaccagggtcactggcctccctttaagccccttccctccaacctactccttttttcctcggtacattccctggggacagcctggagtcctccctgcacctttggtcctcatccccaggaggaggaagaccaawagtcttggaccgaatacacacagcattgtgtgacgtctcagtgaggtagatgcatgcgtggggaactctgtggcattggatgtccatttccagagtgggtagccaggattagtcttcaagattctgctggctgggggagatttgaagcctggtttacccacaactagcacaggaggcctcccaggctggaacccgggcctcagggagctgccactgcccatgggtccctccagcagcacatccagtggaggtggcatcttgaggccttgctgtgtctcccagtmgtccagctcatgccatagagttaaatcctaaggcagctgtaggawccagaacggaaggcattggccttatttgccaggaggctttgggaagtgtccctcccgaaaggctgcccccaagcaccacctctgcctcccaatcctctaccaccctccctgtccctcagtgytccctgtccctcagtgctccctctcctgagaagagcagcaccagtgtggaatgggagctctgtcttactttatataagcagagtccccttcccatgggcagctgaatcccagccgtatctaatatccatgcacttgattgcaattctcaactgggcatcaggtgggcatggaggggtgagtatcaragttctgaggggctctatttcagccacacccccagaactccaggagtctgaatctctgtatgcgatgtggagacgtcccccagaggatcccagtgcaccctctcttccagaactgggagctgggtccttcccctccagggagttcgtttgatcctctcccccagccgacagtctgggacacgaggattggtgcagaactctaggcttgggtgtgatgtggaggacttcacgggagccctcrtgtcaccaagcaccaaggggctcctctccaaacgccatctcaggaagcaatgtcctgcctttgtttccccaaggaagagggagggacaagtcggcctgccatggagtcctgcccctgcagacctattttcccagctcaggaggctgcatccaagctctcagcttccctcatcccttgcggccctcccactagtcacccatctcaactgtgaccgtgatgaggtggtttgcccgaaagcggccaaaaaacctgcttcagaggagaaacaaggtctagagaaggtggcttagagcaagtacagggctctgtgaaacccacttaggtgagcagttctaaggatgagtgatatttaatcatagtgtgtgtcctccttgctcaatggcttggactcaaagcacccccatttctttttgtttttgtttttgttttttttttttgagacagagtctcgctttgtcacccatgctggagtgcagtggtatgatctcggctcactgcaacctccgcctcccgggttccagcaattctcctgcctcagcctcccgagtagctgggattataggcatgtgccaccacgcctggctaatttttgtatttttagtagagacagcgtttcgccatgttggccaggctggtcctgarctcctgacctcaggtgatccgcccgtctcggcctcccaaagcgctgggattacaggagtgagccaccatgcccggccagcacccccatttcttaacacatatttttaaatgtctttactaactggatgctaattcatggatagcagtttaaatgtctttactaactggatgctaattcatggatccagttagaagtgctactcgcacttcatatttttaaaatctaatataatgccattaactataaaatgaaggggacctcataaaagtaacttataatttcaaaagcctgtaatttaacatatcagtgctcagacacgactgcactggaatgatcagatgtttgcgcctaagcatagaatcacagcaaacacaacagcatcagaagcagagactgacacaggtgtgttgttttggctcaaatgccatgagcagcgtcgccttggtgatgcaattttccaaaatagtgaatgactcctgataaaacgatgggtaaatcaatttttccttaatttacccagtggatttactgcayggaaaattcagtctgttttaaagccgtgtttatacaagagagagttgggatctcagcccgggaatataagcttgccttttatatgtgtgaagtcccagagatcrtgtggcatgcaagactctcttccttcatgttcctggcgttgcaggaggaccaccacccctaatgccacctccctactactacaatgccaggagcacccccacctccatccttgtaacaaccaaaactacctccacaaattaccaaatggcctcctaggggctgaaataaggacctctttaggcatcagtgtcccaagttaggaattggaatcccagagctagaatgttcttcggggtcactcttgtgacgggcagtcctggcttgattcaagccgcttagagcacacggctgcctggaaaatgctcatcctcccggtgacctctccatccaggctgcatgtcggggtgggcatcagcactggcatcctggatgctgggtgaagtcactggcccaagaaaacccactgacttgggtgacagtgaagcccaccagtcccagagccccagatccaggacacacacgccagtcggggagccaagctgaggtgggagccatcactgcttctcagcagtgccttgtctctcctgctctgttgtccccattttctttctttctttcctcttggaaacaggcttaatctcctgccacatctcttccattcccccatgggacgtccctgtagtttcaggatggtggcacttacgtgsgaggagaagtgatgtttactctaaagacagtcttatcccttcatcccaggaggaaggtggctccagcaggcagtggcagcaatacgagggggtttggggaaggcagatagtgaatcccaaagtttcagcaccttctgtacttgggagcagtcactttatttatttatttatttatttagagacagagtcttgctctgtagcccaggctggagtgcagtggcgccatgatggctcactgccatctctacctcctgggctcaagtgatcctcccacctcagctccccaagtaactgagaccatgcccagctaattgttttatattttttgtagaaacagggtttcatcatgttgcccaggctggtctcaaacycctagcctcaaattatccgcccgcctcagcctcccaaagtgctgggattacaggcgtgagccacygtgcctggctggagcggtcactttaaaatgctgcgtgtaagagaatatccaggttactcagcttgctgccctgaaggagggttccaaagaggccaaggtccccgatccagtgtccatctggaccagcaggtcagcctcgccctgctctgataacccctccctcttgtagagcacttggtcacttacaaatagttgtcaacctcttccgagagtgtctgaattctgccccgtaagtaggatgtgtagtttcagcctactttcatagatgagggcgaggctcagagaggtaaaagacttacccagggtcacacagcactggccacaggatgctctcctggttctacctagaagcctcatagtgagtgtctagaactaaagagacaggccaggtgtggtggctcatgcctgtactcccacatcttggaaggctgacgcaggtggatcacttgaggtcagcctggccaacatggcaaaaccccatctctgctaaatataaaaaaaaaaaaaaattagccagacgtggtggtgcgtgcctgtagtcccagctacttgggaggctgaggcaggagaatcgcttgaacctgggaggcagaggttgcagtgagttgaaatcgcctcgctgcactccagcctgcgtgacagagtcaaattctgtctcaaaataaaataaaataaaataaaaaattaaagggacactaggcaagagaatatggctggaggaayggaagtcaatttcaaccccagagaatcagctcagttgtcggaggcagagaagaaagctccttctgtggcaagcctacgttttataattatgagtctggtcaatctctatggagcactagaagtgagcctggctccatgctacagtctctatgtcaattaattggttttctctgcacagcactttgttttcctgatggcgaaaccagggctcagagaggtatggtcacttgtcccagatcacacagctagcaagtagcaaagccaggacttgaccccaaattcgtactcttggcctctactgactttctggattgcattgttggccacagtgcacttggcttctagccatcacattttttargacactggaatattttctcagagtctgaaagggaaactgaggccttgggtgtcatctactaaagaaggtgcccctggcctgttgtagcgaatgcaggtcaccctgagggatgcctgacattgagatgcccaagacctagcttcattcaagcaacaggagggactcccccatttatggaagggccccttcatttgctctgtggtcctcatgccctttcttcttcactgcaaccttggtgggcgggcaggcttatcccatggctcttcctcagaataaaaggctgggtacccacctgacaacacggcaggggcacagatggagagagggtgaaggatgggatgaaaaagcccatccttcatccaaggctggttcccacccatggtctcaccatttaagcaccacattccattcttctctgaatccccatcatttagttccaagcttgaccccagggtaggccttagaggagggagggagggagggaggcaaggaagaatgcatgaaagaaggagggagggagggagtaaggagggaagcaaggaaggagggaaggagggaaggaggaagggagggaaggagggaaggaaggaagaaaggaaggagagagggaaggaaggagggaaggaagtggggagggaagggaggaaagagggaaggagagatgaaaggaaagaaggagggaaggaaggaaggaagaaaggaagcagggacggaaggagggagggaagcagggagggaggaaaggaatgagagagggtaggaaggaagaaaggaaggagggagggaaagaagaaaagagggagggaggggaggagggacagggaaggaaggaaagaaggagagagggaaggaaggaggaggggaaggagggagggaagaaggagagaggaaaggaaggagggaagggagaaaggaagggaagaaggatggagggaaagcaggagtgaggaaagggaggagggaaggaaggaggaagggaaagaagagagaacgaacgagggaggggaggagggacagaaggaaggatggaaggagggagggaaggaaggagggaaggaagaggagggacagagggagggaaggaaggagggaaggaagaaaggaaagaggaagggaaaggagggagggaaggaaggagggaggaagggaaggaaggaaagagggagggaaggaaggagagagggaagaaaggagagaaggaaggaaaaagaaggaaggagggagggaaggaaggaaaaagagagggaaggaaggaaaaggggaagggaggagagagggagggaaggaagaagagagaaagggagggagggagggaaggaaggagggaaggaaggagagaaggaggaaaggaaggagagagggagggaaggaaggagagagggagggaaggaaggagagaaggagggaaggaaggagagagggagggaaggaaggagagagggagggaaggaaggagggagggagggaaggaaggaaggattctgttcccccatggctttctctacagcagggaagaggactggctcggtttttgcttcgaggactcacgctagttagaattctccattagaactgacctcagcatgaccaatggcagtattgattccaggactgtctgagtcagaagcactcctcccagaccacacttgatgtatctcagagcttggaatccctctgctggggcatatttcaattaaggaactaagcccagtaacttagccttcaacctgaatttycaccttttattctgatcttgcccacttgaacgtaagcagctccccatccacccttcctggggattactctcgctttgtaccctctccccatctgtgtccctgccgtcttgccaggtgggtacccagccctttattctgaggaagagccatgggataagcctgcccgcccaccaaaaatgatgggtaaccagggggcttctcaccgcctttcatggaatgaatgttccatgagcatccattctgcccctgacactgtactcagccctgggaattccatggtgaacctctgcccttggagaatcatatcagagatgagaaatcaaaaataaataggccgggtgtggtggcccacgcctgtaatcccagcactttgggaggccgaggcgggtggatcacctgaggtcaggagtttgagaccagcctggccaacatggtgaaaccccgtctctactaaaaatacaaaaatcagccaggtgtggtggcacacrcctgtaattccagctacccaggaggctgaggcaggagaatcgcttgaactcgggaggcagaggctgccgtgagccgagaccgtgccaccgcactccagcctgggcaacagaatgagactccatctctaaataaataaataaatagacacatgcaatcatcttagatagtggtacatgctgtgaaggaaataaaacagtgatttgaagaaaaggggcttggggtttggtagagcattagataggggggtcaggaaggggctttctgaaaagacaacatttgtactgaggccagaagataccaaccatgtgacatctagggaagggtgttcctagcagaagacacagcaggagcaaaggccctgagacaggaacagggttgggacgtgcaaaggacagaaagctcgaggggcttgagcatagtgagtggagggagagtggtgggcagtgaggctggacacatgggtgggcccatcaaccaccctactgtcatccctgtccccgcccccattcattcattgtatcagcttcctatggctgcataacaaatcaccccacacttggtggctgaaagcaatacacctttattcccttatcattctgacggtcttaagtctgaagtggtctcagtgggctgatatcaaatcaaggtatcagcaggactgtcttctttcctggaggctcttgaagagaactcatttccttgcctcttccagggtctaaagctgcattccttgcatcctttagcttgtggtcccttcctccattttcaaagccaggagcagagcatcttgcttccgtggtgacatcccttctgtagtcagagctccctctgtagccctcttatcaagacacatgattaaattggcccacggagataaccccagggaatctgctcatcacaagatctttaacatcccatcatatctgcagagaccctttctccatctaaggaaacatatacaggttcaagggtttaggacctgagatccttgggctgttattcagcctaccacactcatctaaccaatgccattgagcaatgctgtggccyggccctgggctaaccaatggctgtctctgttgccatccctatgaggtctcactggactaagtccactgaccttgcttctagcccctccttccactttacctctcaccagctacgtactttaggaaagccctttgacttctttgggcatcagtttccccatctttacaaatgagatgtggaccaggtgagccttaaggtttctcctagaactagkgttcaggttccttgtgagggccagtggctggcacgctcatcacaggccaggccacacctggatcgtaggaactaccccattccacctctctggaacattcctccaaagagaggaactcaaaacatccttttagggcaagggttgcaaacaaggttgaggaccacacacagttttcccatgarttttatttggcctgcagttttctagaaatgtgaatttgcggcaaaatcaagtttccaacctcttaaaaaaaaatccacagaactgttaacacagaatctacatctttgtgaggcaaccagtggcaggagctgggaaggggccactgcggggtctctcatcctccagcatccaaacagcccagtccacacattgacctcactagcctgtcttctgcagacatatgagtttgagaatcctgcccagctttggtgatattagcaattaagtcacaattgtgacagagcccaaaggccctctcctcacttcccagctgcggcattcatggtagaattcctcctcttgaaagcatacttttggccaggtgtgggggctcacgcctgtaatcccagcactgggaggccaaggcaggaggattgcttaagccaaggagtttaaaaccagcctgggcaacagagcaagaccccatctctacaaaaaattttaaaaactagtcagggatggtggtgcatgcctataatccctactactcaggaaactgagacagaaggatcacttgagcccagaagttcgaggctgcattgagctatgatcatgccactgtactttagagaccttgtctctaaaaataataataataataaagcatacttttctgtttaacaagaacttcccactcctcccactccaagcatgatgaaatctagaagaaaagstttgcagagaccccagacccagcctccacagcctccaagtcttcctactttaactcagctcccagcattccagcccaggtggaggcagaaaccaaggctgttggagcatgcagggccaggagaagcaggagtcagagagagtggagtgtctgctgaaaaatgtggtcagggcctcctgccagcaccagctgctcctcggcggcctccttgtctggttggccggaacaggcagcagcccccgcctccctgtgcccagcacacaggcttggcccacctgctcccctctcaggtcctcrgggtccataagtggtcagcaacgggccaatcgacccaccttcaaacttcctggggaatcaagcccaggaccccttttccttccgtgcaagaggtcggggaacctggttcttaggaagcctcagttggaaggatctggcaaagattctcagaaggtttagagatgcaagagcaacttttggcttgggtatgatcatccagctagtgaagtggaagaaaaaagggtttagttttgctcttgccagaaagcatagaaaatgcttgccaggagggaggcagagctccacacctggccttataggaggatgggagtgaagaaaggaaaggctgacatctctaacccagaaggaaccttgctgcctactgctagagcctgggccagagagttcccagggaaatgggtctcccagtgtgtccatggaccacctggggtgcttctgatgatgcagatgctagggttccctcctagacccactactcaaactctctaggaggagagctcagaaatctgaggggtgtgtgtgtgtgtgacagggtctgtttctgtctcccaggctggagtgcagtggcacaaccttagctcactgcagtctcaaactcctgggctcaagtgattctcctgcctcagcctccccagtagttgggactataggcaggtgccaccacgctcagctaatttttttattttgtgtatagacaggatctcactttgttgcccagcctggtctggaactcctgggctcaagcaaacttcccacctcggcctcctaaagtgctggaatcacaggcatgagtcaccatgccgggccaggaatctgaactttagcaagcctctcagttgatttggatgcaccctggagtttgagaaccaccaaatgtgaccacctgatagccctggccacactggccaccacaatgccaagctcattgggggatggcttttccagagrgagaaggacacctgagaggggtgggtgagggccatttagtgaaggcgagctcctcaattacatctgggaacaagggacagctggtaaataagtccttgcagatccttgggtgagcatagagcaaggatggggaggaacttggaagcattgcrttgagatgctcagccacatctaaaccactgagagtgcctctcaatggttaggagtacaattttgcctcccagggggcactttgcaatatctggaagcatttttttggttgtgacaaytttggggataggggtgctactggcatctagtgtgcagaggccaggaatgctgctcaaacatcctccaacgcacaagacagtcctggcaacaagaaattatcaggcccaaaataccagtagtggggaagtagagaaactctgatctaaactgagattattccaggcagctgggcaagaccaagactcatgagcactgttaaaggggagttaccatccagacatctcagaagtcaaaagaggccctgtccatctccttctgtgagctctcaatatatttttggtgaataaataataaaacaggccaggcgcagtggctcacacctgtaatcccaacgctttgggaggccgaggcggatagatcacttgaggtcaggagttggagaccagcctggccaacatggtgaaaccctgtctctactaaaaatacaaaaattagcaaggcttggtggtgcacgtctgtaacctcagctactcaggaggctgaggcaggagaattgcttgaacccaggaggcggaggtcacagtaagctgagatcgtgccactgcactccaacctgggtgacagagtgagactctgtctcaataaaataataataataaaaaaacagagttactaaatttatatttcacagatgagtatattcaacacatctaccacatttggagagaacatctaacatccaagtttgaggttcttctcagatatgaggtctaaccaaatgctgccctcccagaggccccccacataagccctatacacagtgactctcagctgggayaacagtgaagagacatctcatctgcaagctcttgttgcctgctgtgtgacctttgacaaattacctaatctctctgggcatccgttttcttagttctaaatggaaatatacatcactcatgtttagttagtgccgattatgtgctaggcattttacaygcatgatctcattaaattccygtgacaggtgggacatgaagtgggccgtcaaggctgagtaggagttggctctcagcagagggaacatgaaagagcaacctggggagcttaagtataaaggtaagggtggacgtggtgtgctcctcgggaagagggaggagtcaagagatcagggccaagaatgataggaggtaggagtctggaagggtagtagagaattatcgaattcctgggctctgtgaacaagacatggcagctcagaaagtatctgagtgtagacttccccaygtgtgccccagcccccagcaaagatgccccctggttggagccacgtgtgccttcaattcccagtctttggagacattaataggtttccagcggctgcactgtctgacaatatagacttaagccacatgtggctctttaaatttacatcaatccaagttaaataaaatttaaaatttagttcctccatgacaataaccacatttmaaatgctcaattgccacatgtgtctagtggctataacatgggattgtgcagatatgagacatttccatcatcacaggaagttctactagacagagatgacttagaggaatagtcagtgttctacacagagctagaagtttctttctctgtttccttctgatattccataagcagtaagactgatagcaggtgccacactgccaagtattataagctttacctcccttaatcattgcagatattattgaccctatttaacagatgagtaaactgagtgtgagacatgaagtgtccaaagttgcacagtttataaccagcaaagccaggacttgaacccagttccacccaatccacagccacatccttaaccagcatgctacactgctcctgcaaccccagcaaacaggtggatccaggttgaacagacttgtggcaataagccagatatttccctcagacctggttatcactgacagattgtgggctgagaatcgaactaaatctccttctgattttgcttctgggtgaagggaagcaaaatagttcaacctggatgtttctcatggtcccatattaaaaatatccttcctgggtggatcactcgaggccaggagttcaagaccaggctggtcaacatggtgaaatcctgtctctactaaaaataaaaaaaattttaaaaattagttgggtgtggtggtgtgtacctataatcccagctactagggaggctgaggcaggagaatcacttgaacctgggaggtggacgttacagtgagccaagatcacgccactgcactccaacctgggagacagagcaagactatctaaaaaaaaataaataataaaaattttatgtgctcatcacacaggactccaaaattaagtttttgttggcaaaacacttcaactgcattatttaaacaaagtcttaatggattttttttaaaaaaagaatgatggtaaaagaaactctctctgcaaattcaaattcacataagatgaaccatgtgatcatttccaagttgcctaggtaattgtagcttataatttttgtaaattggctgcacttagcaggagatgttgggttacttgctstgtagcctctggcttagaataagcatcctaaccagtttttcctacctctgttttaaaaaaggaaggatctcctgtaatcccagcactttgggaggccaaggcaggtggatcgcctgaggtcaggagctcgagaccagcctggccaacatggtgaaacsccatctctactaaaaatacaaaaattagctgggcgtggtggtgtgcgcctgtagtcccagctgtgtgggaggttgaggcaggagaatcacttgaacctgggaggcagaggttgcagtgagccaagatcaccccactgcactcccgcctgggtgataaagcaagactctgtttcaaaaaataaaaaaggaaggatcttggcagcccatcagtcacacctagtttcaaatcccagctgtactatatgcttacggtgggaccttgggaaacttacataacccctctgggttcagttttgtcatgtgtaaaatgggggcttttaatgtctgttgaaattaaatgaaataacttctgtgcaagtacccagaatattatagaggctccaaatgcattaacctcctcccttctctgctgaatcctcatttatggtcatgtgatataggatcagtagtttcagagctgaaagggaactgagtgacatttagagcagcactctcaacagaccatacttctgtttacgatcatgtaggtagccrttgacttgggaaatgcctgtaatcaagagccactctgggtatgttttggtgacattttaaagggtaaaacagaatgttccctctgatgaatgcaaacctctccaggcagaaaagcagaagtggttttgatgtgggccacagggacagcatggaacactgcaggcaggggatctgggtggctcagagggagccgctggaggggtcactggggatygtgctctcagagcttggactgtggcttctgattcatcccaggtgactgtcattgtaccagaytgggggatgggggagtcccctaagctaggaccatagaacagagggcaagacaagggccagtcttaatgcctgggacccaaaccaagatgagccacagggcaagctgcattgcccagttagggaacagacagaggccatggtcagagtcaaattggataggggagccaaaaggagaaaggctgttgggaastaggagggcagtattcagagagtagaaggactcagagagtgagacaggtctgatgaggccatctggattttggtgccaactcctatctccatcttagagggtggccagcctgtggaacctagctgagatcacctcatcctgagcctgttagagttcagggacaggaagccaggaaaayttagtgggtaagaagtcggattctggccgggcatggtggctcatacctgtaatcccagcactttgagaggccgaggcaagaggatcacttgagtttgggagtttgagaccagcttgcacaacacagtgagaccctgtctctacaaaaaaacttaaaacattgccagrcagggtggtgcacgcctgtagtcccagctactggaggggcagaggtgggaggatcgctcgagcctaggaggtcaaggctgcastgagctatgattgcaccactgcactccagcctgggtaacagggcgagactgtctccaaaaaaagtcaggcgctagcatccagaacaagcctgggtttgaatccaccatcactagcgtgtgacttaggctagtgacttagtcactctgaactatagtttcctcgtgtaatgatgattgtgaggatgatgctggtggtcgtgaagatgctggtgtggtcctgatgccgaggaggaggaagaagatggtgacaatggtgatgctgctaatgaaggtgatggcactgatcatgaagattaggatatgatgaggttgaggatgataacgatgagggtgattatggtgatgatgatggtgatggtgattatggtggaggctgatgaggaaagttagatgatgatgattacaataatcatgatggtaacaatgagaatgatggtggctatggtgatgattgtggtagtggtsgtgataaagatgatggtgatggtggtggtgatgatgatgatgatgatagtgacagcccctactttagaatggatgtgatgagtgggctggaatactaggctttgccactgtgtgaccttgagcaacttagcttctctgtctcccttaccccttccataaaatggtgattaacaatcattcctggacaggttcagtggctcacgcctgtaatctcagcacttcrggaggctggggtgggaggaccacttgaaccaaggagttcgagaccagcctgggcaacacagtgagaccctatctgtacagaaaataaaawaaaaaaaaattaggcagacatggtggtacacccttgtagtcccagctactcgggaggctgaggcaggaggatcacttgaacccagaagatcaaggctgcagagagttgtgattgtgccactgtgttccagctgggatgacaggacaaggctggggaaaaaaacgaaaaacagtcattcctgcctcaaagggttgtcacaagagttaaatgcactaaaacacatggccaggcatggtggctcacgcctgtaatcccagcactttgggaagctgaggcaggggcatcgcttgagcccaggagttagagatcagtctggccaacacagggagaacccgtgtctaatatarataaaataatattttttaaaaacccacatgtaaagtccttggcacatagtaagcgtttaataaatgctatctctccttattaatagtattattatttttgtcattatgttccctttattttccgaatcattctgtttgtcctgagctgctattgttcaaagccgaaagtcttagccagggtcagaataacttattacccaaagcccacaggacctctctatccttcctacctcctactttttccactggtaggtgtcatgaacagtaagttgtccaggggttcatggtacatggagtattactaggaaacaggcctcctgtgttcccagatccatggaatgaagaagggagagggacaagcaaaatccttctccttgccatcctgaaatgatgtccacaaagttagggatacatcagctgtcaaggtcaccttggatgagctccctttgtgattgacacccagagctgccttcccacgtgtcactgtccgtctttatgaagcagcaggatgggtacccaaagctcgctggctcatatggagttatgtgagtgagctactgaggttctgtacagactcaggacttccaggtcaaagcaaccagcaagtccctcctgatgtccccttcctcacctgccccaccttgcctttcagagatttggacggcaagtcacacaaacctctgcccctcggcgtggagaacgaccgagtcttcaatgacctatgggggaagggcaatgtgcctgtcgtcctcaacaacccatattcagagaaggagcaggtaagtgcttgatgccaagctggtaccactgcttcccacgccttctcgaccccctcccaggtgggaagctgaggggagggaagctaaatcctaaactgtgtcatgatggaaatcagccgccgtggctggagagcttgggaggccgaggtcaggagtgcttatcctcggatgtggatctcgactttgtttttgtgtggtttggtattgtttgtgagmttgccgtttttcacattttaattctgtttcttctgggaaaggcattcacatgattccaaatttaaaagatataaaagatacatggtagctggtcrtagtgcctcatgcctgtaaccccagcattttgggaggccaaggcggaggatagcttgaggtccagagttcaagaccagcctgaccaacrtggtgaaaccccatctctacaaaaaatacaaaaattagcctggcatggtggcgggcgcctgtagtcccagctactcaggaggctgaggcaggagaatggtgtgaacctgggaggcggaacttgcagtgagccgagattgcaccactgcactccagcctgggtgacagtgcaagactccatctcgaaaaaaaagacaaccagcctgggctacatagcgagaccctatctcttttaaaaaaaaaatttttttttaattagtggagcataatggcatatacctgtagttcctagctactcaggcgactgaggcaggaggatcacttgaggacaggagttcaaggctgcagtgagctgtgatatagcacctctgcactctagcctgagtgacagagtgagaccctgtctctaaaaaaatattgaaataaataagcaaaaagatacatgatgaaaagctctatctgttcctaatccyagtcacatagttttcctccccagaatcaagcaatattaatggtttttgtgtgttcttttagccgtgttttatgcattgacaaacacacacattaawtttgaatatttttacacaagtaagagcacattacacatgttgttttatatcttgctttttcacttattaacatatcttatagattagtccccattagtgggtaaagaggatcttggttccttttttatagccatataatatttcattstgtgatcatcctgtaatttattgtatcagtccttcataatgagccactgtcaatattttgctatgacagtgccgtaatgagtgaccttgtgcccataccttatttggcacatgrgcaggcttatcaatagaataagttcctaaaggccaggcatggcggctcacgcctgtaatccaacactttggaaggccgaggcaggaggatcacttgagcccaggaatttgagaccagcctgggcaacatggcaaaaccctatctctaaaaaaawtamcaaaaattagctgggtatggtggcacatgcccrttgtcccagcyaccctggagacygaggtgggagaatcacctgagcctggaaggtcaaggctgcagtgagctgtgattgtattactgcaccactgcactctagcctgggcaacagagcgagaccctgtctcaaaaaaacaaaatagaataaattcctagaagtggrattgttgggccaaaattcacgtacatttgtgatttttgtggtacttgccatagtggttggatcaatcttaccggctaactaggagactgtttcttcacagcctcgccaactccatctgttatccaactttttagtctctgccaatctgttcagatgtgttttgacagctaagtcaatatcatttccaaagagtggctaggtttggctggagatcagcagcacctttgtcttacctgtccagtaagstgatgggccaggccagggcaaccctagggaatcgtgtgaatttcamacccatcctctgcattgcagtgaagtyggcgtgaccggtgggaggtcgaaacatgggggtggcctaggtgactcagcaagtgatgaccsgcttcattttcctgatgcttggcctacagatggcagctttcactgccagcgcacctaaacaaggcctcaaagttctctacacagcttcagcggggrggatgagacattctagagccttggtggtaactgctttccttagccgctgatggctggccaggaagataaggacatcagggattctgtggtaggtcagacccatggtcccactagctgaatgtccctctagcagtgatatctggaaatgtttggtggaaaagcacaactgtagacttttattatgttgtcctcaaaagtcaagaccacactgaagcattaggaaactattctccattcatgattaaatgaacaaatatggtttaaagctcttctatattttctttcttaattcaaaacaaagaggtatggccatcatatgagccctcacaagagaaagaaagacagcaagaggcagcctygggccagatctagcctgcagacctgatttgttaggtctaccccgtattgtattaagagataatttatagttatgttttaaatgtattgccaatgtttcaaatttttacataaatatatctacagcttctctttaaaatttacataatctatggccaggcacggtggctcacacctgtaatcccagcactttgggaggccgagggaggcaaatcacgaggtcaagagttcaagaccagcctgaccaacatggtgaaactccgtctctactaaaaatacaaaaattagctgggcatggtggcgggtgcctgtaatcccagctactcaggaggctgaggcaggagaatcgcttgaacccaggaggcagaggttgcagtcagccaagatcatgctactgcactccagcctgggcgacagagcaagactctgtctcaaaaaaaaaaaaaaattatataatctgaccacattgcgcctatacgctgttttttttttgtttgtttgttgttttttagagacaggtcttgctctgtcttccagtccaaggtacagtggcaccatccaggccaaggtacagtggcaccatcatagcttactcactgcaacctcaatctcctagacttaagagatcctcccactgcagcatcccgagtaactaggactacaggctggtgccackagacctggctaactttttatatttttttgtagaaacgggatcttgctatgttgcccaggctggtctcgaactcctagttcaagcaatcctcccttctcagcctcccaaagtgctgggattataggtgtgagtcactgcagccaaccatattcttatggggcaacaatctgcatagactgaatagcagctgccccctctagacaggatgtggctttctagttggccacaaacctcaccactccctattgtctccctcttattaaggccagtgtccattgtcatttataatagcattagtgcttttgatttcttatactaggaggaaagttaaatccttttgtacccatgtctctattattattattattattattatttattgtgagacagagtctctggtgctgtctctgctcactgcaacctccgcctcctgggttcaagcaatcctcccccctcagcctcctgagtagctggaattacaggtgtgtgccaccacactcgggtaatttttacattttttggagatggggtttcaccatcttggccaggctggtctcgaactcctggcctcaggtgatccacctgcctcagcctcccaaagtgctcggattacaggtatgagtcactgcacctgggcccatgtcatttttataagtggcaggtagagatggaccaagaggttcatgttttaagaaagatttttttggctgggcacagtggctcacacctgtaatcccagcactctaggaagccaaggcaggtggatcgcttgagcctaggaatttaagaccagcctgggcaacatagcaaaaccccgtctctacaaaaaagagagtataaactattaactgggcctggtggcgtgcacctgtagtcccagctacttgggaggttgaggcgggagtatcgcttgagccrgggaagttgaggctacagtgagccctgttagtgccactgcactccagcctgggtgacagagcaagaacctgtctcaaaacaaaaacaaaacaaaaaaaagcacctaacaacattcttcatttctacacacacaaaagtctttctttttaaatatgcaactaaatgtcctrtttggaagttacccagccttccttactgatttagcttacccacctaccacctccaggtatccatttgtaattcccggtctgcagtaatccttgagatctcggttcgaaggaagaagcaggggaggccttgactccgcaagaaagacactaaaagtcaatgcagaaatctgagcaatggcagactggtcatttccttgcacactgcccaccttagttagacaatgccaacttgcaaagcataactttggtcttcaagcctgaggagtggagctcaacattgagaacaggacctcagggttttgaagatcagataagtgtttgcctaaaacaaaaaggaaacaggcattatagtaaaaggaatgcggggccaggcgcggtggctcacgcctgtaatcccagcactttgggaggccagggtgggaagatcccctgaggtcaggagtttgagaccagcctggccaacatggcgaaactccatctctactaaaaatacaaaaattagccgggcatgatggtaggcacctgtaatctcagctactcaggaggctgaggtgggagaattgcttgaacctgggaggtggaggttgcagtgagctcagatcacaccactgcactccagcctgggcgacagagcgagactccatctgaaaaaaaaaaaaaggagtggttgtggcggataacattgcttttttttcttgctgaggatcattattagttctctgaggttgtctttggtgctcacaacacctgagacacttgctgagttttgacatcatcaaaggctgttatcgtaatcatcatcttaagtgaaaagctaccctagataaataacatgaggacctacctgctgttgggccattctccctgcacaaactcagcgctggaagaaggaccgctagcctttgcaggatgtgacaatgaaaggacaggaagatatatggagagcttgccttaaggcctctgctaatatagaaattccgtttgcttggagaagggaaggactttgagggtgctggagaaagggggtaagactgaatcttccaaggtgaagtaagtgtgccgagcagttttagcctagagagttcctgggagcatgactgatagaccagcagagcttgggatttacgttcgtctttgcccaccatcaaatccttaatgtaggatttgacccaaaaagatttaaaaccacgggccaggccaggcaaggtggttctcgactgtaatcccagcactttgggaggctgaggtgggcagatcacctgaggtcgggagttcgaaaccagtgtggccaacatggtgaaactccgtctctactaaaaatacgagaatgagcccaggcgtgaggcacacacctgtactcctagctactcgggaggctgaggcacaagaattgcttgagcctgggagttggaggtttcagtgagccgagactgcaccactgcactccagcctaggcaagagagtgagactccgcctcaggaaaaaaaaaaaaaaaagtcacgggcctgcgaaatcatcctggctctgttgtctgagattcaattttccaaatgcctctcagaaatagagctgtcaggaggcagagaccctagcgctcagatatatttgagtcccagctccagcgcaaaggaaacagccctattaccgcctgctagacatctccataggcacaggcttcagaaatgcttcccagggtgagcaaattaatagaaaacacaatgttcttttttccatcctgaaagatgatctcctaacctcgcctctacctgctcaaagccactgtacctggagctcctggaatcagcttctttttttttttttttgagatggagtctcactcagtcgcccaggcaagagtgcaatgacgcgatctccgctcactgcaagctccgcctcccaggttcacgccattctcctgcctcagcctcccgagtagctgggactacaggcrcccaccaccacgtccggctaattttttttgtatttttagtagagacggggtttcaccgtgttagcaaggatggtctcgatctcctgaccttgtgatccacccgcctcggcctcccaaagtgctgagattacaggcgtgagccaccgctcccagccggaatcagcttctatccttccagttgtaacccacatttatggcttgtttaagcatccacagggggcctagcattgttaatgtcacaaagaggaacccagccactacctgcaatcctgagtcaggaagggataggtgggggttgagaaatggctgggcagggcagcaaagcaactgccaaggactgggcaaaaggcaatagaatgcaattgaagcaggacgaatgcaggttagacatgaggaagaacttcctaacacaggagactataagttyctggaggaaatagtgaggtctgaccccttgggaatcccagaagggatccccaccctcttcgatgctcttgtttgtctagattcaaagaaaatcagccctagaggcatcttcttttaagtccatctcaggaggctgaggcattaatctttatctagcagtcatttctcttgccaacagtctgggtcactgtgggtggggccagtgagacgagtccccagtcacagagtgcgttgtgtgtatgactttgtgaccctcatcttcaccacccccttgcaaattgcatctggcctgggatagtagatagaacaaatcagttcatctgtcaccattcacttgataacctgccgtgtgcgtagttctggggtagaagcaaagctgagcaaacacaggcttccctgcccttgagaccctcacggatgtgtgtggggagagactcacataagattcaattagtgctgaaataaagaggagcacaaaatgctttgggaacataattacctcagcaagtagataccagggaaggtttaccccaagaagtgacacctggtctgggttttgaagctcaggtagaagtttgcctaaaagaaaatggaaaaaggcattataggcaagggaatggttgtggctgatatgttgctttttatttttttcgctaaggatcattattagttctctgaggttgcctttggtgctaacaccacctgagacacatgttgtgtttttgtggttttttttttgagatggagtctcgctctgtcgcccaggctggagtgcagtggcctgatctcggctcactgcragctccacctcccaggttcacgccattctcctgcctcagcctccccagcagctgggactacaggcgcacgccgccacgcccggctaattttttgtatttttggcagagacggggtttcactgagttagccaggatggtctcaatctcctgaccttgtgatccacccgcctcagcctcccaaagtgctggaattacaggcgtgaacacatgttgagttttgacatcatcctaaaggctgttataataatcgtcttaagtaaaaagctaccccagataaacaacatgaggacctgctgttgggccatcctccctgcacaaactcaggattcaaatcaagcccttcttgccttcctttcttattaagcatcgtttcccttgcctgtctggtttgccttcctaagagagaaggggtagaactgtgccctgtttggggatggaacatctattttcagataccaattaagcatcagtcaaacccttagtacgaggttcgagtggggacggggccggacctgggaagtggtgttttcatttggggttctctcctcttttccatccttcccattgcccttgcccctccctccagcctctagctggtaaaggtgatcagatagagagatcactgttatatcgaaatcccactccccaagctcagccacctgaggatcaaggcattttctcacccttggggacgcagggcttgctagctgctttcaaaatgtcaaaatctgttgagaagattttccctatttccaggtaaatgacagcaccccccagcttctctagagagctctaaattatgagaaaggtgggggacaggcttgcgggccgtttctttcccaatctttaggggatccaaggtcaccaggatgacaccaactggcctgctactgctggccttgstgaaaaccaaaagggtgtagccagccccagccagcctgggtctgaatgaaggcaaaccagtaaaatgctctgcctcttggagacaacctagcatgctcaccaggaagccttctaaatcagccttacggtaatgatgtcaggataaaaataacagtaacagtggcccagcgcggtggctcacacctgtaatcccgacactttgggaggccagtgagggtggatcacttgagatcaggagttcgagaccagcctggccaacatggtgaaaccctgtctctactaaaaatacaaaaattagctgggcttggtggcgtgtgcctgtagtcccagctactcaggaggctgaggmgggggaattgcttgaacctgggaggcggaggttgcattgagctgagatcgtgccactgcactccagcctgggcattggagtgagaccctatctcaaaaaaataaaaaaattttaaaaagtaacagtgataacaatatcacggtgcaggtgtgtagccattttaacccttggactcatgagcccacagcactgaggccaggaatccagcgccaagctggtgaccttggtcagacaactaatttttttttttttttttttttttgagacggagtctcgctctttcacccaggctggagtgcagtggcccgatctcggctcactgcaggctctgccccctggggttcacgccattctcctgcctcagcctcccgcgtagctgggactacaggcgcccgccacctcacccggctaattttttgtatttttagtagagatggggtttcaccatgttagccaggatggtctcgatctcctgacctcatgatccgcccgcctcggcctcccaaagtgctgggattacaggcgtgagccaccgcgccggccgacaactaattattaatagcatctgtgctgagcctccctttcctaataggggctaataggctcatcaagttgtggggaggatgaaatgagataatgtatgagataatgatgtcaaccataacaacaggacctaatatatttattgagcaatatcaggtactgtgctaagcactttargtccatggcttcattgaacccccagctcaacccaatgaaatactgtgattgtctccattttacagatgaggaaactgagaatcacagagggttttggtgctcaacgagggtcacataaccagtaagtgttggagatgggatttgaacccaggccatggagccctgagcccactctacagggcctggcacagaataaatgctcaacaaatgttggggtcgttactattgttcttatttggctaaataatatattgcgaatttgaggcagataagaagcactgtgcccattttacagatgaaacccttgtggccaacaggtgacccaaagcccaaagtgaccacccattgagtcatgacaaggctgcatctcctcccctttgtgaccacatcgtcatctttgtcactcattgaaatcaatgggacagatgtgatttatgcctcctgggggccgggctgtggaaacacacagagaaaagagcaggagggccttgrgtggaaagaggggaactttgagggcctggattccaagcccagctctattgcttgtttttcattaatttggggatagccacgtcacctctcacagcctctattttctgatctgaagaatgggttaccatgaggattcaatgagcccatggatgtgcagtggcctagcccaggtcaggcaccaaataggcatttactgaatgttactcaaaatgaaatgaaggccaggtgtagctcatgcctgtaatcccagcactttgggaggcagaggcaggtggaacactttaggtcgggaatttgagaccagcctggccaacatggtgaaacygtttctactaaaaatacaaaaaatattagccaggtgtggtggcacacacttgtaatcccagctacttgggaggctgaggcaggaggatcgcttgaacctgggagacagaggttgcagtgagccaagatggtgccactacactccagcctgggtgacagagtgagactccatctcaaragaaatgaaattgagtatgatcactgccctggagcagttcacagccgagccatcccctcttctcatttratatgcacctcaacttctgaaaacttctactttcaagacaaactacagatggaaatacacacagtagtcatcatattgtgatatttggggtttcatagactcatgcacagatgttacccacagagctgccttggctggctttggcagagtccatcggctcccttgaggctgacatctcagggtgcttcttgattactcctttccctaagtctctctcgaagcatttgagaaacctcttgcattttgagattaatttccctctgtaggaggatgccccaaatccctagttctaagctgcagtccaactcatttttgcccctacttcaattaggtcaggtatcccttgccttggtctagatacccaagttggattttcccaaaggcatcttcagtgccccacttcttagggtgatccaacattcccagggtgccctcaaaccagcagaccccccaccaagatgctttctagggatgtatactgaacacagtctctctccatcccagaggcatcttccttccttccacctgagccatcgcctgctcagtgactcccaggtctttataggtcactgagccaagaggccagcaaccaaacttgctgtcctgggtggtcagagccagggtggagccaggaagtggtgsgtgaattgactagtgtttgggttcagccctgctggaatttccacatattttgctaactgtttgttttaagagtgagtatattcaatgcaggctgtcccaactgttgtccaggtctgacaatgacactgtggttcacaatcagtgacaccactctgcacgctccttcactgcgtcaccccatattgaaatgcttttcccaaaaagggcaagttgggtcaaagtcatttttcttcctctctgtaaattggtatcagttgccaaaaccaacctcccaccaaacagaggctcttacaggtcaacagccccagcctatttccatttcctgaggttcccaggattttctaagatacaagggccaaaacataaacatgaaacttgttgtgcattttcaatatttgcatttagcaagttaaggctttcaacaaacaaacacagtaygatgcrgtatcatagggcaggccacgagataattacaggattgatgttaagattaattcctagtgtatatrtacattctggtctggtaatgggaccaagctgaaagttgtccagtaacatcyggctatactatgatatcactgcaatttggagaaagcttaaaaagttcagccttgatgcccctcggtcctccagaggtctccactatcaccctgaatccttaactgggtgagtctgactcccaagcacccccwtttttaatcaccttctacagactgttgaattacagaagagagagagagagagagrggcagagtaagcaatgtcaactttctttttttyttttttttttttttggagacaaagtctcagtcgcccaggctggagtgcggtggcgcgatctcggctcactgcaagctccrcctcccgggttcaagccattctcctgcctcagcctcccgagtagctgggactacaggcgcccgccaccacgcccggctartttttttgtatttttagtggaggtggggtttcaccgtgttagccaggatggtcttgatctcctgacctcgtgatccgcccacctcggcctcccaaagtgctgggattacaggcgtgagccaccgcgcccggccagcaatgtcaagtttctatggagttatcttaaggaacgaatcactttagacatagtgctttgaatacactaaaggaaattatattccaaagtactaaatacacttggttaagttctatacatagcaattttttaattgtacggataagtgggtaccttctggttttgtgagtctgtgggcctggaccctgagctgtcccagcttgtaaccaggttatgcttgctgcccgggagaggtggtacccacaggtgggtgcratgccgcccagggctgcagcaaagggcacagtgtgtggcgtctggcccatggtgtgaatggccctctgcccagctcagccccagtgtgctgccctcatttcaggacaagccaaacagggcaggttgctgcaggcctctaatagaggagctgtcactggtgccgatagcataagaataagaagcgacttgctttgtacaagtttaggccttagctcttagagtagtttactagggctgctgtaataaaacaccaccaactggtggcttaaacagcagaatggattgcctcacagttctggaggccagaaatacaaaatcaaggtgttggcggtgctggttccttccgagggctgggagggagaagctgacccagtcctccctccttggcttgtaggtggccgtcttcatgttcacatggcgctctccctgtgagcacatctgccttcaaatttctcttttctctaaggacaccagccctactggatcaggacccatgctgatgacctcgtttttaacttgatttcctctgtaaaggccctaactccaaagaaagccacattctgaggcagtttaggacatcaacatatgaatttgatggggatggggagggaggacatggttcagcccataatacaggggtccccaaaccccaggccacagaccagtactggcctgttaggagctgggctgcacagcaggaggtgagcggcaggcgagcaagtgaagcttcatctgtatttacagctgcccccatcgctcgcattaccgcctgggctctgccccctgtcagatcagtggtggccttagattctcataggagctcgtaccctactgtgaactgcacctgcaagggatctaggctgcctgcrcttatgagaatctaatgcctgatgatctgtcactgtctcccatctcccccagatgggaccatctagttgcagaaaacaagctcagtgctcccactgattgtacattctggtgagttgtgtaatgatttcattgtgtattataatataataataatagaaatagtgcacacgatcaatgtaatgcccttgaatcatcctgaacatgcccccgaccaccagtccatggaaaaattgtcttccacaaaaccgatccctggtgccaaaaaggttgaggactgctgccataatagctcctaagatgttgtatgtcttggaggcgcctgcctgcctcccctggtgtagttgtcagtcctggtttcactgtgaggctcgtgacagtgacagccactactagggaagggcaggtgcttggcctctgtgtcttggtgttctgagttctggtgctgagtttctgtcttcttgcctaaaaaatctccctctgtccactgcccagcacacctgcttcttacttcctagtgtctgctaaaaagcccaccatccagctgggtgcagtggctcatgcctataatcccagcactttgggaggccaaggcaggcggatacctgaggtcgggagttcgagatcagcccaaccaacatgaagaaaccccatctccactaaaactacaaaaattagccaggcatggtggcacatgcctgtaatcccagctactcaggaggctgaggcaggagaatcatttgaacccatgaggcagaggttgcagtgagctgagatcgcaccattgcactccagcctgggcaacaagagcaaaactctatctcaaaaaaaagcccaccatccttccacttacccaatccatgtttactttatcctttgccccgatcctctcctacycagagactctcagttccacttccagagcccccaaccttcagttccctgcttccagtcctgctgcccctgcagctgcattccaaccccatggctactcctggcctcattgcaccatcctcctcatgggtctctctgccttgaccctctccctcctgcaatccttgcaatcatgtctttcctaaaatccagctgagataagatcactcactctatgaaatcaaggccaacatccttggcttagcatttaaggaactctacagtgttgaaactttttagaccttgtgttagtttgctcaggttttaatcacaaaggaccattgcctgggtggcttagacaacagaaatttacagctcacagttctgggggttggaagtccaagatcatggtgccagcatggtcaggttctggagagggctttcttgtcagcttgcagacatctgccttctctgtgtcctcacatggcagacaaagagaaagagctctctcttccttttcatataaggccaccaatcctatcagattagggccccacccttatgatcttgtttaaccttcattatctcctaaaagttctatctcccaacaaaatcacatgggggtgggggatggaggttagggctttgtattagtcagggttctctagagggacagaattaatagaatagatgtatatataaaggggagtttattaaggagtattaactcacacgaacacaaggtgaggtcccacaataggccatctacaagctgaggagcaaggargccagcccgagtcccaaagctaaagaacttggagtccaatgttcaagcgcaggaagcatccagcacgggagaaagatgtaggctcagaggctaagccagtctggtctttttatgttcttctggtgcttttattcttctggctgcactggcagctaattagattgtgcccacccacattgagggtgggtctgcctttcccagtccactgactcagatgttagtgtcctttggcaacaccctcacggacacactcagggacagtactttgcattcttcaatccaatgaagttgacactcagtattaactatcacaggcttcaaataaatttggaggaaggacagaatgcagtctcatgcagatctcatatgtttattgaacatatactgtgtgctgggcactgtttcagggatagaacaaactgaacagtgggtaggcagaaaacaagtattatctaaatgcctatataggtaaatgtaaatctatatctacaagatatagaaatgtaggtgtgcacatacatgtccaggtacatatatgctcatgatgaccacaggtagtgttaagtgctatggggaaaacaaagcatggtaagggtgattgggggcagagaatgacaaggaagtgacactgctttaaagaatgatcacagccrgcacagtggctcacatgtgtaatcctagcactttgggaggctgaggtgggcagatcacctgaggtcaggagttcgagaccagcctggccaacatggtgaaacctcgtctctactaaaaaaaaaaaaaatagaaaaattagccaggcatggtggtgcatgcctgtaatcccagctactcaggaggctgaggcaggagaatcacttaacccagaagatgatggaggttgcagtgagccaagatcacaccactgcacttcagcctgggcgacagagtragactctgtctcaaaaaaaaaaaaaaaaaaaaagaatgatcaggaaagatctctaacatgacggcatttgagcaaacgcagtgatcggggtcagccactggaattcaaccctttacatcaggcatccacaaaccttttatctaaaggacaagataaatatttttggctttgtgggccacatggccttggactctatcaaaatactagccagctctgacattgtcatgtcaaagctgccacatgctatatggactcaaatgagccccaatgaaattttatttatggatactaacatttgaacatcatataacttttgtgtgtcacaaaatattctccttttgatttttgcattcaataacccaaaaatggaaaaaatccttcttagctcagaagctgtacaaaaacagacagtgggccacgccgtctgcagatctctgctttagaagaagcagctgtaagatgcttttcccagttgtgggatgagagtcattcagtggctgctgagtcctagaatactagtccccaaaatatagtaggtgctcaatatgcacttgttgaaggggagaaagaagggagaaaaggagaggggaaaaggaatcagagcttcagcagtccttggaagtggcattctcagctctggagcccaggctgacrtgaccgcacctccctgcctccttttgagcctggctgcaggaccatttcctttcattccttcagggcctctgcaagcttcctaggcaaagaggtgttgacaaggctatgaaratgcccatgagatcatggcctcctttgcacacttaggggcgggtgtcccaggggtccacaaagagcgagccaatgtctcctcccacctaaaagcttcccttgtccccaccacagacataaagccagaaaagggagtatgtagccacagcccaaagcccacttgtgccctgtgcccaacataataactcacaagtgctgctaatctgcattttgaccaggagaactttggtgcccactcagaatagtcatttgcatcctgcatgcagggcccctgactgctatattaatctccccgtttctcccctcctgagtcatctaatattgctgctggctaattaaaacatcaaagygccaagtacaacagccctgccagaagcctcctaatgcctggtttcaagtgtgcaatccagtgaaacccagggcggagggtggcacggctcgcactcgggcagccaattacttgactcgtaacgaccacccctcgcacatctgggacctcaacagatggcctcttttattagtcctgttatctcgctcctccccctccctggtgatgaaaactgtcggctgccgcccacaggccacacyctgctcctcctcctcacgcctggccccccaccctctgagtcctgggcccagacccgatgtcatcaccacatctgtcatccccgccctgggatttcagctgctcctcagcctctacagtgttcacatgggtggccgagagggtttctaaactggctgagtgaaactgggtatgtagggagaatggctggggtgccttcctgtgggcaaggtaggattatttgttttttttctcaatgatacaggttgtgggcacaatcagagggatgtgtttgctacaaagccctgcccagatgtgactttcatcacctccaagactcctcctggaagacacaggaggggagacaggatcttaaagaagtgtttagggtgcctggccagacgtttgaacaaagtggggttgtttgtatccaacttcctagggaaacatgggcacaataacttagacaggctagaaagtataaatgaggaacaaaggaaagaactcgcccaaacctttatcatgctcccagtgtggtagtgtagtagtaatacttgcagaagtaataatagtaatacaagtaataatataagtaataataatacaagtaataatagtaatacaagtaataatacaagtagtaataataatacaagtaataatatacaagtaatacaagtaataatacttgcagaagtattgcagtactacaagaaatacttctaatactgtaaattgggctagtagtcacataataataacatttataataataaataatggctaacatttaggggtgactatgatcatccaagtaagagatgacttagtcagggtgctggccagtggaaggggagaggagtgaatggattctagagctagttaaaaagctaaaatgggggagagtcagtgatgagttgggtgtgggagatagagaagaggctgatgattaagatagctcccacccgtggcttgtcctgcacagatggttggtagcgcccggcactgaggaggaccagatctggcgagggccaggagccgtggaagattatgaatcctagcaccttccgtgtgttccctgtgctgccacagcctgcactcttccggagcagtctttaacagtggcacgctcttccccacctcctgttccccaggctccaacatggcgccatgaatgctttaacacagaactcagaactcttattccgctggctgcaaaggtggccatgatagttctcttaactcaggacctctgcatgatctgttctctctgcctgtaagaccttgcttcctcttccttgcctggctagcacgtactcatcttctggtcttgacctagaagttagatgtgtcttctatgtgctcccacctcccctgtgctgccaaggtcccatgtaatggcatccattgtgctaaatcgattgcaatggctcattcagttttcgtcaccccctacaggactgtgactccatgggagcagagatcacatccatctagcttgtcactatagtcttggtctctgctgcctcacctggcacataggaactactcaataaacatgtgttaaattaatgaattattcctgatggccaggaggcaggatagtcaagctgttaagggcatggtttgggagccagactgcctggattggactcctttcttcagcttattagctctacaatcttgggcaacttaacctctctgtgcctcagtttcctaatctgtaaaatggagataataaggttgttgcttggcacataatcagtgctcatttaatgttagtyttcagtattagtccttcgcagttctctgtgacttctatcctggactttgatccagctcatttgatcataattcacagctaccgtcaccagcctgagctcctccaagccagtgagatgagtgccctgcctcctttctgattttatctccttacacttgccctcatgcatacactccagccacactcaacctccttgctggtcctttgaacttaacaagttcattcccatgtcagtgcctttgcacttgcccttctcccctccacttagttacagtcacctccccattttctattcttatcatcacctggaattatactgaccctatattagtttacttactgtttatctccacctctaccacataacactccagagggcaaggtacctgtctgtattcttcactgctgaatccccagtgcctatttattgagcatgtattataataggtgctcaataaatgctaattgaatgtatgaatgccctgcctcaaggtcactgtgcactgatgtactctttgcatgagtgtcacttaacattggctcatcttctccctgatcttgcttggctttcgcatcagggtgcacctgctgcccctcccttagagttactaagtgaccaatgcttgcctgatgcatgtgtgtgcctgtacccaggcaggtagacaataacccaggagcatccaagacagatgtgatcctaggccaggcacgatgactcacacctgtaatcccaacactttgggaggctgaggcaggaggattacttgagtctaggagttcaagaccaacctgggcaacatagtgagacccccatctctacaaaatatataagaaattagctgggcatggtgacacgcacctgtagtcccagctacttgggagggtgaggtggaaggattgcttgagcctaggaggtcaaggctacagtgagctatgattggaccactgcactccagcctatgtgacagagcaagaccctatctcaaaaaaaaaaaaaaaaaaaaaagacagatgtaatccttatcagtgaggtctacaatgaatgggccaacaytggtcagcctgaratttatcccccctcacctactggccaaatcatttgcagagtgaagacaaatgggggactaaaggtccccataaagaggctcttccatggtttctttccatgtaggtgttcaagacagaggggacggtaagtgcaaaggccctgaggcaggaacaagcctggaagttttaaaaatcagaaaccagaaatttggggacaatattctttgcttcacattttttcaatttattttattttatttcattattatttttctgagatggaggctccttctgtctcccaggctggagtgcagtggtgcaatcttggctcactgcagcctctgcctctcgggttcaagtgattctcctgcctcagcctcccaagtagctgagattacaggtgtgcactaccacacctggctaatttttgtattttttaatagagacaaggtttcaccaagttggccaggctgatctcgaacttctgatctcaagtgatccgcccacctcgggctcccagagtgctgggattacaggtgtgagccactgtgcctggcccaaaatttttcaatttaaatctttctgttttctcagtactcgccagaaatggtgagtttggactgtcacagaaaggcctagaaatccaagtaaatcgacccagctttaggtttgattcctcggtgctgggggctattatcattcaaagaggctgatggtgtcctttcagtcatgtattcattcaacaaatattcaccgagtccttcctcagtgtgtccraccctgttgaaccagagagaccacctttgagttcctgacccctctccccagagcagaatcctagaggctcttccatggtgtttctttccatgtaagtggggaaatcaggttcccaggaaccttgtacatgtcaagcaggaagggctggatcttactctggatgtagacagttggtcactcaaggcagatcccaggaagaacaatggctctcccagcctctgtggagacaatgttacagtccactcaaggccctgcctcatcttccaccttcattctctcctgcagccccccacctcaggaaaacagtcccccacaaagaatggcagcccctccaagtgtccacgcttcctcaaggtcaagaactgggagactgaggtggttctcactgacaccctccaccttaagagcacattggtaagtatcccagcagggtgtagatgagagggtgrcagcttcatcactatccacatttggagtcggataagtctttgttgtgggggctgtcctctgttgtagggtgttgagcaccacccctgacccataccccctagatgtcagtacgcccccttccaggttgtgacaaccaaaaatgtctctgacagagcaggagcactgccgtcttrggcaaacactgccattttaagttccagctccctttctaacttcatgtatttcaaggaaatcacctcccttctaacaacaagcagccagaaaaagcagatagtaaaacacagataagacagctcgggcacacagggagsggggaaagtctcttgggtaaccaccaaacttcaaactcatacaatgggctccagtaaaacagtgggccttaataagcatatwcctttccctttagatgcacaaagatagggaagctaaaagcagacttgcggggtatgcctgcagctgcaagaaaatatatgggaacagacacaaaaactctccctcccagataagcaagacaaagagacacagaaacattccaagcttgtgataagctctaccaccctaaacccttaaatactcttagtctgtaaaaaagagtgctcctcattaggacaaacacctaatgcatgcggggcttaaaacctagatgatgggttgataggtgcccaccatggcacatgtatacatatgtaacaaacctgcacgttctgcacgtgtatcccgaacttaaagaaaaacaataaagagtgctcctaacctaacttggccagaagcccctctcaggtttattctttaaaataaacctgtctctgactgttaagccacttttcatgtttctttcttccttcttcaactcttacagtctccaagacattacctaacattccctgggcaagaaattcacccctgtttgagaaccactggtggattctcactctcttatgtaaatgctttttatttgtgaacccagtacacaaaagaatctaagggaagttgctgcttgcgaatatcatctctgtctctcacagtctgaccactggtggagtattaaacaaacccttccttgatttcacagtgtgtcctcagtatttttatttcatatttttaatagtcaacaaaccattatattgctttaaatttttgttgaacctgggcctcttggaagaatggtatctgcaagctattacaatgtaacaaattgccctgaaacttagtggctgaaaacaactattaaaactatgtattatttttcaaaagtctacggattggctgggtagatcagtgattgatctggtccagactctgttgattttggtgaggctttctcwtgcatctgtagttacatctgaggggtcagctaaggtcagggtggtctaggatggtcctggctgagataactcaaccctgttccatgtggtctctcctcttccagcaagctagcttgggcttgttcacatgtagttgcagggttctaagagaatgagcagaaacatgcaagaactcttgaggcttagactcagagttgtcacagggtcatttctgccacatcctaarggtcaaaaccagcccagagtcaaggggttaarggataggttccacttcttcatggagaattgttgtaaagccacatctcaaagggtgtgaatacagggaggggaaaaattagggtcctgttttgcaatcagtctatcatagatgcattcaaatgagttactgtagccactctattagttcctccttgatcatcatgcaaaatctaaaaatatttcagattttagtaccaatgattctgattcctagtcaaaaagcttctgttcccaagatgagtagagcaaatactttaggaaccttaaaatgctacttattgttccttaacatgactatgatcatatccaccaaggatttgaagctggtacttgagaaactgcctctgggaattaarggccagataaactcaaccatgagtacgagatccaagcccacagcytaacacctgccactcttgggtaaaaccaagcaataccccaaatctcttgatcttccaggaaacgggatgcactgagtacatctgcatgggctccatcatgcatccttctcagcatgcaaggaggcytgaagacgtccgcacaaaaggacagctcttccctctcgccaaagagtttattgatcaatactattcatcaattaaaaggcaagtgtgtgtcaattccggggagcccgaggtaagttatcgaatgctggagagaaagatgtcagccccaactttgcaaaccaaggccaaggcacaaggcctctgccatacacagaggcttaagactggctacccataggtcacatctgttccccagaagtgcttttgtttcacytgcaaagggttgcttataatttgaaagatttcaagcaattccatgcytagatacataccctaaagaaattctcacacctgttcacaaggaaccatcagtaagaatgttcactgaaacattgtttatagcaggaaaaaattaaattaaagaactaacaagagaccaggtgcagtggctcacgcctgtaatcccagcactttgggagactgaggcgggcagattgcttgagcccaagaattcaagaccagcctggccaaaatggtgaaatcttacctctactaaaaatacaaaaattagtagggcatggtggtgcacacctataatcctagctacttgggatgctgaggcatgagaattgcttgaacccgggaggtggaggttgtagtgagccaagatcacaccactgcactccagcctgggcgaacagagcgagactccatctcaaaaaaaaacaaaagaaagaaaccacataaacaccatcaacaggagaatgggtaagttatggtatattccagtgatggaatactataacaactgtaaaaatcaaagggattagcgctctgcatgttaatggaattkaagttcatgttcatagctaactttgagcaaaagaaaggataaattgtaaaaggatacatccagtatagcaccatttatatgaatttttttatggatttatttttttgagacagagtcttgctctgtcacccaggctggagtgcagtggcatgatcttggctcactgcaccctctgcctcccagactcaagcgattctctgcctcagcctcctgagtagctgggattacgggcacgcaccaccacacccagctaatttttgtattttttgtagagacagagttttgccatgttggccaggctgrtctcaaattcctagcctcaagtgatccaccctcctcggcctcccaaagtgctgggactacaggtgtgagccaccatacccggcctgtatgcctatatgaatgctttaaacatgcaaaatgatattgtacatgattgaaggatagatatacatgtggcaaagatatgaacaagtgtatgagaatggtaaatgccaggttcaagatagcagtcacttctggggacagaatgggctacagtggggaagtattccccaagaaactattatagtattttttaggcttgggacatgggagtttattatattatcctgtataccattttgtaaaccaaaaatttttctaactttctaaaattgaattcattgccaacatttaaaaattataagagttccctttaaaactcagatttccagttyctctggaaagatttagcagtcctgggtccccactcctgtcaggtgacaactgacaggagtggagccgtggctgcccgctttggacaaggcctggctcacttgtttgccacagtccccacccagctggttgacttatatctacaatgttcagcctttgtggccatttgagtttacagtgtcwgctttatcttgcatccagaaatcaaactgttgcatccagaaatcaacttggaattttttgtagcttccagcctcttggaatagctctccccttccactaacttctaattcagaagagggggtgatgttcccrtgtcccttcctcttcactcagatttggctccaaagcccacatggaaaggctggaagaggtgaacaaagagatcgacaccactagcacttaccagctcaaggacacagagctcatctatggggccaagcacgcctggcggaatgcctcgcgctgtgtgggcaggatccagtggtccaagctgcaggtaggtggtgaagtcagataccttgaagagcccttaaatgagggaagaggggaaggggagtggatggagctttaaaaaggataagcttctaccaagggtacctggtagccatggtgacctatcagatgatggtcacggggtcccacattccaagatcacagccagctctagatgataatcatgtcttatttagccaacacagtgcttttgcaaaaatgaacttgcatatctcttggaagggagggcttatacttttcagttgaccgcagacctcaccactcccttttgtcttgcayctacttagcctatttatctgcctactccctgaaggcattagtttctgtgtcccttggttacgattttattttaggaaatagtttaaagttggaagtagatttgttatcaagatcaggggggttttgtttgatttttgttctgttttttaatccctaatccctagtaacctaacagaaaatgtaaccagcccatctaaaccccctccttcatttgccattcctttcccacattcactttcatgccgtgcctacttttaggsgattttttttttttttctggtcaaattggccttggttattaggatagaaaagagaaaatataaaatgcagcctgggactcagtaatgaggtgcccacttcaccaatgtagcagcagctggagtgggatctgggttctcctaaaatgggaagattgcgctgggggagctggggagggaaagaagaggcaatcagttccgccctgtgcctcttccaggtattcgatgcccgtgactgcaccacggcccacgggatgttcaactacatctgtaaccatgtcaagtatgccaccaacaaagggaacctcaggtgagctgaccagctgggcactggggagcaggaggtcaaaagtccccacagcattgtactttgactctggagtcagctcacctgccagggaaatgcacctcatctcagggacacgggccaagctgggagaggtgtcctggcatcttttttttttattttttattttattttatttatttatttttttttttttgagacagagtcttgctctgtcgcccaggctggagtacagtggcatgatctcsgctcactgcaacctctgcctcccaggttcaagcgattctcctgcctcagcctaccgagtagctgggacccaagcacccgccaccacacccagctaattttttttatttttagtagaaacgggctttcatgatgttgaccatgctggtctcaaactcctgacctcaagtgctccacccgcctcggcctcccaaaatgctgggattacaggcatgagccaccacgcccagccccggcatctttattccatacaccatcccattttccttcttttctgggacaagtggattcctgtgtggtttgcaaaactacagcagcaaacatcacgttcaacccacagttcagtatctttcctggagaggacaggaacaaatagttgagattcccaggwatcagaaaatcctattgctggtggtgacctgcttttactgtgtcttgctctgtcgcctggagacaaaccaaamcaaatctcccttggtttaaaaggcagtttctcttgctgatacaatgggaactgctccttcaggttccacccagccaagccatgccttggactcgtcttcaccaatacaaagaacaaagccacagggagcaggccgaggcaggcagacatccatgtggctggtggcggccacgctggcaagtctcagctgggagagggacaggtggaaatgaacagctggggccccacagacagccggctacacttgttgactctgcccgctcactgctgccacggcatctgttcccagccactgagcactagccccatcttggagccacacaggatcactgcagagatattcccacaagcgcccgggcttcactgagttcatccaaaagtggcttctttgcatgaaacatgggttttcttagatgtgtctcttctcttccgtaagaaggaaatggtgtttgccaattttctgagtccaccagtaagaaaacggcctgtaatctaagcctgggcctgcatgaggaattggtatttaggtgtctttcccaagacaactcttttccaagagacctcaccccttaaagaatattaaagaaccctcttgtgtatccggacctggtcgagattaggccctcaaagagtttatgggctcttctggtggatttcctttttttttttttttttttttttttgagacagagtcttgctctgttacccaggttgaagtacagtggcacaatcttggctcactgcaacctccacctcccaggttcaaacaattttcctgcctcagcctcccgagtatctgggattacaggtacacaccaccatgcccagctaatttttgtatttttagtagagacagggtttcaccatgttggccaggctagtttcaaactcctgacctcagctatctacctgcctcggcctcccaaagtgctgggatcacaggtgtgagccaccacgcctagtctcttctggtagttttcaaatggggctctgagcaggctctgagtatgggtcaccccagtcccagcagtgcacctccacttttttcactgctgtattaaggggtctttgtgagatcttctattaaagaaaacattcagcagattctttttctttctatagtttttaaccctcatgtctgaaagcgatgagaactgtataagaatgtataccatgcagctgggcgctgtggctcacgcccgaaatcccagcaaggtgggaggccaaggtgaatggatcacttgagctcaagagtttgagaccagcctgggcaatatggtgaaaccccatctctacagaaaatgcaaaaaattagtaggacgtgctggagtgtgcctgtagtcccagctacttgggaggctgaggtgggaggattgcttgaacgcaggaggtggaggttgcagtgagccgaggttgcaccactgcactccacactccagcctgagtgacagagtgagactgtctcaaaaaaaaaaaaaaaatatatatatatatatataatgttataggaataatctgtgcatagaggggaaggacagcagagagaagaagagagggagagatgcaggtttacactgtgctgagggaagcaggagagtacaggtatagatgtgtgttctggttcctctgttggtctcagtttctgcacatagagtaggcatcacaccccactcactgtgtgtgattctagtgtttctaaacacacttttaaaatatacacattacacaaacaccctttatcggatgttcaaccagagaaacagcaatgtgttttagtgctggagggaaaactgtttgactcactccgtgttcatctccaagatggcgcctctgttaagagatctttaagagcatctttgcctctatgtgattttggcctccagcctggattctagactcaccctcagctgtgatgcatcaccccagcagrattacatgctacgttgtcttgtgtagagagyaagacctaaaaaccgtgctcagaaagaaggctctatgaaactagatgagacaggggttgctgtatggaggaagcagatttgaatcaggtcttgaacttggacataaaatggaagagggggattccagccaaggggatcagcagggacacagttctggacagaaatgtatatgtgagaagagatctataagcaagkagttggacccgagatgccatctttttgttgacacaagaagccaggaccatgtttgcatagcctgggatggggggccagcgaatccagctggcaagagctcctgctgtgagatgacattgaactacatcgtgaaaaagttattttcctttccttttttttttttccaatcctgatgatgatgttgaggagaaaggctcagtttggtgctaagatattgttaacacctaatacttgctgatctcccttttaacatagagaccagggctccagctaggaccttcagcagacaacatctttccacaattaataaaagaatacagccttcactgttgcctatttaggcaggcaaagccaatggctggtgacctgcaattttcttttaaataaataaatgtgaatacaaatgcaagctgattgccttttaatgataagtctataaactttggtttggtaaggagggtgggcaaagtggataaaattaatgatggctggaagaagactggaatcgggattctgtagtgcattctttttttttttttttttctttttttgagatgggagtcttgctctgttgccaggctggagtgcagtggtgtgatcccggctcactgcaacctctacctcccgagttcaagcgattctcctcagcctcccgagtagctgggactacaggcaccccccaccacagccagctaatttttgtatttttagtagagacagggtttcaccatgtgtgccaggatggtctccatctcttgtcctcgtgatccgcctgccttggcctcccaaagtgctgggattataggcatgagccaccatgcctggcctgtagtgcattcctttttttttttttttttttttgagatggagtctcgctctgtcgcccaggctggagtgcagtggtgtgatcttggcttactgaaacctctgcctcccaggttcaagcgattcttctgcctcagcctcccaagtagctgggattacaggcgtgcgccaccacacccagctgactttttgtatttttgtagagacggggtttcactgtgttggccaggctggtctcaaacacctgacttcctgatccacccgcctcggcctcccaaagtgctgggattataggcatgagccacckcgcccggcgtctagtgcattcttaaagggaaacaaggtctgatgtttccgtggaaatgactggctgcaaaagaactctttggaagactggctcaagtcaatattatttaaaagtctccagctagaaagagattctttccttcagcatggtggcatgggagctcccaccccctccaccgttttcctcacaccatagttctggtggaggaacagagcayggcccatcccttccraccgctgctccattggccctggggaccttggcacggaggtaatctaccctgagcctcaagcagctgtcgccctgggtggcgccatgtttagtatgttcccacagcgcaagtcccgccctgatgccgggtgttcccstctctccaccacaggtctgccatcaccatattcccccagaggacagacggcaagcacgacttccgagtctggaactcccagctcatccgctacgctggctacaagcagcctgacggctccaccctgggggacccagccaatgtgcagttcacagaggtgcgagcgtttccgccccctaccctgccccaacatgggctcttatgtccccagacttttacccacagactttttcgggcttaatgctatcatcacaggagatccgctgatggggtcatttactcttctccaaacctgcttctccatcaggctgttccccaatctaattcttttacagctggacatttggtcactttcatrccattacctcactcagccctcctgatgggaactgttctcccatttcacagatgggtagaccgagtctcaccaaggccaagtgagttactcaagactgccaaatgagtagagaagaaaagctagaactacagtccaaatctcctgcctctcaccaggaagggaagagccgagaaatggaagccatatctggcatccaccttttctgagttacgagataatgtcagtttcatttcattccttcatttgttgatacaacaatttgagccacccaagcctttgagtaggcttgactttgtctgtcaccagcatcactacagttactggtagcccaagtcaattcataaaagccaccaggaaagtgactaccaccatctccctgcccagagttccttccaggtggtagtgcgggcaggtagcacaggtaagatatggtagcttatacggaccatgcccacatgacagcacaagcacatcccgtgtctagaatgatctcaggcacacaggcctgctaccacctttcctttatcacccaaataataccccgctgaatttcaccgtcgtcctttgctcaagcccctcccgggtggtacctccttgaagatgtagctggcaaggctaagggctgctccactccctcctggctgccgacttcatttgcatgtggcttttcttatgaaaatgttattctcatgaggaggggactgtaaccagggcaaccaggagctgcacctgtgctgttttagaagcagccaggctcagactccctgctccacttggctgagcactaactgtgtgtacttggctgaccttgtcctcgtggtcaccagaacataaatgccccaacctcttcctctcgctccatctctggaaaccttgctgagcgggacatgttctcctgttccatgatttggtgtttcctctttttactaagcacaaagaatcattccaaacctaaccatgcaattttaccttttgaaaccctctaaccctgccctgtctaatagggacacatgtggctattgatcacttgaaatgtggccagtcccagttgagatgtgccataagagaaaatatacactggatctcgaagtctgggtccaaaaaagagagggaaataactcattgatcttggtttgttttttttggktttttttttgttttttgagatggagtctcactctgttgccaggctggagtgcagtggtgcaatctcagctcactgcaactctgagttcaagcaattcccctgcctctgcctcctgagtagctgggactacagatgcgcaccaccacgcccggctaattttttgtattttagtagagatagggtttcaccatgttggccaggatgctctcratatcctgacctcatgatccgcccacctctgcctcccaaagtgctgggattacaggcgtgagccaccgcgcccggcccattgatcatttttaatgttgaaatagtaataatatggatacattagggtaatatatttattaacaaattaatagattcactggattaataagtatatttttatttttaatgttaaatatattatttaaatacactcatattgataatttattattaataaattaatgttgatatttaatgtattatttgatatattagatgaataagtgttacatatttaattttaatgtcaaatatataattagaatatatgatagtaatatttaatatactattaataaattaatattaatatcaaggacattrttgaactttaagatgagtatattattaatattattttctcccatgatttgaagaagcctagcaaaaaaaagataaaatcaaaattattttcaccagttgttttttttttctaatgtggctactagaaagttttaattacttaggtggcttgcattatatttttattggacagctgctctaacaaatgcattttatactgtaattctaatacatctgccttcatcaaattcagcagattttctttgtatcttacaataccttatattattacaaacacagagctggcagcctgcagatgcacttgttagtcaggttcagcccttgccctctgggaattccagtgggcagggaagacctggaaaacaaagctcagtactagaggaagggtttgccctctgtcctgtgggcccatgagaactcatgctagttactaggttagtgcaaaaataattgtggtttttgctattgaaagtaatggcaaaacccgcaattacttttgcaccaacctaatacatggtgatgtcagggagaactctataaagcaggtgatgtggtccaagagcctccagaggaaatgtctcctgggggcttgcatttggatctctatccaccccacccccgcttcccacataagggttgtgtttgtagggtgtggggtacagtggcattacctggccgggtctgcttgcagatatgcatacagcagggctggaaaccgcctagaggccgcttcgatgtcctgccgctcctgcttcaggccaacggcaatgaccctgagctcttccagattcctccagagctggtgttggaagttcccatcaggcaccccaagtaagagggactggcaaggggtgggagagggtgagtggtttgcccagtgcccctctttgcccagccccatcccccctggctttctttctagtccagaccgaagctgaaaggggaaaggggggcttggttcctgtcctcactgygggcttgggcagagtgagttccctcaaggagcaaaaagacctctttgaccagcctggggaccaccaccttttctgaatcatctcactcctaagccattaacaaggacctgcccttcttccagccctaagcattgaaagagcagaagcaccatactttcttgttgcgagcacactttttattttcctgttcctttttctttttctttttctttcttttttttgagacagggtctgctgctgttgcccaggctggagtgcagtggcacaaacatgactcattgcagcctcgacctgctgggctcaagtgatcctcccacctcaacccctgcaagtagctgggattatagggttacagccacacaccaccatgcttggccaatttttgtatttttagtagagacggggttttgccatattgtccaggctggtcttggactcctgggctcaagtgatcctcccacctcagcctcccaaagtgctggcattacaggcatgagccactgtacctgacccacattttcaattgagagaactgtttaaaactctataggatctgatgatcaagatagagttgtaaacagttctctcaattgaaatgcaaatcaaaacyacaatgagatagcatctcacctcagttacaatggcttatccgaaagacaggcaataacaaacgctggtgaagatgtagagaaaagggaacccttgtacactgttggtggcaatgtaaattagtacaaccactatggagaagagtttggagatcctcaaaaaactaaaaattgagctaccatatgatccagcaatcccactgctgggtatatacccaaaagaagggaaatcagtatatcgaagagatatctgtacccttttgtttgttgcagcactgtttacaatagctgcaacgctaaggaagcaacttaagtgtccatcaacagatgaatagataaagaaaatgtggcacagatacacaatgaagtactatacagcygcaaaaaagaatgagatccagtcatttgtaacaacatggatggaactggagatcattatgttaagtgaaataaggcagtcagagaaagacaaacatcacatgttcttagttatttgtaggatctaaaaatgaaaacaatagagctcatgggcataaagagtagaaggatggttaccagaggctgggaaggggtagtggagggggtgaggggaagatgggggcggttaagaggtagaagaaagaaatagaggcatggtggctcacgcctgtaattccagcactttgggaggccgaagcagaaggatcacctgaggtcaagagttcaaggccagcctggccaacatggcaaaaccctatctctactaaaaatacaaaaattccctgggcatggtggcacatgcctgtaatcccagctacttgggatgctgaggcaggagaatcacctgaacctgggaagcagaggttgcagtgagcccaagttgtgccagtgcactccagcctgggcaacagagcaagaccccatctcaaaaaaaaaatagttagaaagaatgaatacaacctattatttgatagcacaacagggtgactatagtcaataataacataattgtatgttttaaaataaacagtggaattggattctttgtaactcgaaggataactgcttgaggggatggataccccattctccatgatgtgcttatttcacattacaggcctgtatcaaaacatttcatgtaccccataagtacatgcacctactatgtacccacaaaaattaaagataataattaaaaaactctacagaacctggtgtggatcaagttcaaaaggaatttggagtcatgaagttgctgcaaggtctcaggccagcaacacaaacagcatttgccctttgagagtaaaggacatccaccgtgaggcactagactcaaacctgggaatgaataaaatcaaggggagttgctaacacactcgataataagataaatataagaatgcaatattttttaaatcaaaattaatgtttcattttatttttctaattgatgtctaataagtgcatatattcatgagatatataatgatgttttaatacatataatgtatagtgatcagatcagtataattaatacacccattgtctcaaacgcttatcctttgtattggaaacattcactatcctttcttctagctatttgaaaatgtatattaatgttaactatagtcatcctacagtggtgtagaacagtacaacttattcctttctagctataattttgtatcctttaacaaatcactccccattctcccttctccctcctcctcccagcctccagcatcctctgttccactttttacttccatgagatcaactttttttttagcttctacctatgagtgagaatattcagtgtttaactttcagttcctggttcatttcacttaacataacgtcctccagttctatctatgttgctgtgagtgacatggtttcattcttttttatggctgaatggtattccagtgtggggagagagagagagagagaattaatttggagttcatgactccaaatttcttttgaacttgatccacaccagacctggtagagtttttttttaattattacttttaatttttgtgggtagatagtaggtgtatatatatatgtrtgtatatatttatgcggtacataagacgttttgatatgggcatgcaatgtgaaataagcacatcatggagaatggggtatttatcccctcaaacatttatcctttgagttacaaacaattaaattacactctttaagttattttgaaatatacaattgtgttattattgactgtagtcagtatatataacatatcacacattttctttatatcacacagtatatataaaatatcacacatttctttatcmattcatccgttgttagacacctaggttgattccatatcttggctactgtgaatagtgcttcaataaacacagggttgtaggtatcactttgacatgttaatgtcctttctttttttttttttttttttttttgtgagacggagtgtcactccagcccaggctggagtgcagtagcgccatcttggctcactgcaacctccacctcccaggttcaagccattctcctgcctcagcctcccaagtagctgggattacaggcacgaaccaccacgcccagctaagtttttgtatttttagtagagacggggtttcaccatgttggtcaggctggtcttgaacccctgacctcaaatgatccacctgcctcggcctcctaaagtgctaggattacaggtgtgaaccactgcgcccagcctgatttcctttcctttggataaatgcccactggtgggattgctggatctcgtggtagttctatttgcagttttttgaggatctgccataccgttctgcatactcckgtactagcctatattcccaccaacagtgtatgagagttcccttttctctgcaaccttgccagcatttgttatkttttgtctctttataattgccgtcctaactgtgatgaaatgttatcttattgtgggtttcgtttgcatatccctgatgttgagtgaagctgagcatttcttcctgtatttgttggttatctatcttctttggagaaatgtctgttcagagcaagtgcccattttttaatccaattgtttgggttttttgcttttgaaatgtgtgagttccttgtatattctggatattaatcccttggtggatgaatagttttcagatattttcccccattctttaggttgtcttttcactctgttgcttgtttctttgctctgcagacgtttgttagtttaatataatcctgtgtgtttatttttgcttttgttgcctgggcttttgaggtcttattcataaaatcttttcccagaccaatttccctgatgttttcttctagtagttttatagtttctggtctcaaagttaatttttttaaaaaacagcacatgatgaacaatatatcaacattttcaataaagataggatccagctcaggactgagattagggtcagatgaacgaggtgtcatacaagtgtagggtggaatcctacattattgttcatcatatatatacataaattttgattttttaaatgtttctttaaaatattgtataaataaataatagcattgatcctaattattgggtttttattaggttgatgcaaaaagtaactgtggtttttgccattacttttaatggcaaaagtaaacttaagagggggaaactattcagttggtgcaaaagtaattgcaaaaccacagctacttttgcatcaacctaatagctccccccacttaaattttacacccaaggatagtgccacacctgcctcaccctagtcccagccttggagagggagccggtgtcctgaggctcctgacactgcctgatatctgggaactcacccagttccttggtgaaatgtagcctatatttattcattcatttattggctcatccaacacagttccccatgcatgccaggcattgtgctagcttttggagctgactcaatccctgcccccacggtgcttatgatctcaaggaagagaagttcttacacacataattactcaaataaccacttaattttaataaagtgctgcaaaggaaatgtatggtgcctaggatgaaatcccctgaccagctgggcctcagggaaggctttccagaataagcatgattttagctgacaattaaagtatgagtaagagctggaagcacagaaggaagggagaaggtcccaggaggaagcctgcatgacagagcgagactgcattcccctaccccccaaaaaaaagaaagaaagaagaagtttgggtgacagagtttggctctgaagtttggctgcctgtgcaaaggccctgagggtaggagggtgctcagtcggggaagggggagagaggtccccacactttctcctggactcactttcagggtgggtttgagagagaaacagcagcctaaggcagtagtttccaggcctgaatatccatccgaagcacctgagaaatacgttaaaaatgcacattctcaggcccccagctgcagaacctgcaattccacagatctgaagcagggcccaggaaccatattctgaccttgtcagtcccagtccatccttggcatttcagcatctctagattcaagctgtcccgcccatgagacacctgctccgggtgagctgggccctgttgctccctgcaggtttgagtggttcaaggacctggggctgaagtggtacggcctccccgccgtgtccaacatgctcctagagattggcggcctggagttcagcgcctgtcccttcagtggctggtacatgggcacagagattggtgtccgcgactactgtgacaactcccgctacaatatcctggaggtaagggccctctctggtcaccacaggggaaaagcacatagcagagggtgccagctcagcagtccccttccccacggcgagcttggtggcttggaaacttgaaggggttagaatagaattgcaatcccagagaagcccctggaaatgccaggggcatccatgtctttaacaacaatgaaaataacagcaaacacgcacrtagcacatagcacgtgctaacagcatccgaagcactgttgctgtgttccattctcatttcatcctcacctgaaccttgaggtatgagaatcccccttcgacagatgacaagctcaaggtcacacagctagccggcagcagggctgggaaatgtgtctggtttgacttcatgctccaagttcattaccactccactccgctgcctctcggtcttaaatcttgttagaagagcttgaggatgactgacaaactcgggacatatttagtgtcttttctaaaaaacaagggaggagggttggcagtggttccccactctaagcatttctcggcagagggtctgattccctcccgggctgagtcatccgtatctactaaaaagtgctggagcggtgcttcctgaagcccaactttggtgaaagcatcatgattgctgtgtttttgtcagcaaatgtctctaacaacactctgctgctgttggatttgtttcaaaagagggcactgagaaacagagaagttaagcactgggcctgtgtcacacaggagctaaggcacagaaccaagattagaacccagaaccgagcatcaggtttgtgctgttaaaaatccaccggttggctgggcgcggtggctcatgcctgtaatcccagcactttgggaggccgaggcaggctgatcacagcctggagttcgagaccagcctgaccaacttggtgaaaccccgtctctactaaaaatacaaaaattagccaggcatgatggcttgcgcctataatcccagctactcagaaggctgagccaggagaatcgctggaaccagggaggcagaggtcgcagtgagccgagattgcgccactgtactccagcctgggcaacagagcgagtctccatctcaaagaaaaaaaaaaaaaagccaccggtatcactgtggaaaacagatgccagggatcctcagctttgccacacatcggagggtatctggggggcttcgtgatgcctggatcccattcatcggggttctgatgtcataggtctggggtgggccctgggtatctgcattttgcaaagttccccaggagattcttctggacaaccactgatgcaatgcaaacttttttctttctttctttttggaggggtgggtaggggaatggagtctcgctctgtcacccaggcttgaatgcagtggtgcgatcttggctcactgcaacctccacctcctgggcttaagcaattctcctgtctcagcctcccaagtagctgggactacaggtacacaccaccacacctggctaatttttttaattattatttttagtagagatgaggtttcaccatgttggccaggctagtctcgaactcttgacctcagatgatccacccgccttggcctcccaaagtgctgggattacaggggtgagccaccacgcccagcctaaacaaccaccaatgtgtgcaaacttctagcaggaaggaaaaaatgtttcaggcagttttcttagatgtggctcaagttgcacttggggattttttttaagggtttcttttttccctgcaattaatttctattcttttaaccaaataatgctatagaataacaatagcattgttcttctatacatactttcctctgtgtgtgtatactttcctctgtcatacactccagttttatatgtatttatggaaagcagcatcaaatttcttacttcccacaaatgtgtcgctgatagagaccccaagcagaaactaatgcctcagcctcaaagagtgagttaataagtctgctctctgatctctgtttacatttcagttgcaaagagtagtctctgggtaactgaaatgagcctctctcccaccccgaccctccaattccacctgtcattatgtacaaacgttgatagctgggtctaggagcagtttacccaaaccaaagaaattgctgcattttagccccataatgagacctgggttcccaccagtgactagtattgacagaggaagtgaaaagcagggctttaattaatgcacttgctattgggtcttccctgctcctgacaccagctcctgcttctgccttggctgtaacatgcatgtcatgagttctttttttgcaagtaattttgccacaggcgtcagctgcttagagagcagctccaaggtcttagacgttaggcatctccctgggctccacctctgagactagctggttctgtggacgttggacaagtccaggcacctctctgagcctcagtttccccatgtgtcagatggagtctggcaggggcctcatgagctcagagcacccatggcctagatgctaggtcatgaccactctgggggtagagtaggatagatgaagagcttttcctgctagaaagcagatgatgcactcacagacctacatctctgttaaaatgctccagaggccgggtgcagcggctcacgcctgtaatcccagcactttgggaggccgaggtgggtggatcacgaggtcaagagatcgagaccatcctggccaacatggtgaaaccccatctctactaaaattacaaaacttagctggacatgatggtgtrcacctgtagtcccagctactttgggaggctgaggcaggagaatcacttaaacccaggaagcggaggttgcagtgagccgagatcacgacactgcactccagcctggcgacagagtgagactctgtctaaaaaaaaaaaaaaaaaaaaaaacaaatctccagagatcctgccccctgggcccgtcacatctggaataacatcctgactccttggcatgtctttcaagatcttacaccagctagtcctgtctcactcccaccaattaccccttatgtaccaccctccaaacaccctctggtcttctttccatatctaagatagcccaagcctgatcccaccccagggctttgctcttgctgccccctctgcctagagcactctctccccagatctgcgaatatctggcttcttctcatcacttagggctcaccttgcatgctgtctccacagtgggccttccctgactaccctagctgaattagcccagcccccatatccctcttcatcccatttccttattttcttcctaagaattagtacctaccactgtattaagtatctctctcttccccattagaacacaagattagtaattaaagggccagccgagtctctagtttcctgctgctggtaggttctcgataaaaattttaactttttaaattttttaacatttttatttcatacctagtccaacagatcaataaaaaatttttgaggctgggcgcggtggctcacgcctgtaatcccagcactttgggaggccaaggcgggtggatcatgaggtcaggagatcgagaccatcctggctaacacggtgaaaccccctctctactaaaaatacaaaaaaaaaaaaaattagcccggcgtggtggcggccgcctgtagtcccagctactcaggaggctaaggcaggagaatggcatgaacccaagaggcggagcttgcagtgagccaagatcgtgccactgcactccagcctgggtgacagagcaagactccgtctcaaaaaaaaaaaaaaaaaaaattgaatgagtgagttcattagtctgtgaatgagttgattaattaattaagaaattcttggccaggcaaggtgcctcacgcckgtaatcccagcactttgggaggccaaggtgggtggatcacttgaggccaggagtttgagaccagtctggccaacatggtgaaaccccgtctctactaaaaatacaaaaacttagccaggcatagtggcagaagcctgtagtcccagctactcaggaggctgaggcaggagaatcgcttgaatgcaggaggcagaggttgcagtgagccaagatcacaccactgcactccagcctgtgcgacagagcragagtccatttaaaaaaaaagaaaagaaattatttcacgccactagccctgtccctcttcaatctgaaatccagagataccccagcctgtatatctgtgtttccttcctctttcaggaagtggccaagaagatgaacttagacatgaggaagacgtcctccctgtggaaggaccaggcgctggtggagatcaatatcgcggttctctatagcttccaggtaacaccagggcccgcaccaccagggtcaagcttcaaatgagagttcaaacctttcagagccttgatgcagargatcaagagacctcactgccagaaaccacctttgcggggattgtgtccatgagtatggtctagcttccatcctgcatgccctcctctccagtgtggatcttgggtggggaccatttgatgaagagatgaacaaatggtggcaggggtagaggagtgttctgtcttgttgcttagagttctttagaattcaaacaagaggcatcctctctgtcttgtcatctcttagggcctcagactatcacataacagagacaaatactcttcaacatcatcagagacatataggctcctaaataaatgcatgaggctgtgctaaatggcattatagcaggatggctggaaaatgtatcaactaagccacaacacttttttttttttttgagatggagtttcactcttgtcgcccagactagagtgcagtggcacaatctcgactcactgcaacctccacctcccgggtccaagcaattctcctgcctcagcctcctgagtagctgggattacagatgcccaccaccgcgcccagctaatttttgtatttttagtagaggtggggtttcaccatgttggccaggctggtcttgaactcctgacttcaggtgattcacctgcctcggcctcccaaagtgctgggattacaggcgtgaatcacgcctggccaccacaacacttttgagagccagagggcgacactagtaataactatgccaggacaatgggcatcactaggattctcctgggccaaccaggagatctagaaactagaagttgctctctataatagggaccatcactgtcctctgggggcttccagtctaggcagctagacccccgtagatgcacgtgagaggcacacacagccagcagaatgaatgtgttaaatcaagccatggatggataggaatagaagccataggtccccatgtcagatgtggatggagtgggtgcactgaggaatgtcaaagggaagggacaagttgagacagggcaagagggaaggaggccacctcccttctcctttaaccatggagaatgaggtttcaggagtgtggcatgtggcctgatggactggtatgaagtctgtcaagccagagacaacagggatgtaattgagatgaacaatgaaaactagccaggcgccgtggctcacacctgtaatcccagcactttgggaggtcgaggagggtggatcatttgaggtcaggagttcaagagcagcctggccaacatggtgaagcccatctctgctaaaaatacaaaaattagccgggcagtagtggcatgtgcctgtaatcccagctactcaggaggctgaggcaggagaatcacttgagcctggaagatagaggttgcggcgagccgagattgcaccactgcactccagtctgggcgacagagtgagaccctatctcaaaaaaaaaaagaaaagaaaaaaaaaacctaaaagaagtcattatacaaaaaagatacttgcacacacatgtttataacagcacaattcgcaattgctaaaaatgtggaaccaaccgaattcatggcattcgcagcaacctggatgggaatggagactattattctaagtgaagtaactcaggaatgaaaaaccaaacatcgtatgttctcactcattagtgggagctaagctacgaggacgcaaaggcctaagaatgacacagtggactttggggactcggggaaagggtgggaagggggtgagggataaaagactacaaattgtgtgcagtgtatactgctcgggcgatgggtgcaccaaaatctcacaaatcaccactaaagaacttactcatgtcaccaagcaccacctgttccccaaaagcctataaaaattaaaaaatagaaaaagaaaaaggccgggcacggtggctcacacctgtaatcccagcactttgggaggtggaggcgggtggatcacgaggtcaggagatcgagaccatcctggctaacacggtgaaaccccgtctctactaaaaaatacaaaaaaaaaaaaattagccaggcgtggtggcgggcgcctgtagtcccagctactcgggaggctgaggcaggagaatggtgtgaacccgggaggcagagcttgcagtgagccaagatcgcgccactgcactccagcctgggtgatagagcaagactccgtctcaaaaaaaagaaaaagaaagaaagaaagaaaaaaaagatgggggtgggatgggagagaggaagattggcaagatcgacacgaaaggtgttaaagacacaatagcacccaacgaagactttctcctgggtctaagtggaaggactggacaagaaatgcagagagaatcaccatctcacttcacgctgctctaaaccatctcagggaccaccctttgggaaatgctgctctttggggcagggagtcccaaaataccccagcttctcatacctcctgacccctgtcccctctcctcccacagagtgacaaagtgaccattgttgaccatcactccgccaccgagtccttcattaagcacatggagaatgagtaccgctgccgggggggctgccctgccgactgggtgtggatcgtgccccccatgtccggaagcatcacccctgtgttccaccaggagatgctcaactaccggctcaccccctccttcgaataccaggtccttccctgtccctgcctcttttcatattaagtgtcctgtatctggtgtgtgtgtcacatttaggctcatttcaacccaggctagtgctctggacactcaatagccacatgtggctggtggctaccatattgcacaggtctagctgaaagaacaagagagactatatgaggccgacatgatggctcatgcctataatcccagtgatttgggaggttgaggtgggarggtggcttgaggccaggagtttgagaccaccctggggaatatagtgagaccccatctctaaatttttttttttttttaattagcaggctgggcatggtgggtcacaccwgtgatcccagcactttgggaggccaaggcaggtggatcacctgagtcaggagttcgagaccagcctggccaacatggcgaaaccccatctctactaaaaatacaaaaaattagcctggcgtatgccagctgctcaagaggccaagataagagaatcgcttgaacccaggaggtggaggttgcagtgagccgatatcaagccactgaactccagcctgggcaacaagagtgggacaaaaagaaagagagaaagagagagagggaaagggagagggagagggggagatggggaggatgaagagggggagagggagagagtgtagagggagagagggagaggggggaaagggagagagagagggagagaaggggagggagggagggaaggaaggaaaagaaggaaggaagggaagaaaggaaggaagaagggaagggagggaggaaggaaggaaggaaaggaaggaagggagagagagagagaaagaaagagaaagaaaggaaagaaagaaagaaaataaaaaataaataagaaaattagctgagtgtggtggcatatacctgtagtcccagctatttgggaggctgagttaggaggatcccttgagctagggaggtcaaggctgcagtgagctatgatcacaccactgcactcctgcctgggcagcagagtgagacccctgtctcttaagagagagaaagagggatgaaatgagagtgagtagtcaggggtcacaagaacagagtttgagagggactgggggccaaggggaaagagctagcaggacactgccaaggccagaccacccactgggcaaggaccccccccctccccccaaccccgcatcccttcccccatggtggtcaccactgggcagaattcttcccttcagaggcygagggtcaggcagtcacaagtcccaggtggtcctgagcatccccaacaggaaccagatgccctcactgcagtgagtgaccatagccctctccttctcttcccagcctgatccctggaacacgcatgtctggaaaggcaccaacgggacccccacaaagcggcgagccatyggcttcaagaagctagcagagtaagtttcgtgcagtgggcgggtggggtggatgtccccacaaactcagagaacccagagaaggaggctgggyagactcctgtgccctctgacctctctacagaatatgatttcttcatcttcttcagccacctgggccttctttgcctctgagtctgagctgtgaatgtcgttccaactcttctccttctcagcctcactttcctcacactggtttcctaaattcttgtcctgggggcaatggtgtgttggtgaaccagccctcctaataataataataataataataataataataataataataataatagtaataccttgattttcatgtttgccagtttccatgatgtaaacattcccactatgaccaatttcttttctttctttctttcttttttgagatagggtctgttccccaggctggaggcgtctcactttgttgcacaggctagtctcgaacacctggcctcaagcgatcctcctgcctcagcctcccaaagtgctaggattacaggtgtgagccactacacctggcctaggaagtcactgaacccagactagggaggagctggagttagtcagctccagcacactactgcctggagagcaccctcgttcagggctgacccttaattttactcattcattcatttactcattcattcattcattagttgggtgtcgcagcacacgcctgtagttctagctactcagattctgtgccaggcactgtgtgaggcttcagggggatcatggcaagctagacaaatgctgtccctgctgtcatgaagctcacagccattcctttgtcaaagaatcaacaaatacagtaaacatggcagctgtggaaggtaccatcgaggaatggttcctggaaataataatggttcacggagtttgggaggtcagggagggcttcctggaggaggtgacaattgagctaaagaatgagattaagaaagtttaagcaaagaggggaaggaagggggttatggcctgagactactgaggagtgattttcctgaagaatgcctgaccagccagaggaccagctgacaagtaggatggggttaactaagttgatttaacggggatgccagccttctgcccaaaaaaaagagaaccccactgatccacttaccaaagaccactgtttggagctaacttttgtcagaagacannnnnnnnnnnnnnnnnnnngtgagaccctatctcaaaaaaaaaaagaaaagaaaaaaaaaacctaaaagaagtcattatacaaaaaagatacttgcacacacatgtttataacagcacaattcgcaattgctaaaaatgtggaaccaaccgaattcatggcattcgcagcaacctggatgggaatggagactattattctaagtgaagtaactcaggaatgaaaaaccaaacatcgtatgttctcactcattagtgggagctaagctacgaggacgcaaaggcctaagaatgacacagtggactttggggactcggggaaagggtgggaagggggtgagggataaaagactacaaattgtgtgcagtgtatactgctcgggcgatgggtgcaccaaaatctcacaaatcaccactaaagaacttactcatgtcaccaagcaccacctgttccccaaaagcctataaaaattaaaaaatagaaaaagaaaaaggccgggcacggtggctcacacctggcctaggaagtcactgaacccagactagggaggagctggagttagtcagctccagcacactactgcctggagagcaccctcgttcagggctgacccttaattttactcattcattcattagttgggtgtcgcagcacacgcctgtagttctagctactcagattctgtgccaggcactgtgtgaggcttcagggggatcatggcaagctagacaaatgctgtccctgctgtcatgaagctcacagccattcctttgtcaaagaatcaacaaatacagtaaacatggcagctgtggaaggtaccatcgaggaatggttcctggaaataataatggttcacggagtttgggaggtcagggagggcttcctggaggaggtgacaattgagctaaagaatgagattaagaaagtttaagcaaagaggggaaggaagsgggttatggcctgagactactgaggagtgattttcctgaagaatgcctgaccagccagaggaccagctgacaagtaggatggggttaactaagttgatttaacggggatgccagccttctgccccaaaaaaagagaaccccactgatccacttaccaaagaccactgtttggagctaactttttgtcagaagacactactctgtttcctcagctccctcaggtccagaattctctatgtatgataactagttgtacaacaggtgtcatctaagccatgggccccagagacaagacactggtgggtcttgcagggacccaaacctaggtcctggctccattaatagagcccatagaatcaatcaatctctctctctctctctctcctctctcttctctctctctctctctccccctccccctttctctccctccctccctctcctctctctgtctctctctctctctctctccctccctccctccctctctctccttccaccctaatcccatcccccagccaagcaagaacacatcagcagccaccatttccctaacaagaatatctcagatattctcagggagggcaattgttggcttcagttcagctccactgtctctggggggaaaggggagggagaaatctaaaacattaattrcactattaagttttgggtagtaacaatgggaattaattatagatgcatctttatgctcaaattattcaaagggaaccctccaggtaccttttattcctttctgtttcttccccttagctaagtcttcctgcatcgtgggcggtttccctgattctaaaaaataatgaacttaacgccgataatcccaggtggggggaagttagcgatttgtctgcactgagatttctagttacaacagggaggcttgttaaggagtcgagcctgggtatttctgagcctctggcctktctgctagtgcccctggaactcgccctgcccagtagagcagaaggaagagacactggtttgggcttctctgtttagttagaaagaggctggatttgatgttcagacttcccagggtctcagtggcagcatcttttaaaattcataacttcttttatttcttttttgtagagacaaagtctcactctgttgaccaagctggtttcaaacccttggcctcaagtgatcctcccgcctcagcctcccaaagtgccaggatcacaggcatgagccactatgcccatcccataacttcttttgatagatatttatttagtgcctrttgggtatcaggctctgtgcaagacccttgacatgcattgctgaataaatcagacctggtccttcccttgtggaccaataaacctctaaatcccatcaaactcaatgcctggtgactaattcgtgattcatttctctctctctttctctcattcacacatgtgcatacacacacacattagaatatgagccctatgacagctgcattccatagctatgttctctgtggtctccatttcctataacaatactgacacatagttaagcacttaataaatatttgatgaatgaaagagagaggaaatggatgaacgatcatcttttgaggcaatgcttggcaaaccaaggttcttaagcctgggatcaatcaagtaacaagctaacaaaactaactactccttttaattcatgactaattgctctggtgggatttttttttttttttttttttttttttgaggcagagtctcactctgtcgcccaggctggagtgcagtggtgcccagtggtgcgatctcggctcactgcaacctccacctcctgggttcaagcaattctcttgccttagcctcccaagtagctgggactacaggcgcacrctgccactcccggctaatttttttgtattttagtagagacggagtttcaccttgttgcccaggctggtggcaaattcctgagctcaggcaatccacctgcctcggcctcccaaagtgctgggattataagcatgagctaccacacccggcctctggtgggatttaataaaggatttaatatccagcattatctctagagaagttaaaaaataaaataaaataaaggatttaataatactttaataatacggtgcttaaacacaaagacttcaagtgcctctgaggaaacccctgaagccatcaaagatcaagagagttctcttctgttatatttcatggatcctggttcttgcacgaaagtcccaatccagcatcttctctccccttttctgttgcccatttttcatctccatcctcttccctccagagctgtcaagttctcggccaagctgatggggcaggctatggccaagagggtgaaagcgaccatcctctatgccacagagacaggcaaatcgcaagcttatgccaagaccttgtgtgagatcttcaaacacgcctttgatgccaaggtaggtggggggtagccctagctccaccagcttctcatggtgaattaaggcaggaaggggagagagggaagtcaacagagaagaagcctttggcaaaggatgaaagcacacctgacagggcctatcagctcacatacacatttgcataaatttcaggggactgtgatatccctgtccccatgagtccaggagtcacaaaatgaaattcccctctttagagcaaaatgttagagggtttataagaaaccattctgaggtcagtttgggaagctttgcctgaagtacagctcgatggttttttggttttgtttttttgtttttttgttttttgtttttttttttttttgagaaggagtttcactctgtcacccaggctggagtgcagtggcgcgatctcggctcactgcaagctccacctcccgggttcacgccattcttctgcctcagcctcccgagtagctgggactgcaggcgcccrccaccacgttcggctaattttttgtgtttttagtagagacggggcttcactgtgttagccaggatggtctcgatctcctgacctcttgattcgccygcctcggcctcccaaagtgctgggattacaggcgtgagccaccgcacccggccagctcgatggttttcattgctgtggcaggacttcccagagcctgtaatctataagcatgtgttctaatctccaaaagaggcgaggatagaatatagacgtttcccaaacatgtttgatcgtggatcgcttgttttcatggagcatctcaggagactgggattttctagaacctattttgagaaatgttgctcagacgatgatgagacacagggcaatcatctttccagaaggcagatatctcagacttgtttggccaggtgctccacactgctcgggggaggattagagaggaggttgagaagacttagtcagctctagccagatcattcccggmctaactggggtcaggaagaatccaagaccaattgactataagaatcccatgggattccatcaagctgtgtttctagtatctgccaatcccttgaaccattgcttcagattctccacaacccttcaggccacagtgaccatagcaaggtcccacgctaccaaaaagcgtttagttctacccacttgagcccactgaagtactaacacctcagatcttttggttctccttccaaaggagatgacccaaaatgactcacatttttcctttctctcctcttgcccttcccccatcactttttgtctctcccacctcttttctctcctcatccccttcttcctctccccatcctatacctgtgccctgcccacctaggtgatgtccatggaagaatatgacattgtgcacctggaacatgaaactctggtccttgtggtcaccagcacctttggcaatggagatccccctgagaatggggaggtgagatgagctttyacctgttcaagagtgtggttccatcatcaggaagaagtaggggccaaggttgagactcttcctacacctgctattcagtagcaaaccctcccagagcctgaaagccagtaatttccatttggatccaagttatacaaaggttggacaattccaagtactcagtctactggcgtccattagttagcaagtccctggtgaaaatattgtcacctaagtgagctatttgtttgcagtggctgctcctatcattagcttgatgttccctgatgtagatgaggaacrtggggacaatatttttatagaaggaaggctccaacgggaagttgtgtgctgggggtagggagtccacacctgtagtcatttaaacagcaggtgtatccactgcgtctgtagcycaggcattactgtccagcctgagcccctgaccgctcctgacatcctggcctccgggcatcagtctcctctttgacagccaggaccccagaccctcagtatccgacctgatttcccatttactaagatgtgctaatttcacccatatgttttggcttccagaaattcggctgtgctttgatggaaatgaggcaccccaactctgtgcaggaagaaaggaagtaagtgaatgacccctccgacgtcacccgccaccccngagggtaactggacattgacttttggcacctggggttcacatttgagttctggatggtggctgtaatctgaagtccatttgtaatgggtcttagttgtgaggtgtctgcagtctactggggcmaatattttggtatctgggtcacttcacagccttgtgcctcagtttccttttctatcaaatagagattatagcacctaccttgactttctaattagtaagaatcaaatcacaaactagatgtaaaagcactgtgtgctgggcgtggtggctcacgcctgtaatcccrgcactttgggaggccgaggcagatggatcacaaggtcaggagttcgagaccagcctggccaacatggtgaaaccccatctctactaataatacaaaaattaggcgggygtggtggcgcatgtatgtaatcccagctactcgggaggctgaggcgggagaatcgcttgaacctgggaggaggaggttgcagtgagccaagatcgcaccattgcactccagcctgggcaacaagagcaaaactccatctcaaaaaaaaaaaaaaaaaagcactgtgtaaataytattctttttccctctttgagaacctacattcaaaatcagtgcaaggcagtcaggcatggtagtgcacacctatagtctcagctactctggaggctgagccagaaggatcacttggccccaggaatttgaggccagcctgaacagccagacctgtcaaawaaaaaaaaaaaaaaaaaaaaagctaaaatcaaagaatggaacttctttccttaaaagcttcctgtctgatgctcacagtgaagttgcagctaatctagaagttgagttcaaaarataagataccttgtaagacaaaacatacctgtagtcaaaaatatgtttgtaatggaaccgcatctaatgtgggattgagttctaaaggtatttggtaaagtaaaaaagcatctaatcaaacttaccattgatggctgggcacggtggctcatgcctataatcctagtgctttgggaggctgaggcaggaggattgcttgaggccaggagttcaaaccagcctgggcaatatagcaagatcccatctctacaaaaaaattaaaaattagctgggcatggtagtgtgcacctgaagtcccagctactccagaggctgaggcaggaggatcacttgagctcaggggcttgaggctacagtgagccataattataccacggcaccccagcctagacaacagagcaagaccctgtctctaaaaaataaaaataaaaaaattttttttgagatgaagtttcgctgttatcaccaaggctggagtgcaatggcacgatctcagctcactgcaacctccgcctcctgggttcaagcgactctgcagcctcagcctcccgagtaggtgggattacaggcacacaccaccatgcctggctaatttttgtatttttagtagagacaggctttcaccatgtttgccaggctggtctcgaactcctgacctcaggtgatatgaatgcctcagcctcccaaagtgctgggattacaggcctgagccaccgcaccatgacaaaaaaatttttgttaatgacccttgaaaagcccttgcatcccccataaggtataggacacatggtgtgtgcacgctgagctgcctttccatgaggccaactcagtatttgctccagcatggagcaagcagatccctgtgtcttaaggtgaacatcaaatgctctagctggctggtgttttttggctgtgttaagcagaaaatcccttctgaggccagacacagtggctcatgcctgtaatcccagcattttgggaggctgaggcgagaggatcacctaaggtcaggagttcgagaccagcctggccaacatggtgaaacccgtctctactaaaaacataaaaattagctggccatggtggagtgcacctgtaatcccagctactcaggaggctgaggcaggagaatcacttgagcctgggaggcagatgttgcggtgagccgagattgcgctactgcactccaggttgggtgacagagtgagactccgtctcaaaaaaaaaaaacagaaaatcccttctgattttctttgtgcagagaacatgctgccgtattcacataagtttgatacccagragactgaccgttgctgagtcctttgtggtcagccctcgttctacgcccaactccagcatcttagtcctcactctccttacctctctccttcccaccccatcctagatggcctcccagcaggttccctctcacccctccttcagggagagatagggcaccatcgattctcccctctaggtacccggaacccttgcgtttctttycccgtaaagggcctcccctccccaatggtgacacagaagtccacggtctggctgcagcccgtgacagccagcacaggtagagtgtgcatgtgtgtacacgcaggtgtgtgcgagtgtatgcatgcacacccaatgcctgagcatcccaggccacacatctaggtctcaaggagatccgagttctaacctgagctgtgtcactaactcactaagtgaccttgagcaagtcgcttaacccctgtgggccttggtctttctcatctgccgaatggggagaaattagctctgccctacccacttctgtggcctattggcagggtcaaagggtaataacaaaaaggaaagcatttgaaaaaacctccaacctcatacaaatgcacgtgctgttatttttacccacaaccatcaaccattcctcccacactaacaacacagccaccccctgatatattgcatgactcaatgtgagactattttagggcagaaaatacacttacatatatttagaactttcctgatgctggagcgaaaactttaaagaacatccagcttagaaaccctgctgctagaatgcacaatttcttttcttctttttctctcttyttttaattttctcatttctttttaattttttgtaattagatttgtgtgttgggtttgcttcttgagttttgggttttgttttggagttttggttgcttgtttgtttggtctcagattttttgtttgtttctgtttgctttgttttgttttgccttgcctgagagcacaacttaccayttttggaggaaaacggagaaattggattttttttaatatcaaggttcctgagcctctcatgctgagatttgagtcccaaagacatcttccttcaccttccaaataatttatttttttaattttattattattatactctaagttttagggtacatgtgcacaatgtgcaggttagttacatatgtatacatgtgccatgctggtgtgctgcacccattaactcgtcatttagcattaggtattaatttaaaaaatgcagtctctttccatgccaggcgtcagtgctgaacattgttcatatttacttgaaatgtgaaatttgatagagccctgaaatgtctaaggaccataactttatggaaggacagtattgaatgggatactccagcactgtccagaagaactttctagagagatgtaaatgttctatatctgtgctgtccactatagcagccactaaccaaacgtggctccggagcccctgaaatgtggctggtgcaagtgacaccctgctatgacccagtggttctcaaagctgaatgcacatcagaatcacctagggaggtttgcagtgtaccaaccacattgacttgtatttaactcaaattaatttaactttagatagccacacttagccaatggctgccatcttggacagcatggtctagtttctagctacttaaaatgaagtctggagacactggcatctcctgggagctcgttagaaatgcagaaccccaagccaggtcccagaactacttaatcagaatctgcattttaatgaaatcccaggatgattcttgtacacattaaaatttgagaaacagccaggtgcagtggctcacacctgtaatcccagcactttgggaggccgaggcaggtggatcacctaaggtcaggagtttgagaccagcctggcaaatgtggtgaaaccccgtctctactaaaaatgcaaaattagctgrgcatgttggcacatgcctgtaatcccagctacttgggaggctgaagcaggagaatcacttgaacccaggaggcagaggttgcagtgagacgaggccgtgccattgcactccagcccaggcgacaagagtgaaactctgtctcaaaaaaaaattttttttttttttagaaacaagggagcatggtctcatggtttaggggagtagttagttctgttcctgacttcttactgattaaatcattttaactttatgggtctcaggtttcctgagttaagcatggccagaaacctttttagtaccagttaagaccaagtgcagatgaacagttaccactgtggtggacawgggtaagttggtagattatagaagaggccatgggagtgttatggtttgactcaacatacaagagaaggccctagaatcaggactggtcacttgaagatccatcaagggtgttgacctcaggagggagctccaggccagagctcacaggttctctttggttttggcaggagctacaaggtccgattcaacagcgtctcctcctactctgactcccaaaaatcatcaggcgatgggccygacctcagagacaactttgagagtgctggacccctggccaatgtgaggtgagcaaggggataagggggtcgggggtcaggraagactaaggctcctggggagcttgacctacttacaaagtgagcgcttcgttgtggrgaggtagtgtccattcatttctcataaaaccagctgcatcctggctgtctgggacccctcccacccattaagtcacattgcctggtctccccgtgcaccattttttatcctttctgtgacttcttttcatatacacactccctcagagccccattacccaaggttcaccccattgtttgtgctgaaggatatcaatccctggatattgctcaatgagctgcccttcccaatagctacggtgtatacttcatagaagcttctgtagacaccctgctatgacccagtggttcccaatcctggaggctcctcaaaaccacctagagaggtttgcagtgtactaatacaataaccaagacccatctccagagattccgatggaattgatctagaattgggcccatgtgttgcttttttctttaagtctctccaattgactctaacgtgcagtcagatttgacaaatactgccctaacctcayattatctcatggcgtagtcacatactatgagataattttaggaagcacgtgggcagatattttatattacaatagttgtgtattcagtttaatgggttcttggaaggaaagaaaacagggatgtcaaacccttggtttcgtggatattgatcaagacaagactgatgtgagttgccctgtaggaagaaccttcaggcctggccacaaatctctcagaccttcgctaactgagccttctccgtaattactcagagcaatgcgtagtagatgatatagatcactggtttgctagctattgaaatatctgttatgtcctccaggacattttaaaataggctttacgttttaaagcaattttaggttgacagcaaaatgagcagaaagtacagagagttcccacatcctcctgtccctacacactcacagtctctcctcctatcagcatcccacaccagagtggtgcgtttgttagaactgatgtacctacaatgacacatcattatcagccacagtccatagtttactttagggttcactcttggtgttgaacattctataggttttgacatcagtacttttttcagctcaacactgaaacgtcagttctggagtttgacagtcagacccatttttcccttattaaatctatcatggcaggagctggcaaactaacacctgtgagccaaatccagcctggtcactgcatattttttacaacccatgagctaataatggttttcttaccaatgaacatttgtaattagtttgatggtagaaaacattacctttgaacccgaataaagaaaatgttattattctctcccaaaaaatgaattccagtcttctcatagtagacctgtgttaaagtatgcttaattgttattattatgtttttaattttatcaattgagaatgttcaggaatttgttttctttcttgttttgtaagwayctacgtaatagcttcaattttgcttcttggcctgtaagcctaaaaatatttgctgtctgacccccacatataaaaagtttgccaacgccgggcacagtggctcatgcctgtaatcccagcactttgggaagccaagacaggcagatcatttgggctcaggagtttgagaccagcctgggcaacatagcaaaaccctgtttccaccaaaaatataaaaacttagctgggcatggtggcatgcacctgtggtcccagctactctggagactgaggtgggaagatcgcttgagcctgggaggcagaggttacagtgagccragatggcgccactgcattccagcctggacgatagagcaaaaccctgtctcaaaaaaaaaagtttgccaagaccaggcacagtggctcacacctaccatcccagcactttgggaggccaaggtgggaggatcacttaagccctggagtttaagaccagcctgggcaacatattgggaccctgtgtctacaaaaaaaaaaaaaaatgaaaaaaattaattgattagctgggcatagtggcacatgtctttagtcccagctacttgggaggctgtggtggggggattgcatgagcctaggagatcaaggctatggtgagccatgatcacgctactactacattccttgaaatcataagctgaagattgtgatggaaatgtgactagaagtaactgtagtctaggtcctcaggcccaccaagaagaatattaatgaakcaaccgcctgaatcatcatctgttggtgaacacaagagttgggagccttggtccattggggctactataccaaataccataaactggtggcttgtaaacaacagaaatttatttctcacggttctagtggctgggaagtccaagatcaaggtgccagcagattcagtgtctggtgagggccctctctctggctcatagackgtgccttccagctgtgtccttacatggcagaagggaagaactctgatctcttcagccccttaagaggcactaaccccattcatgaggcttcaccttcatgacctaatcatctcccaaaggccactaataccatgacattgggggttaggtttcaacctatgaatctgggggagacacaaacattcagaccataggagtgatgagctagtgaggaaaaattaaaagcaagttcaaaaacacaaatgagtgattgacagtgtcagcggtaatygaatatggcagacatcacaaacataaatcacagagattcaggaaacaacaccttaaccagaaggcatgactagtgctggaagttcccagatctgcactgggctaaggctgaggcaggtggctttgggtagggtttccctttcctgtcacccctccagtcagtccacacccagtcaccatctctgtctacctgtcaggccaccaccctgcaagaaaagggtaatgtttttagatccaggaagatcattggttaagagtaaatggcaggctgggcacggcagctcacgcctgtaatcccagcactgtgggaggccaaggtgtgtggatcacctgaggtcagaagttcgacaccagcatgaccaacatggtgaaaccccatctctaacaaaaatgcaaaaattagccacgcgtggttatgggggcctgtaatcccagctactctggaggctgaggcgggagaattacttgaacctgggaggcagaggctgcagtgagccaagatcacaccactgcacttcagcttgggtgacaagagcaaaaytctgtctaaaaaaaaaaaaaaaaaaagtaaatggcaaaatgctatctaatcccacatactttatttggaaaggctctggaattctggggaaaggagggcaaggaagaagaggaagatgaaatgttacaatatgagtgtagatttgaggggagtggatattaacctacattaacttacacctgtgaggcacctggacccaccccaagttcatactccaatgatggagggtgcctttccaacttctcctacyttcttccttccttcccatctcaatctgttaccattttgtccccatcgtcctaaaaaagagattcaggggcagggcctgatcctgtatggagtaggttaagtagccccactccatggtttatctgaggtgacagtctacagcagaacactctgaccttaaaaagtggggcaaggtggggtgtatttgtcccattggtgaagctgttgttcctgtccctgtgaggtctagacctacagccaagaccaagttctggaaatgtagcagaaagtgtctgaaggactgtgtaccagccctacaggagccatctaggacacagccctccattttccatacttcagtcaaagtgtccccacctcaacatagagaaatagctcatgaatttgaccccactggttcaagcaccaatattytcttggtggcgtctatgcacagagggtctgtgaagcaaattaatttcatagaccttacaaggaatggaaccagaatacttataactatttcattcccttttagaagaacctgtttgatgtgttgatgacaatttcttctggtcttttcattaatacaagtccctgaggaccattatattatagtttcattatcttcatatttaaaactaatctagttatgtcacttgtagaattcaagccttccactaacatagactaatttccccaattggtccagcttagaagcatgcaagaaacaaccagtggttccaggtcattgctgtccctaactcgtcctccttagaaccaattagaatattctcctgatgatggcgatacttagaagagaccaaaagaaacgaagagaaacccttgagagcccttaggtttcaagtgcccttccacagatgagcttggggttgcctgaccaccaacagctaaacactgttcttcttgagataccagatatattagttcaggctgtcataacaaaataccacagactgagtggtattggctgtaattctagaactsacagacaacttatctgacaaagggctaatatccagaatctacaatgaactcaaacaaatttacaagaaaaaaacaaacaaccccatcaaaattgggcaaaggacatgaacagacacttctcaaaagaagacatttatgcagccaaaaaacacatgaaaaaatgctcaccatcactggccatcagagaaatgcaaatcaaaaccacaatgagataccgtctcacaccagttagaatgtcaatcattaaaaagtcaggaaacaacaagtgctggagaggatgtggagaaataggaacacttttacaccgttggtgggactgtaaactagttcaaccattgtggaagtcagtgtggcaattcctcagggatctagaactagaaataccatttgacccagccatcccattactgggtatatacccaaaggactataaatcatgctgctttaaagacatatgcacacgtatgtttattgcggcattattcacaatagcaaagacttggaaccaacccaaatgtccaacaatgatagactggattaagaaaatgtggcacatatacaccatggaatactatgcagccataaaaaatgatgagttcatgtcctttgtagggacatggatgaaattggaaatcatcattctcagtaaactatctcaagaacaaaaaaccaaacaccgcatattctcactcataggtgggaattgaacaatgagaacacacggacacaggaaggggaacatcacactctggggactgttgtggggtggggggagaggggagggatagcattgggagatatacctaatgctagatgacgagttagtgggtgcagcacaccagcatggcacatgtatacatatgtaactaacctacacatkgtgcacatgtaccctaaaacttaaagtataataataataaatttaaaaaaaaaaagaatagaaatttattttctcatggtactggaagccacaagtccaagatcaaggtgctagcagcgttgctttctagtgaggtctctctttctggcttgcagatagccaccttcttgctatgtccagagagagaaagagaaaggaaagagggagagagagagagggagctagagagagaggagagagagagagcactctggtgtctcttccttttctttttcttttcttttttttttttttttagacggagtctcgctctgtcacccaggctggagtgcagtggcgctatcttggctcactataagctccgcctcccgggttcacaccattctcctgcctcagcctccaaagtagctgggactacaggcgcctgccaccatgcccggctaattttttgtacttttagtagagacggggtttcaccgtgttagccaggctcttcctcttcttataaggacactaatcctatcagatcagggctttacccttataacctcatttaaccttaattaccccttaaaggccctatctcaaaatacaattgtgaggagattagagttttaatatatgaaatttggggggacacagtttagcccattacaccagacactccccacattccccacagtcccttagcatgaacattctgtcatctccttgacaggttctcagtttttggcctcggctcacgagcataccctcacttttgcgccttcggacaygctgtggacaccctyctggaagaactgggaggggagaggatcctgaagatgagrgaaggggatgagctctgtgggcaggaagaggctttcaggacctgggccaagaaggtcttcaaggtaatctggatctyntggacctacaggaaaaagtaatgctccccacacccccaaagacagcacctaaaccatcaagaagagaataaacttgagagaaccctcagtacctctcccatgtatccagccaagatacagctttaaacagctcagacaaatttgggtgtcctgaaaacacatattttctacccagaatccaacattctacattatgggcaaggagttagtccataaaaaamattatatagagtcttggaatgtcagggctgggaggaagccatccgtcactcccatttggtgtacaggtacacaaagaaaacaagagatggtcaaccaaaccaaacctaacatcttggcagtctaccaattttgacamgcctacccctcttgtactagatcttcactaaccaatatggtagccactagccacacatagccayttaaatttaaacttaaactaattaaaattcagtaggatgaatgggtaaataaaatgtggtacatcaatgcaatggaatattcttcatccataaaaaagaatgaagtggtgatacatgctacaacatggatggaccttgaaaactttacactaagtggaagaagccagtcacaaaagaatatgtattgcaggattccatttatataaaatgtccagaatcagaaaatccatagagacagaaggcaggttagtggttgctaggggttatggggatgggaaatggaagtgactgctaatagataaaaaagtttttcagtgttgggggggtgatgagaatgttctggaagcaggtaatgggaagggttgcataaccttgtggacgttcgacatgccacaggattgtgcatatttaaacagtgagttgtatgttatatgaattacrtttatacctatctatacagtacaaaattaaataaggctggacatggtggttgatgcttgttgtcccagcacttttggaggctggggcaggaggattgcttgagtccaggagctcaagaccagcctgggcaacatagtgagacctcatctgcttaaaaaataataataattaattaaattaaacaggtttaaaatcccattcctgacttccttcagacagaatagagtgacagactctgcatccccacctcaccaggaaaccactaaagttcctggggaagcaaagtagaatttcattagaacataatggatggagaggagaaagcctatagtggctgtgaagtccctggtgccatgcatgtctaattgataccttctgatggtcaggaatgtattgtaaaaatagaacatgtgctaatatcaggaatgataaaagccatgttgagtggcccaggtcagttagctgaaaataaaacaaatgaagttaatttgagagagagattcctatccctatattaccaaaaatatacatgttttgttttgttttgtttttgagacagagtcttgctctgtcacccaggctggagtgcagtgacacaatgttggctcactgcaacctccgcctcccgggttcaagcaattctcctgcctcagcctcccaagtagctggaactacaggtgcctgccgcmatgcccagctaattttttgtattttagtagagatggggtttcaccgtgttgcccaggctggtcatgaactcctgagctcagtcagtctgccccccggggcctcccaaagtgctgggattacaggtgtggcacacatttyacrtacaacgttcactacagtcacagctccactgagattccagaatccccagttatacctgaaattgcactggaacttcctagattgttaaataaaataaattataataaactgttatctttcttcagtatttaaaaaaaatcccattgctcagttgcagtaagcacattttgtatgctcagtagccacaggggtaggggttaccctattagacagtgcagaacctttccatcatgataagacatcctattggccagagctgttttaaatttaaggccaccgggggataaatgaaccatgcayggccttctgtctgcatatgagrataactaaactggccattctggggtgggaggtggtaataaatgtagactgtgccagttttacccactccatcctagccttggaatacattctcctcagcaaccccaggggaaagggtactatgcaaccttctgtcattcagttggcgcttttcatcctgaaagcaaatgcaggtagagagcaaatggggaagctgaggcccctgggctataaagatttccaggtggggaggcgatgttcatcagcctgttcctgcatttcctcccagacaaagagagatgagataacggctttttatacccattgagataattctgttgcttgatttccatcagccaaccttgactgagcaaccasgaagcaaggcctgtgaaaagccactgtaccctttagctgtcaacctcctgtcctcccatcccacccccagctctcgaaaccacaaatctacttcctgtctctgtagatttccctgtgctggacatttcgcatgaatggaatcatataatatgtggtcttttgtgactgacttctttcacttagtataatgttttcaaggttcatccgtgtcatagcatgtatcagaacttcatccttttttatagccaaataatattccgttgtatggatgtgtcaaatcttgttaatccattcatccactgatgaacatttggattgttttgaagtcaacatgaggtcaaacaatggtaaaaactactcttaaaagttatcattattttgaattatctgtggttttatcttaaaaagtaaatcaggacattggctgggcatggtgactcatgcctgcaatcccagcactttgggaggctgaggcgggcaaattgcttgaggccagaagctcgaaaccagcctggccaacatggcgaaaccctgtctctactaaaaattagctgggcatggtgcacatgcctgtaatcccagctacctgggaggctgaggcatgagaataacttgaacctggggaggaggtcgaggctgcagtgagccaagatcacaccactgcactccagcctgggtgacagagtgagattctgtcttaaataaataaataaataaggacagcaattcttagaattgttaaagtcaaagaacaagtgagcttgaccaaaaaaaaaaaagaaaaatgtatttgcagtcatccagacattcaatatgctctgcctttatgtaattcttaaatattaaaggaagatggattgggaaattctgagatgtttactttcttctttaatgttaaacctctacacacatcagttttaggaataaatgacgcaayagaattatatcttaagtacaggttaggtcctaaagtcaatgtcaaatccgacgtgtccagcacatcgcagacactcaaaatatataggatggatggatggatagatgaatggatggatgcatgcctgcatggaaagatagatggataggtgggtgggtgggtagatggatggaaggatggatgcatggaaagatggatgagtgggtgggtagatggagggaaggatggatgcatggaaagatggatgggtgggtgggtggatggatgggtggatggatggatggatggaaagatagatacatggatgggagggtggaagsgtagatgaatggaagagtagatgagtggatgggtgaatggatggaaggaagacaacgaaagggtagagggaagaaaggaagggaaggaagaagggaaggagggaagggttactggatggatggatggatggatggatggatggatggatggatggttggatagatggatggatgggtgaatgaagagatacatgccatgacttggagctgttggagaggagatccgcttggctgaaagaggtcactgaaagccttgtgtacaccacaggcagcctgtgatgtcttctgtgtgggagatgatgtcaacattgaaaaggccaacaattccctcatcagcaatgatcgcagctggaagagaaacaagttccgcctcacctttgtggccgaagctccagaactcacacaaggtacctcccaccacccttccagggaggtattcgtgacaatgggggaaaggcaggtgatctcacctccagaaggtgcttagagaagatgggcttcattgctttgatctccctttagtgcagtcctaccaaaatgaatactttgctgctctcccacactcagtaaaacaagtgctggtaaatgtttccctctctctctctagtaatgtactgtgttcttccaaaccatcctcttctcaacttaactcaactatattttctttttgttctgcactacccacaaccaccccacccatcccaaccaatgcctgcctcatctcctctcttctgtctctcattctactccagagagcagtggaagtgtcagtagagggtgaatacaatgctgcagagtgtttgtttgtattaatattctgagacaagatctcattatgtttcccaggctggtcttgaacccctggcctcaagtgatcctcccacctcagcctcctaagtagttgggattatgggcgtgagccacgttgccccacctggggagtttttaatggaacattcaaccccttctcaggaagactgttgtttttctccccacaggtctatccaatgtccacaaaaagcgagtctcagctgcccggctccttagccgtcaaaacctccagagccctaaatccaggtaggaacatcttggttcactgggttacctacgtcttctcccaaatgccacccacgatgaaggacaagccctgtggactccaaggactggctgttctccaatcattgcaaagtgccatagagacccccttgctgctttatagtgtctggggttcctgctttccttttgcctagctccaacctgaaggagtggaaaaaggagatggtattggtctcatgaaaagaggaaagaaaaaggttttctgagtgatttttaacagtagaccacacccctgtagcttcgccacatgttcgttgtaccacagcatcttagctggaaatcacttagtccaagtatttcctattgtggataatttttttaatggagtgctaaaaagtggctacccacactctgcttaaatttctttgggttgatgggaggttcattacctcacaaaacagcccactctgtgttttgaagtcctaagtgttagaaattagcttaatatccaatataaccaatatctttttatctaatgtaaccaaagcatgtcttcctagtactttattttaaacccagttttactctctgtgacacctaaaataagtttatttctttccaaatgaaagacctggaaatagccaacaacattgaccaatctcctgtggggcctgattccttcaagtcattcttcctaagagatggtttcccaagcctctggctttagtaaaaggacacactctgtcctgctggaaatgtcactctcacctggtcacagtgcagtggagagcatgtgatcactgccaaatatgctgaggttattattaccatcaccaatttgaacaggacgcgctaatgctgcctgagatcgcaggcgcggttctgatggccgttctgctcttccattaaaagcggtcgctgctgttcttagacatcacgtcttctcaaaatgatcacaccaggtctgctcatctctctacttgtataaataatttttctagcactaatgaaagtctttgcatagatccctgttgaatggaatctttttcactttgtagttacagcagaagatcttttcaagtcttgattctttgcacagcatagttcactgtgctgtgcttggttcaccaggttacccacctctgctcccaggtgccacccacaataaaggacaagctcttgttgattccaaggactggctgttttccaatcattgcaaagtgccataggacccccttgctgctctgggaacagaggtgggtaacccggtgaaccaagcatattgcagtgagctatgctgcgcaaagaatcaagacttgaaaagatcttctgctataactacaaagtgaaaaacattccattcaatgggaactaatgcaaagaccttcattagtgctagaaaaattacttggccaggcacggtggctcacacctgtaaccccagcactttgggaggccaaggcgggtggatcacgaggtcaggagttcgagaccagcctgaccaacgtggtgaaaccccgtctgtactaaaaatacaaaaattagccaggcgtggttgtgggggcctataatcccagctactcaggaggctgaggcaggcgaatcgctggaacccaggaggcggaggctgcagtgagccaaggttgcaccactgtactccagcctgggcgacggaatgagactctgtctcaaaaaaaaaaaaaaaagaaaaagaaaaattacttatacaaggagagagatggatggacagagccggtttgatcaatttgagatgtgatgtctaagagtaggctcttgagttgagcagtcctgggttctaatcccagctctgccacacactagctgtgcggccttggccaagtcatttaggtggtctgagtccctgtctccttacctacagaatgggaatgatagctctgaagattgctaatgtttttctagagctttctgtgttccaagcactgtgctgagtcctctgtccaggatcttttataattctaaccagcctgggaagtaggcactcttatcatacacattttaaataggaacaatgacagctagaaaacacaagtgactttctcaaggtcacaccgacccggttatctgacgccaaagtcagtgtgccaaatggctacacagatggcctcaccagcattgcaaggctgctgagtattaaaaataagctacataaaacaactagcatatcatagagtcccatccgtattccttatccatccctgcttcatgtcacctgcaaatttagtgtgtgtgctttctatgtaatcctccaaacctttgataaaagtgatcaacacagcagagccccagggctctcatattctctcttagattctcaaacattaaagaaatggagtgggaaattaatctctgaataattagttaagtgcaattcagagcataatggtccctgatgcagagaggggctccatatttgaaatatatttctcactacttattttggtcctatgggaagggatgatttaagtagcattgtatgagaaggcctaataatctactggaaatttctttcagcaacaaactatgaaagaccagcttacagaatttactccaaaagccatagtacataagtagtaaggaaacttgcaaatgttttgatactaagtggaaccaaaagtcccaaaatcagcccccacccccaccaatccagaggaggcacctgactctaagctacgggtctaaaagtgactagcaagagaatattccaaacaaggttagaactggagtgtagaattaaaatcagttatgaattagcacaaaaaggacccagtcacacctccgtgtttatctcttaaaaagtatgttctgtattttcaagcttaaagtgctttaaaagcactacctattttcaagcttaataccgtttccagcttcataaggcttataaaaaaaaaaaagaagaagaaaaaggataattgagtggaaaagcatgactctcctgtttttctcccgcctgaggctgaagttgggctgtctggcccaaaaggccacaaccaagatatcactaatccccctgtgagagaccactaattgcagacaaagtgcttatgaggaagtaggcagccttttgagggtgatccttgaaaatctaaagagaaaagtgaccgcagtcaccatcacagcctggaaataaattttctaatgcacgtacaacaattagcaaacgacacagaagagacaacataatggatcgctaatgtgtggggtgtagacactaagttctagaagtcaggagcaagaggggaatgcaggacttgagatgaacctcttaagggagggtgggctttagaaaggcaggagagaggagggaggtccagaaagaaagaacagcagaagtcaaggtcagcaccgggatgtctgggagaatggcagacattacagtggagagttcttgatggggagaatgcttcagtctcatcccccgtcaagtaaaatttcttctctccagccttcccagtctcaacagaggacatcaacatttggcttcagccaaaacttccagtgtcatcctcactcctctctctccctcgcctgggtcatgcagtctcttagcagatgcccttggccttgtctttcaactacatctcagacccaccactttgagcaaagccataggcatctctggtcggagtgactggaatagccacccaacttgtctcttggtttctaagcttgtgtctaaaaacatcattttccgaagagcagacggaagaatytttcctttttttctttcctttattttatgtatttatttatttgaggttaaaagtggaagtttaataggtgaaagaaagggccgggtgcagtggctcacagctgtaatcccagcactttgggaggccgaggcaggcggatcatgaggtcaggagtttgagaccagtctggccagcatggtgaaaccctgtctctactaaaaatacaaaaattaggtgagtgtggtggtaggtgcctgtaatctcagctactcaggaagctgaggcaggagaatcacttgaacctgggaggtggaggttgcagtgagccaaaattgcaccactgccctccagcctgggcaatagagtgagactccatctcaaaaaaagaaaagaaaagaaaagaaaagaaacaatagctctctgctgcacagaggggtccwggagaaatgggttgccagatccacggtgaaatgcaggggggtttatagatgcctggtgaggaggcagtgtttgatttacataggacgcaaaatattggttggaccaggcgtcccatttgcatagggcgcgaaaaactggttaggactaggtgtcctacttgtatagggtgtgaatttctggccacccccaccctaatcttttactatgcaagtgggtcctcagacagaggaatcttttaaaaccataaattgaagcctgtcactccccagcttcacagcccctgatggtctcctgctggactttaggaaacctccaaactccttgccatgacaggtcatcatgaggctcttgtgatctggccactaccaccctccaaacaaacactccagccttctttcccttccttgaacatgccaccttttctctgcctctgggcctttgcacgtgctcttccccatccctggaatgctgtgcctgcaggtctttgcacgtctctgcttaagtgtcaaatcgccagagaagtctccctgaccgtcctgtctgacatagcctgctcccctcaacccatcaccacccactcgtccacatcaccaaccccacctgagatcctttaagtgacttctcaatgagaatagggcactttgctgtccttcccctctctcaccagtgcctagaacagtgcctgacacatgatgtacaggtgtggaatgaatgaaccttgttaccttgagcagttcacaggtgacaatatttactcttttcactgaagaatgcacattttctgtttttttttttccatttaatgctggacattagcaaattattctttcatctgcaaacctatcattgagccaccgccaagcatgtgtgtatatgtgatgcttctggatgtggctagacataagtcacacagaggggacactcrgggggagaagggaatagggcccaaatggctgctgctgttccattgcctcttccccttctccctgtacttctcatatggcccatatgtgtcccaagcttgaagaaaaaataaaaaataggccaggcgtggtggctcacacctgtaatcctagcactttgggaggttgaggcggtggatcatctgaaatcaggaatttgagaccagcctggccatcatggttaaaccctgtctctgctaaaagtacaaaaactagccgggcatggtggcgggctactgtaatcccagctactcgggaggctgaggcaggagaatctcttgaacccaggaggtggactgcattccagcctgggcaacagagagagactccatctcaaaaaaaaataaaaataataatgaaatgctaaaaattctctacttacaaagctcagcagaactgagatttaagacaattggtttctgagccagtgctatcgcccagagggtcggcttcccagcaaagcatcaaagaccagtccaccaaggtgccctggggccccacagccattctgccagggttctcagcaagcggcatgcagagtcagtccccttggttaaactcccagcagggccagagcctgggcccaccttgcattctagcccacctgccagccacgttcccatgcctgctccttgtctgcacggccaccctctgcctcgttcaagaggactttgggggaggtggctgtgctcgtgagctagctcagcaagtttgggtcctctgcatttctattttgtacaaatcgtgatgatctgggaagaaagcgggaattgatttgcgggcctttcaaaggcttcctttgggtagacttaggaggctcccaaattagaaaccccacagcgccccctgctggccccggcttctgcgagttccttcttgcagctctctggaggtgttgtctttttgctccccaggaaccaaagactggtgtgagctctgagaaggctcagtcgtgcaagttcccagacagggcaagrtctgcccatggagggccagtgggactccagactctaatactgccattcacaattatggtcgctaagttccccactatgctaagggcggggatgccttgcttcaagaaaatacttgacaccctttcctcccccaaaataatgtgcccgctcaactctttttaataatggtggctatttgtagcacaaaaggttctcggttgagccaaaaagtcctttaaatagcgagtcccattgggctattcaagtgttgatttacataccatagagaatatagaaacttcatgttgaatatcaagcgtctctagccactgaaaattaattggcaatgaagaaaaagcagatctgaaaaagcaatcgtagctcaaagggtgcaaaggatttgatttctcaaagtgtaatcgatcctcgagtttgcaggtgttgggtgaaatgcagtatatctgtactgaaatacagatatggggtttgtttgttttttgggttggggtgggaggatgtagtttcgctctgttgcccaggctggaatgcagtggtgcagtttctgctcattgcaacctccacctcctgggttcaagcgattctcccgcctcagcctcccaagtagctgggattacaggcacatgccacaatgcccagctaatttttgtgtttttagtagagacggggttttgtcatgttggccaggctggtctcaaactcctgacctcaggtgatctgtgtacctccacctcccaaagtgctgggattacaggcgtgagccaccgtgcccagcctgtactgaaactttttaaaggaccagaataatcacattctgagagtttattattgaaagctgttggattagcacaggcctcttgaacttgaaacacaaaaatcaatgcagaaaggttataacccggtggcatcaatgagtttccttctgtgttttctttttagmtctctcaattttgtwatattgatgaatttatgcataggaggaacccaagcttaaagccaagtcttttttcctttaccataacaatacgaggaaccctggttgccaaagggggtggggcttggaattcctaggagatatagaatttcacagattggggatgccacagcctgtggtcccagtgaagtgctagacactgagagaacccctattagtactgagaatggggtgctagaatccaaaagaagggagttaagaaggagagaatgaggagttatgcccaatactgcttccagatccagatgaaccctaggaaccagccactggatttgcagtgaggagttcactggtgaccttgataaaagcctcagtgtagaatgatggctgakcattgtggcccttacttgtaatcctagcactttggaaggccgaggtgggaagattgcttcagctcacaagtttgagaccagcctgggccacatagggaaattccatctgtacaaaaaattccaaaattacccaggcatgacggtgcctgcctatagtcccagctacttgggaggctgaggtgggaggatcmttgagcttgggagatagaggctgcagtgagccgtgatcgcaccactgcactccagccagggtgacagagcaaaaccctatctcaccataataataataataataataatagaatgatgggggcataggcttggttagcacgggccccaacaagaatggaaggaggagaattgcagccaacaaggacagacagaagagcaaaaaaaggaggaagtagctgctggcccttgtcctatgattcctctgcaatttcctgcagtcggtcaactatcttcgtgcgtctscacaccaacgggagccaggagctgcagtaccagcctggggaccacctgggtgtcttccctggcaaccacgaggacctcgtgaatgccctgatcgagcggctggaggacgcgccgcctgtcaaccagatggtgaaagtggaactgctggaggagcggaacacggctttaggtaacattcccggggacccttccctgctctrgggagctgcagaggcagtgggtgtctcgggaagaagataccttttcttcccaatcaccagtccaggcaggagagtgggtgtctgttgctaacagcctatgagactraagatatccccctttctcatgactgatcaaccttggcccaaccagctgagcaaataaatgcacatagtgccaggccattgatggctcaccattgaaaraagggggctgctaccttccttcattgactagacacggactttagcagtagccattcttttcactttccatcctcaccactagccctcaggaaaatctctagtaccccattgtccaccaagtaaataacagctgaagtctgatcctgcctcctcttagaatcaaaaggtactataggaagctcgatggccaactagggattgagcccacgttttttacctcattaggtcaagttctcgcctgcttaagtgtccatccttgacattcatattgaagaactttcaaaggcaaatgggtctcagtgcttcatccaggagcacaggtgggctcaggagtcaggtacaaggaactgcagtgagcttacctggcagaccaatacaggactgtcacttttacaaaagagctaggatgtaaagtcaagatagaatgtgaagtagcatgtagtcaaagccctgctgaaaacctctcaggaaggcactactttagagagacataccctctttttttttttttttttttttttgagacagacttttgctcttgttgcccaggctggagtgcagtggcgcaatcttggctcaccacaacctccacctcccaggttcaagcgattctcctgccttagcctcctgagtagctgggattacaggcgcgtgccaccacacccagctaattttttgtatttttagtagagacagggtttcatcatgttggccaggctggtctcaaactcctgatctcaggtaatccacccgccttggcctcccaaagtgctgggattacaggcatgagccaccgcacccggctgagacataccctctcttaataaatcctgactgagtgaggtggctgacgcctgtaatcccaatactttgggaggctgaagcgggcagattacttgagcccaggagttcgagaccagcctgggcaacatggcaaaactgcatctctacaaaaaaaatacaaaaattagccaggcatcaggccgggcatggttgctcactcctgtaatcccagcactttgggaggctgaggcaggtggatcacctgaggtcaggagtttgagagcagcctggccaacatggtgaaatgccatctctactaaaaatacaaaaaattagccaggcatggtggcacatgcctgtaatcccagctactcaggaggctgaggcaggagaatcgcttgaacccaggaggcagaggttgcagtgagccaagatcacaccatcacaccattgcactccagcctgggcagcaaaagcgaaactccatctcaaaaaaaaaaaaaaaaaaaaaagtagtgaggcatgatggcacacgtctgtagtcccagctactcaggagcatgaggtgggaggattacttgagcccgggagttcaaggctacagtgagttgtgatcgcaccactgcactcgcctgggcaacagagtgagaccctgtctcaaaaaaataaataaataaaataaaaataaaaataaatccaacccagacagtacttcctctgtgttgaaatagagctttttatttgggattgaacccctgatggagaagaggcttatatttagggacgtattggatgaagagtgtatagagggggtacaatatagtagttagaacaacgtctgaagccacactgcctgacttcacgcttatgagctgtgtgatctcgggcaaatttcttaacctctccatgcttctatttttctcagcagggagaagaataacactgtcttggattgttgtgatgattaaatgagctaatataaaatactaataatagtactcggcatatagaatgtgttagtgtttataatgacaacactaacatcccattcagggggtgagaggctgataccatgcaaagacacatggggccgaaataggcttatctctgtcacgcacagctgggggctcattgtatagaatgccagtggactgtcatgctattttagtatttttctcctctcttcatgtatttttcttaatttttggattcatttgcctaatttgggatttgcttcttgcacacatgaaatcccctggattctgggcatggaaggtggagagctagaaggttgcttggctctggagccaccctcctctcctggccccatcctctgctccaggagcagacctgaacccccgacttggactcaagccctcccacacccacctgtcacctgccttgtacctccacaggtgtcatcagtaactggacagaygagctccgcctcccgccctgcaccatcttccaggccttcaagtactacctggacatcaccacgccaccaacgcctctgcagctgcagcagtttgcctccctagctaccagcgagaaggagaagcagcgtctgctggtcctcagcaaggtgggtccccaggcttcgcacaaccctagggggcgcatttcacctcctcgtcattaaagagttgaaaactgttattaccaggcttccagcagatggaagtcttgagccaagggggccattatttgctgtagattgccatattggctggtccaacgtggctggtcttccaccagttctaaggcctggcagagcaagagtgactcccttgaatcaacagttccctggctacaacagaaattgctattctaactctttctgtcttcttctggaaccttgagcttccattagtgccatcttagcccatgcttaggagaaaaagaaacaggatctcaccatgccttggtttaaagataaggttttttcttgttttttgtttttttaatttttatttttatgggtacttggttggtaggtatatatattatggggtacatgtgatgttttgatacaggcatacaatgtgtaataatcacatcagggcaaatggggtattcatcccctcaagcattcatcatttctttgtgttgggaacattccaattccactcttttagttatttttaaatatacaataaattgttgttgactatagtcaccttgtctagatctaggaaatactagatcttattctttttttttttctctgagacagagtctcactctctagcccaggctggagtgccgtggcgcaatctcggttcactgcaacctccatttccccgggctcaaaggattctcgtgcctcagcctcccgagcagctggaattacaggtgccttccaccatggccagctaatttttgtagtttttttctttagtagagatggagtttcaccatcaaaccccgatctcaggtgatccacccacctcggcctcccaaaagtgctgggattacaggcatgagccactgcacccggcctagatcttattcattctatgtgactgtatttttgtacccatgaaccatctccactttcccccactcctccccactacccttccctgcatcttgtagccctccttctactctccatcttcatgactttatttgcttctagtttttagctcccacaaatgaatgagaacgtgcaaaatttgtcttactgtgcctggcttccttcacttaacatgatgtcctccagttccatccatgtggctgcaaatgatgagcttttgccaatgcagaggagctgcaggggggactattagagatcagaggtctctgattgtaaaatgaaccaaaygtagcctctaccaccttgcttagaaaccctgggatcacctgccccagcccactgcaaagccttgctcaataaaaattctacccaggagaaccacccatgctgctcccaatgggggctccttcccagtgagcaagcccccagcacaggatggcttagctttcttctgccgtccaggagaggggattgaatggtgggcagcaaggaagaggctaattagcgagtgcatagtatttagaaatatgaaaataaatagcagaaggaacacttaaagggctgtaagtagttacctccaaggacttggaagcagatggcagaggtagaacaggagaccattatttttaatcataagctttacaaagttatttaactttttagactatctgcaagtataattttgatttaaaacttttaattaatgggggagggtggctaataggaagaaggatcatagattgtactgttggtaccttattagattgcactgtttttatcttatttaaagcagaatttgggcacagtggctcatgcctgtaatcccagcactctgggaggcagagttgggaagattgcttgaggccaggagtttggaaccaacccgggcaacatagaccccatctctacaaaaaaattaaattagctgggcgtcatggcacatgcctgtagacccagctcctcaggaggctaaggtgggaggatcacttgagcccaggagttcgaggctgtggtgaatcacgatcttgcaactgtactccagcctggatgaaagagcaagaccccatctctataagtaaataaataaataaagcaagaccccatctctataaataaataggccgggcacagtggctcacgcctgtgatcccagcactttgggaggccaaggcaggcggatcacctgaggtcaggcgttcgggcccagcctagccaacatggtgaaaccccgtctctactaaaaatgcaaaaattagcttggtgtggtggtgggcacctgtaattccagctactcgggaggctgaggtaggagaatcgcttgaacccaggagacggaggttgcagtgagccgagatcatgccactgcactccagcctgggtgacagagcgagaatctgtctccagatagatagatagatagatagatagatagatagatagatagaagaatttgatataacccatatgtattagttcatttcttccaaaaagtgcagacttcaagacaggattaaatgagaaaggatttttattaggggaaacacctgtgtgacagaaaatggaaagggatcagataaggctgggagaaccatcagacctcaaaacaaatctaaccccaaccaaaggaaaaggaagaaaggttggatgggaacattctagatagcagtgcagtttaaggaaggcccagcaaggtccttgagtagccctggagactcctgtgcttggtcattggcagggagcagcctgtgggaagccaggcctggcaccaacagggtgatggatgtcagtttcaggtgatgtcagtttcaaagagttgagaggccagggctcttggtccatgttgctcctgcaactgcaggccagtcaggctggaggtctgagaagcacaatgtcaaggatgccatcgcctattaatagggccagaacaggccggtcgcagtggctcatgcctataatcccagcactttgggaggccgaggtgggtggatcacgaagtcaggagattgagaccatcctggctaacacggtgaaaccctgtctctactaaaaatacaaacaattagcygggcgtggtggcgggcaccggtagtcccagctactcgggaggctgaggcaggagaatggcgtgaaccccgggaggcggagcttacagtgagccaagatcgtgccgttgcactccagcctgggcagcagagtgagactccatctcaaaaaaaataaatttaaaaaagtttaaaaatagataaataaataaggccaggacagtctttaggaacatggtgaaaatctttgttacacagtgcactcgcaccctggtctcagaaactgagccttctgttccagcaatcagagactgcctagggcgtcttctgagattaaggaaaaataactccagagctccagagagttcctctgttgcctggttacagctgggctttgctgtcaacacgtccccaaacatggtcctccacacaccccaacctgatttttctggggctgtcactcaccatcatgaacatgacccaagctctccaaagatgcatctccagactctgcaaccaacaaatcacaggtctccactgaatgcctgccactccctgcatgagtcatgactcccttccatagtgcgtctctcttgacttcaggagtgtgtagtgactaggaacacagattctgaggacacactgtctagagcaaggatcagtttcacccagcatcaccacctagtagccatgggacctctataaccctcagtttcctcatctataaaatggggaaacagtaatacctatttcataaggtcctcatgagaatcaaaacttagcacagaataattgcgattcaagtgttaactattattgctccctttttcttttctttctttcttgcttttttcttctctctctttttctttctttccttctccttccttccttctttgttcctttctttctctctctctctttctttctatctgtcaacagggtctcactctgtcacccaggctggagtgcagtggcatgatcatagctcatggcagcctcaagcacctgaactcaagcagtcctcccacctcatcctcccaagaaactggggtactgcagacatccaccaccacatccagctaatttttcttaattttttgtagagacagggtcttactatgtttcccaggctggccttgaactcctagcctcaagtgatcctctctccycggccccccaaagcactgcaattacaagcatgagccactgcacctgccaactgtkacttttattttgccttcttcctggaccccctcaggtcctcatgggaagtatgtggcagctgggttcaagcttgtctctgtccatctccttggcacagggtttgcaggagtacgaggaatggaaatggggcaagaaccccaccatcgtggaggtgctggaggagttcccatctatccagatgccggccaccctgctcctgacccagctgtccctrctgcagccccgctactattccatcagctcctccccagacatgtaccctgatgaagtgcacctcacygtggccatcgtttcctaccgcactcgaggtgggcggaggcactgggagagcctcctcagctgcattttcccccaaggggcctctggagggttccctaaaccaccgtctgcaggctaaatcccaaatccctgggaagaaactcatccccaagaccagaaagctgggggaagaagcagcaggtgaactgtcccctggtgcagagccaagcctgagcagaattaggaaagaggcaagatgtgtatttacagtggcgccccctaatatccccaaagcagcaactagaacaagccaccactactcactccctgggagagcgctctgctgtatcatgcccagctggttgtaagtcagataacccaagctctgccctgtatttttcctcctagataaagcaattaaaatgcacagtgcccgtcccaggagcccagcaagccaccaraagcacccttcaatagggaaggattcgaatccracccacccctacccaatagaaccctgggtggttgcacaggcacgaagtcaccccagctataccatttcctcttgcccttcagaggaagggatcctggggaggaattccaaaggataaacttggcactgggcctgtgggtattttgcactggagggaggaggggaggccgtgctcgggagcagtgggtggccctgactgccttggttattctactagatggagaaggaccaattcaccacggcgtatgctcctcctggctcaaccggatacaggctgacgaactggtcccctgtttcgtgagagggtgagtaataagtggagaaaaatgagcaatcatctcaaatctgcatattgacgtcacaagttggggtaggtggaccagtctgaagggttctagagagatggctgggtgacacacgatggagaccaatgtcctgcgtctctcttagttgttaaggaaacaagatcagagcagcacagcaagctaggcaagtcctctggtcaatgtcaagtcaatgcaacacacatttcatttgggcgtgtactgggctaggtgctggagctatcggggaaaaccatgcaaatacagtctccaccttcatggaccgtatgggctagtggaaattctagccaaattctactgctcgctcccaatcagtcccagtttcctagagatggaaaaaatccaatcacccccattcattggagcttttcctcccaaattcagctgtaaaggctatagctgatcttagaccagttatagttaacctgttttgtcgatcaataacttctctacctgaacagtgactttggccaatcatttttctcaaccattgaggttagaatgttcacgatatgatccacatgccattgataatgatccaaatctcattggcatcagagtcctctggggtgtttcaaacatagagtcctgagcccagatgtactgtatggcccaggaatctgcaccttgaacatccccaggtgattcttttacacactgaagtctgtgactccttgatttaaagatttcacggttggttaaaccagtggctctgggctgggcgcagtggctcacgcctgtaatcccaacacttttggaggccaaggaaggcagatcacttgaggtcaggagttcgagaccagcctggccaacatggcgaaaccccatctctactaaaatacaaaaaaaaagtagccgagggtggtggcgggtgcctgtaatcccagctacttgggaggccgagacaggagaattgcttgaacctgggaagtggagtgcagtgagccaagatcacactactgcactccagcctgggtgacagagtgagacttcgtctcaaaaaaaaagaaagaaaaaaaaatggtggctctcaaaccagggtgatttttgcagcaccccaccccacccctgccacccagggacatttgacaatgtctggagacattatgagttgtcacaactcacatgtactcctggcatctagtgggtggaagccggggatgttgctcaataccctaccatgcataggacagtgccaygacaaaggagtgttcaccccaagtgaccagggtgccagcgtagagataccctgggttgaatttgctgagctcagcagtgagaagaattggggaatggagaaatagccagaacttgaggaccccccatttttggaattcccctaatcgatgagactcccaccctggaaaggggcacctggccccggctgaagagccttaagtctcattgtatgtctaccgaagatggccacctggtctacctaagattcaattgttcttgattggatttgagctctgcaagacttctgaccccctcttccttgcccagagcacccagcttccacctgccccggaacccccaagtcccctgcatcctcgttggaccaggcaccggcattgcccctttccgaagcttctggcaacagcggcaatttgatatccaacacaaaggtgggttacagtccagtggccacttggttcccacccccggacctggggaggtccagctgtgtctcagcagccctagagaacagtgaaggtgtctctccacggcatcacygcctcagaaaagctggggcgtgtagcaccagcctgacctacaggtgaagttcatggtgtaatccaaacagcctgtcccaggggcctgaaattccaggcccasaggacatttctttgactgttaagatgtgatctcttcaaaaaaaatccagtagcctggaaaagataggcattagtccttatcaaatggctatgcttatgtaattattgcaaagactgttattcaagagcaagtgctatgtgaaagacacagcagatcagctttgggaggagagagagagaaagaaacccaaattgtggcatgcgttaaacaaggatttattggccgggcgcggtggctcacgcctgtaatcccagcactttgggagacccaggccagcggatcacgaggtcaggagatcgagaccatcctggctagcacggtgaaaccctgtctttactaaaaaatacaaaatttagcccggcgtggtggcgggcacatgtagtcccagctgcttgggaggctgtggtgagagaatggcgtgaacccgggaggcggagcttgcagtgagccgagatcgtgccaccgcactccagcctgggtgacagagtgagactccgtctgagaaaaaaaataaaatataaaataaaataaaacaaggatttattgagcacctaatgagtgccaaacactattggaggcgttggggcatagcagtgaacaagacagaaaagcaactaaaatagaaatgaaaacctttccattgatttgagggatgattataaaaacaaatcaatcagtcagtaaaaacttgcccccatgaaactgtcattctagcggaatagctaacatttataaagtacttgccaggtatcaggcagagttgtaatgtttcacattcatttctcacaacagtcctgttacttccattttgcaaatagggaagcagaggcttagaaagttgagtacatcgtggctgggtgcggtggctcacgcctgtaatcccagcactttggaaggctgaggcaggtggatcacttgaggtcaggagttcgagaccagcctgtccaacatggtgaaaccctgtctctactaaaaatacaaaattagccaggcatggtggcacacatctgtaatccaagttacttgggaggctgagacaggagaatcacttgaacccgggaggcagaggttgcagtgagccgagatagtgccattgcactccaccttgggcaacaagagtgaaactctgcaggtttcactctgcaggttgcagtgagccaagatcacaccactgcactccagcctgggcaacatagtgagactccatcttaaaataataataataataaaataaataaataaaaaggccaggcacagtggctcacgcttataatcctaacactttgggaggccaaggcgggcagatcacaaggtcaggagttcgagaccagcctggccaacacagtgaaaccccatctctactaaaaatacaaaaattagccaggcgcggttgcaggcacctgtaatcccagctacttgggaggctaaggcaggagaatggattgaacccgggaggtggaggttgcagtgagccgaggtcgtgccacgcactccagcctgggtgacagagctagactccatctcaaaaaaaaaaaaaaagttgagtaagttgttcatcacagagctgagatttcaaccaggccgtctagctccagaggcttgggtcttaggcccagagtctgggcatcaggtgggggctcctaagtagtcaaggagcagaaggaaggattgagacctgggagggagatccactaaaatctgaacacacttcacctccttcctcagtgcgtgcatatrtatgtgtgtgtatgtgtgtgcatgtgcgtgcatgtgagcacctgtstacatgtgtgtgcacgcatacatctgcctgtcctagtgtttgtgagcctctatccgcatggcacacgctaaggtctcagtaccccatccctggcacctcagccaccctgcacatcaggcagagagccatcggtgacrtaaggtcttcctggtccccaggaatgaacccctgccccatggtcctggtcttcgggtgccggcaatccaagatagatcatatctacagggaagagaccctgcaggccaagaacaagggggtcttcagagagctgtacacggcttactcccgggagccagacaaaccaaaggtaacccccagcagcccaccccctagcccagcccaacacacatgcacacttgsacatcctactctcagaaacccctcaccctcactcttaagcttcctgattttccctctatgaagttgctctgtacttcagaaagcatgggtagggaaaatatctatgtaaaatatttaacaggccgagcgcctgtaatcccaacactttgggaggccaaggcaggtggatcacttgaggtcaggagttggagaccagcctggccaacatggtgaaaccctgtctactaaaaatgcaaaaattagccaggcatggtggtgcacacctgtagtcccagctacttggcaggctgaggcaggagaatcacttgaacccaggaggcagagattgcagtgagctgagatcgcgccactgccctccagcctgggtgacaaagtgagactccatctcaaaaatatatatgtgatgaaataaaatatttaacagcctatattataagattcaacttatatgtaatatccagaataggcaaatccatagagacagagtagattagtggttgccaggggctgagggaggggagaatggggagtaactgcaaatgggcatggggtttccatctgacgtaaagaaaaaagttctggaaccagatagtgatgatcccgtaacactgagaagggtacttaatgccactgagtcatacactttaaagtggttacgacggtaaatgttacatgacgtttttaccataatgaaaaatgtggggccaggcaccgtgactcacgcctgtaatcccagcactttgggaggctgaggtgggaggatcacttgagtctggaagttcaagaccagcctgggcaacatactgagaccctgtccttacaaaaaaaaaaaaaaaaaaaaaatttaagttagctgggcgtggtggcgtatgactgtggtcccagctccttgggaggctgaggcaggagggcagcttgaggtgggagggtagcctgggaggtcaaggcttcagtgagctgtgatcatgccactgcactccaccctgggcaacagaccaagactctgtctctaaacaataaataattagaaataaaaattaaaaatatttaaaaacagaaattaaaaaaaacaaatttaggccgggtgtggtggttcacacctgtaatcccagcactttgggaggccaaggtgggcagatcatttgaggtcaggagttcgagaccaacctggccaacatggtgaaagcccatctctaataaaaatataaaaattagctgggcgcggtggcacattcttgtagtcccagcactttgggaggccgaggtgggtggatcacttgaggccaggagtttgagaccagcctgaccaacatggtaaaaccccatctctactaaaaaaaaaagccaggtgtggtgatgcatgcctgtagtcccagctattcaagaggctgagaggcaggaggaaggcttgaacctgggaggcggaggttgtagtgagctgagatcatgccactgcactccagcctgggcaacgagcaagactctgtctcaaaaataaataaataaataaataaataaataaataaataaaaataaatttaacagcccataagaggcaatactagtcagaatggacacgggccacagaactaaagctccatgggatcttggggaggtctgggggtcccagggaaggagtcaggacatcgtggcaggttgggggggcactcagagagtccgggcagtgtctgactactagggtgggagtatctcagtcttaagagtcgctacagccataccagcatgttccagctaaatatcagcttcagagtgggagtttcctggacaagttaaagacatcctgaacaaatgagctccctggagctgtactggacacgccttgtgcccacctcacacctccttagcccaccttttccttctgctatcgctacagcagccggctttgcagaggtggaagctggcagcccctcacctsacccccatctcttgctatcggcccagggcttccctggcactgtracatagggtgcctgcaataaccagctgcacacctggaaatgtgcaggtgttaacacccggtgaccattggccaccaggagagagaagtgggtagtgaatgctccccgtctttcccctctccaggggatgattctgggaaacagtctatccagctccctggagggtccttagcagagctgagctccagttatccaaagagggtagcagtgcattcccgcaccctccaattgactttcccgccttctctatctcactcttcccagtccctcactcttgttccctgggatcagctcacaaaagatcctacctgcccacaagcccctgagtcaggctctgcttcctgggcagacatgggctatggcaggcacgttgcacagcccagccccttctcactgctctctgctccttgcagaagtacgtgcaggacatcctgcaggagcagctggcggagtctgtgtaccgagccctgaaggagcaagggggccacatatacgtmtgtggggacgtcaccatggctgctgatgtcctcaaagccatccagcgcatcatgacccagcaggggaagctctcggcagaggacgccggcgtattcatcagccggatgagggtgagtgacaggctgacttcccagrtcccttttcctacatccactctcctatcccccctttttcatccaacctgtcttgatgattaggggagccacgatgatatccctgctcccattcgttgcacttaccactgagggtagaggatatagatggtcccaaacaatgacagagaaagtagaaggatggctgggcatgcaggcaggtgtagcaaatatgactggaggctgtgtgtgaaaataacgagtgagtggacctctggtagctagacagaaaccattctaacctaacttctcctgccccagaagctgcagcactgccccatgtagttgtgcaggttgggcactgcacaaagagatcygaggagaactgtggagccctctatatactcagtctctttagtgtgaccctctagacacacttttaaagattccccaggattttgcagaagagagtttaaaactcaccccggctgggctcggtggctcacgcctataattccagcactttgagaggccaaggtgggaggatcacctraggtcaggagttcaagaccagcctgactaacatagtgaaaccctgtctcttctaaaaatacaaaaattagctggctatggtggcgggcacctgtagccccagctacttgggaggctgaggaaggagaattgcttgaacctgggaggtggagtttgcagtgagccaagatcgtgtcattgcactccagcctgggcgacgagagtgaggctccatctcaaaaacaaaaacaaaaaaaacaaaacaaaacaaaacaaaaaatggctgggtgcagtggctcacgcctgtaatctcaacattttgggaggccaaggcaggtgtatcacgaggtcaagagatcgagaccatcctggccaaccaacatggtgaaaccccgtctctactaaaaatacaaaaattagctgggcgtagtggcgcatgcctgtagtcccagctgctcaggaggctgaggcaggagaatcacttgaacccgggaggtggaggttgcagtgagccgagatcacgccactgcactccagcctgggtgacagagcgagactctgtctcaaaaaaaaaaaaaaaacaactaaccccaactgaaaatgaacccactctacagatggggaggctggaacctagtgcacgattatgcctgccttgccagacgcacactcccaaccactgcccttcttcagcattgagatgcattttctctttgtttgatcctcttgccctttgagaatattgactgcccgccacaggagctcccatagcttggtaaattctcagatgtcacaagtcagtcgtcgtttgggctgtttcttgagactccgggggaggttcttctctttgcttgcttctttctgggcaatgttgagcaaagatgctcatcttcagaaaaactcacgcatgcccacggagtctccactgtgggtagctgtggggagttccctgagtgctatgcggccacttgttccttcctcccctttcttctggtctcatgggctatttcacactaaacccagttttgcccagacctgaacttgcaagagcacgttggagggaggaaagagggaatggtgaggtttccatttgacctcatcgctccttttcacctgagaatccaccaagcagcagcggtgtttccagatggcaacctaaatgttctttgccaactgggctatgtcccagagaacagttgccccacgtcccagagaacagttttgctgagcagagtcttcgagatcaaaggtacctcggggacactggcttcagcctcatctctttgggaaccatcttccttagggatattccattccaggtgtcaggcaagtctgcccctgctccaagcctttatctggcatttgagagctgttttctggctgtttctgtcttctaggatgacaaccgataccatgaggatatttttggagtcaccctgcgaacgtacgaagtgaccaaccgccttagatctgagtccattgccttcattgaagagagcaaaaaagacaccgatgagtaagctggctccatccctgggtgaggggcrggaagagccctctcttctaggtcccactgggcaggaatgtctggctttcccacggcagggtccccaaaacagcagcatcagcaccatctgggaacgtgttcaaaatgcaaattcccagaccaccccagacctgctggatctgaaactcaggagttaggatgcagcagtttgccttttaactaattctccaggggaaccctgaggccctgtccagtgtgggaggaaatgcctgctttgggggccggcttctgtttggggcaccccctagtgtaatgatggctcctacctctgggaagttgcttttttttttttgacggagtcttgctctgtactccaggttggagtgcagtgacacagtctcagctcactgcatcctccacctcctaggctcaagcaattctcgtgcctcagcctcccaagtagctaggactacaggcgtgcaccaccacacccggctaagttttgtatttttagtagagacggggtttcgccatgttggccagactggtctcaaactcctgacctcaagtgatctgcccacctcagcctcccaaagtgctggaattataggtgtgagccaccgcacatggccggagttgtgacatttctaccagaagtatctgtcttgtttgttttttacctactggggtttagcatcagatttagggcaagggtttcttctacaaaastgtttgaacgctgctcatttaggaaagtggggagaagaatgggatcgcccctggagctaggtggaggtctggcgctcagtttttgtgtcctttccaccagctctctcatcccctaaatggctgggggctttttcatcaacacaaattataattcacatgattttgacaatttcactgaacctctagaaattgctggaaacaggctgaggcaccagaagactgtgcccgggtctcatgatttaaaccttacttgaattctatggcatggcaaccttgatcgtaatttcacttcccagtgctccccgccccagtccctgccacagaacccctggaaagcacccctggacgccctttactttaaattgggtggggactcagctgtctcttttttcaacaacacaaggcatacactcatttcttgaatttggcatcttctttgttttccccttacgatgacacagcagtctctaaaacatactgtcgtggccagtagactcatatcattgtctttaaggtcacaagtccctgggttgtcaaaagcctttaaggccaggtgtggtggctcacacctataatcccagcactttgggaagctgaggtgggtgaattgcttgagcccaggagttcaagatcagcctgggcaacgcaaggagaccctgtctctacaaataatttaaaaattagcagggcatggtgacacgcgcctgtggtcccagctacttgggaggctgaagcaagaggatggcctgatcccagggagatcgagactgcagtgagccatgatggcaccactgcaccccagcctaggcaacagagcaagaccctatctcaagagaaaaaaaaaggccgggcgcgatggctcacccctgtaatcccagcacttcgggaggctgaggcsggtggatcatgaggtcaggagatcaagaccatcctggctaacacggtgaaaccccatctctactaaaaatacaaaaaattagccgagcgtcgtggcaggtgcctgtagtcccagctactcgggagcctgaggcaggagaatggcatgaacctgggaggtggagcttgcagtgagccaagatcccgccactgcactccagcctgggtgacagaacaagactccgtctcaaaaaaaaaaaaaaaatcccttttgacgggcccagtggctcacacctgtaatcccagcaccttggaaggcaaagatgggtggatcacttgagcctaggtgttcaagaccagcctgggcaacatggcaaaaccctgtctctactaaaaacacaaaagttagccaggtgtggtagcatgtgcctataatcccagctactcaggaggctgagacacaggaatcgcttgaacctaggaggcagaggttgcagccagccgagatcacgtcactgcacttcagcctgggcgacacagtgagactctcagtctcaaaaaaaaaaaaaaaaaaaaaaaagtccttttaaatgtttctcttcctggccagttgtacttgtgagcattcattcattcattcattctttcaaaacaagcccctgctaggtgccaggtcctgtccaagacactaaggctacagaataaatgaaagagacgggccgggtgcagtggctcacgcctgcaatcccagcactttgggaggctgaggcgggcagatcacctgaggtcaggagtttgagaccagcctggccaacatggtgaaactccatctctactaaaaatacaaaaattagccgggcgtggtggcaggcacctgtaatcccagctacttgggaggctaaagcaggagaatcgcttgaaccctgctgggattgcagtgagctgggatcgtgccactgcactccagcctgggtgacagagcgaaactccgtctcaaaaaaaaaaaaaaaagaaagagacaaagcccctgagcccagagcatgggtgattttctctggggcactcagaggaaacagcagccttgcccttggggcactaactgccccccaacttctctttccacagggttttcagctcctaactggaccctcttgcccagccggctgcaagttttgtaagcgcggacagacactgctgaacctttcctctgggaccccctgtggccctcgctctgcctcctgtccttgtcgctgtgccctggtttccctcctcgggcttctcgcccctcagtggtttcctcggccctcctgggtttactccttgagttttcctgctgcgatgcaatgcttttctaatctgcagtggctcttacaaaactctgttcccactccctctcttgccgacaagggcaactcaygggtgcatgaaaccactggaacatggccgtcgctgtgggggtttttttctctggggttcccctggaaaggctgcaggaactaggcacaagctctctgagccagtccctcagccactgaagtccccctttctccttttttatgatgacattttggttgtgcgtgcctgtgtgtgtgtgtgtgtgtgtgtgtgtgtgtgtgtgatgggccaggtctctgtccgtcctcttccctgcacaagtgtgtcgatcttagattgccactgctttcattgaagaccctcaatgccaagaaacgtgtccctggcccatattaatccctcgtgtgtccataattagggtccacgcccatgtacctgaaacatttggaagccccataattgttctagttaraaagggttcagggcatggggagaggagtgggaaattgattaaaggggctgtctcccaatgaaagaggcattcccagaatttgctgcatttagattttgataccagtgagcagagccctcatgtgacatgaacccatccaatggattgtgcaaatcccctccccaaacccacccataccagctagaatcacttgactttgccacatccattgactgaccccctcctccagcaatagcatccaaggggcctggaagttatgttgttcaaagaagcctggtggcaataaggatcttcccactttgccactggatgactttggatgggtcacttgtcctcagtttttcctagtcataatgtcatacgaacctaaagaatatgaatggattaaatgttaaagctttggtgcctggaaacaatatcaagtaacaatatgattattatttttttattcccccaaagcgggcttgctgcttcacccttggggatgaaataatggaagctggttaaagtggatgaggttggaaagagttgccataatgaggtcccacgtggcttcttcgataggagccacaacttggggtgggaagaacttgtccctcaggcttgttgccctctgcagttgatctccaaagttttaaacctgttaaattaattttgacaaataagttaccctcaactcagatcaaaaatgggcagccaagtcttcggtaggaattggagccggtgtaattcctccctaagaggcaacctgttgaatttactctctcagagtaaatggtgggaagggatccctttgtatacttttttaaatactacaaattagtgtcaggcagttcccagaaagagacaagaaatcctagtggcctcccagactgcagggtccccaaggatggaaagggaatgttctgctggttctaccctgtttgttgtgtcttgctatacagaaaaaccacatttcttttatatactgtacgtgggcatatcttgttgttcagtttgggtgtctgctaaagaggaagtgcactggccctctttgaaagggctttacagtgggggcaccaagaccccaaagggcccaggccaggagactgttaaagtgaaaaggcaatctatgactcaccttgctctgccatccctggcagcccccaccggtgtcctgttcctgccacatggagcttgacttcatgccagctataatctcccctgccttcctttaatcccaatttcccctgctcactcttccacagatataaagaacaaacacttagcatcccacactcaccccttctaatcctgaagggaagcccattctaaactcctttcctgcaaacccatttccagctcctagtagctttcctcccaaaggctttctttccaatcctttatagctttggagacgcctccccaattccccagggaaggaaactgttgtgtccaatccccattaaagacaaattgatcagtgcttcccactccaagtcaagctttatgcaggaatgcttttccatcagggaataaatacttagaagcgcttacaaggtgccaggcacctcctttctgcatgtgcctgcctttctagtagcagacagatggaaacattgtctcattttgtcaaggagtccaaagaaatgattataaaaccaggattcatccttcttctccagaaagatttttttttaagtaaacacctttcaatccccaacacaagctgcttcacaactccaggctagaaggcaggagagcgatctgatgtgtttctttcatttgccagaattcctgataccaaaagcctctctctctgttgagtaacctctcaaggaccagagtggagtccagattgttaggctcagatcaagggtggggaaatactgccctctcgtggtggcttttcatccaggcctcgtagccaaccgtttaagtgcaaaatagaattaagcaatgggtaagcaaaatagggttgacaagatatttgggggttattcgggttatggcccatttatttccctcttccccctgaattgaccagtagcagctccagccccatttcacaaaagtgagtttggccaggaggaatgagacgtctcctgaaataggaacaccggaacatcatgctcacctgccatcactatgcatccagttcccacagcttgtgtcgtgaaagagcagagagatgatgttaaactccttgggaggagagagggcttcttttggtttccctggagtgagacagccaggtgtctttcttttgcggggggacacttcagacccatcaatatggaattttgggagccgacctgagtgcaaatcctaattctgcccctgttggtgcagatggctgtgggcggctcacttgaccttttagagtctgcatacccacctgtataacaaggtggattgaatgagacaatgcccacgaaatgcccagttacagtacctggttcaaaacttactgcattttaatttttcacttaacttataacatgtcttgcttctccagtgtgtggaaggcaccgggcagtttgcagagataagcaaaacacagttcctctcgtgcagaaggttagaatcatttttttttttgacagagtcttgctctgtcacccaggctggcgtacagtggtacgatctcagctcactgcatcctctgcctcccccagttcaagtgattcttctgcctcggcctcctgagtaactgggactacaggcgcctaccaccacgcccagctaagttttgtatttttagtagagtcagggtttcaccatgttggccaggctggtcttgaattcctgacctcaaatgatccacgcacctcagcctcccaaagtgctggattacaggcatgagccaccacgcccagccaaaggttataatctgatggagagagacacccgtcttggaactgacataaatttctggggtttgagaaatgggcgggatttcactggtagcttctggaaggtaagagttgtccaggaattgggaagagtgagaggaaaggcacggacagggagcatgtaagataaattgaggctggctttggaaggctgaggagggtgagaaaaggtgggctgggaccagaccgtggggagaggtgagtggcattacaagaaatttaggctttattcagaaggcaacagggagtccctaagaatgtttttcaaaaagggacattaaggcgattggagttatacttggaaaagaaagttctggccacagtacagagcatggcccgttgagctgttgggggggttattgctgcaaccaaggcttgagtgagggaagaggcggatgtagtgataaagagactccaggaactgaatcagcgtacctggcaccccatccattgtagagggtgagaataaaggagaaattaaagcatcttgcaggctgggcgcggtagctcatgtctgtaatcccagcactttgggaggccgaggtgggtgtatcagttgaggtcaggagttggagaccagtcagccagttagtagaaaccctgactctactaagaaaatacaaaaattagctgggcatggtggcatgcgcctgtagtctcagctacctgggaggctgaggaaggaggatcgcttgagcccaggaggtggaggctgcagtgagccaagattgtaccactgcactccagcctgggtgacagagcaagactcttatctcaaaaaaaataaaataaaataaaataaaataaaacatcttgcccctagctgagagagaggtctctgaagagcaggctcagggaaaagatgagttttcagagctgatgtgatagtcagcttctctggagtcaacagggtgaatccttcccaagtccagccatgcccagatgcccggagggaaaactgacccccagccagtagacattggctaagaacacagaatcttctgaccaaacacgctttcagcagctgcctgctctggactttgaaagaggtcaggtcttgccctaagctcaaaacaagtgagaggtgtcctgacctagctcatagggcaaatggtcctaataggatgggcaatccagatgcctgagccccttcactccgacagcaccagcgcctaatgcagccttttcattcttgccattaggaaatctgtggacttctagcctgtgttttaaaccagccatgtttccttgtatatttccctacccgctgccccacatacccagcatgccgctgtggccaccatgtcctcaaagccttctgtctgtatcaggaatgtagtctgagactgccaggaagcaacaaggagagagaaacactaactagtcttcctttataacccattcatactctctggctgtccccaaccttcatagtctcctgcatccaaatgtcctctttggctcaaaaagtaggccaggcatggtggttcatgcctgtaatagcactttgggagactgaggtgggaggatcacttggggccaggagtttgagaccagcttgggcaacacagcgcaatctcgtctctactaaaaaaaaaaaaaaaaaaaaattagctgggcatgatggcatgctcctgtggtcccagctacttgggaggctgaggcaggaggatcacttggtcccaggagtttgaggcgacagtgagctaggatcgcaccactgcactccagcctgagtgacagagcaagaccctgtctctaaaaaaaattaaaatgaaagaccaggtgctgggattaaggaaacacaggtctgagggtctgagggaaggggcctgcctcccagggagtcaacatagatgttccccatgaacagggatttgactttggaggccaacctggcctggcctctgccctttatctcacactccctatccttggcccactgccagtccctgccttgtggcaaaggggccccaaaagaaaagctgcccttccccaaatgtaaggacccaggtacactttcacccgtggaaagcagtgtctgtcgagagtctgtttcctattaatacttatcaaagccatgtgcgagggaggtggtcagctgtcaatatgccttagtatgtttatatgagtttgttttgttctaaaatacccaaacagttctggtcaagcggggctatgcccgtctggcccaaaacacagtccgttattaacgagatggccctggcaggcgggaacaaatctgcctccatgcactgcttcctgtagtcttttagaaagtaactccaggacatcgaagtgcccagatttgactcctaagttctaggagactgtagcgcagggtctgtcaaccttagcactattggcatttggggctgggtaattctttcttgtgggggccgtcttgggtactgtaggaagctgagcagcattcctggcctccatccacaagatacctgtagcagtgtcctgccaacggtaacaatcaagtatgtcatcagacattgcccaatgtccccagggggcaacacccctctcttggacttcagggtcaagagaatctctgctggctaccccaggacttctcattatagatttcctggagcacgcagcagaaactttgcctagcccagtggttgtttccattatctgctgccaaagtgggatttgagggtgtccgggggagggggcatggggagggcagtatgctttcaaaaacccctcccaggccaggcgtggtggctcatgcctgtaatcacaggactttgggaggccgaggctggcagatcacttgaggctgggagttagagaccaacctggctaacatggcaaaacctcgtctctactaaaaatacaaaaatcagcccggcgtggtggcgggcatctgtaatcccatctactcgggaggctgaggcaggagaattacttgaacccaggaggcagaggctgcagtgagccgagatggcaccactgcactccagcttgttgacagaatgagaccctgtggaaaaaaaaaaaaaagccctcccatgccagaacagaggatggcagtctgtttcaataagacactgtgtccttggtgttggttctgattaagactcactgagatccagtgctcttgagctgggtctcagtcccctcccatgtcctgtgctctgccgccactgttttcattgttgtgttctcgttgtgattgttaagactcacactcctggctcagcagtggttttccagaaggcccaaagagcggtgccgggcaccccacgtcgcagtgtccgttccgggcttgggaagctggggaggtgggcagacctggtcgcatctcaccacacacacacacacacacacacacacacacgctgtcagaaactcggccgtcccccctacctctgagctctcaatgctgctaatctctgccaagtgtccctgtgctccagcaccttccttgaaggactgacgcccaccccacgctctttgcgaggttgtccaggctgtgtttgtcgcatgctcttcttctgtatagttctcatcttccaattttatgggattcaacaaaagcctattatgcttgtttgcattatggttacaatattaaaaagtggattcaacttggctggctgctgtcttctgttggatttgcttggagtttctcacactttggcctgctgtcctgggttgggtgccccagaagcctgctctgagatggagttggcaggaggctgacaagagagtgctcttggggaggagaggggagagaagggaaggggagaagagaggagaagggagtgaaggggaggagagaggaagagaagggaggggagagagtgagaggggagggtaagggaggagaggggaggggaggagagaagagggaagagaggaagggacaggggagagggaaaagaaagaccagggaaggagcgggagcgggaggggagggagggaaaagaggggaagaggagggagggtagaggagggagaagaaggagagaaaagaggaggaggagaaggagcagagaggagggaaagcaagaagagaggaaaagagggaggggagaagaaaactaagggaagaagagagaaggggaggggaaggaggaggcagaagtgaagggcagggggagaggaggggaggggaggaggcctctctggtcagaggcaaagctgagctgccataagtctcaacagaagcttcagccagccctgcagggcattctaaaggtgacctttcagaggtgtcccgatttgggactggaaggcaggattttagacccgtacatcttgagtcaggcaactctcaccagcagaagccacacccaaggggctgaaggctgagggtgctcccggcagccaggggactcgttcctgagtcccgatgcagatctgggtggcgtagctgagcgtcctctctgcccgcctccccaacacccccttttcctccagcacagctgcatccatagccagggccccagagaaacagtaagaccttcaccctcagccctcttccatttagggccctcctccctgaggaccctaaactctaattcctggctggtttcaggcccagttccaaaacaaagagacctcaaaagcag

SEQ ID NO: 95976 - DNA, 54574 bp, Homo sapiens
gagctcccagggcctgtctgtgtgtcccagtatcaggctcctgggttgagagagagatggggggtgggtggggagcaggtgaggagcggcaggccccctggaatccctccatggccaccccttggtctccgggacttgtgtgcggcaggtacgggctggagctgtggtgcagttcccagtttcaccaccagatggcactacgcccctgcagacgcagtgcccagagcaggccaagtggtttgggagctgcagctggagcatccagcaggggaagctctgggaggtcaggggcagtgctgggggagccacctccccacttggatccgaagttctcatggaggcctagggcaggggctgaccaggtagccagaagttcccttgctgagtctagggtgtctgtcccacatttcacatggagacgaatcatcccagacaccccggcactgtcccggggcagtttgccacccctcccaaggggcagggctcctgtcttggggtcttcccaagcatagtagccttcgggcagccccggcctggccccaggttgtcccacttgtcagtgggcagctggggctgggggaggggtcccagctcctgtccaaggtcatgactgcccctgaccagggtgtggcagccgctgtggcctgggtcagtgaggccgtggatggagggtggcccgggtgtaggcgctgctctcagctaagagagacctcatttggaggaagaaccaggaaccagagggatggccgggttcccagcgagcaggaggccagcttagggtcagcaggggcaccctgcagggactccaagaggcaaaccaaaccacatgaagagtcatctgagagggaatgacggaggctggggaggtggagcccccacctccaactgctgcctcggcccccacagcaggggagggtgggaggctggtcctggctctgccctgggagatgccacctgggccttggtctggggaggagggctggccgggaggctggatacggccactgctctggagtgaccacaccatttccaccctgcttgcctcattcttctcatgggggcctcaaggggacacaccagaggtttactggggacagggcaggggagggatctcagcgctggccttctggggccctgcgtccactctgcccctttctgacctgggctggggcctctgctctcctccgggcctggagacagagcccttttggaggccctcaggcccgacaagcctgttccttggagccaggctgtgggctgggtgtattctggtgggatgggggatctggggcatggggtgggagtggggctgggagtaggttgaggttggtgcctcaggctctgtggaatgggactgggatggctgcagaccctgggctttggggtctgagcccagccctgtccccaggcaggctgccccctgcagccctggattcccatgttggttggagttgcgatgagaggttctggggcctcctttgcttctgtccaggacacacagctgagaagtcacggtctgctgcctgactgtgggggtttcaagccccactggagcatccaggcaggcccttgggcggcagggcctcgtgggggcaggaggggaccctgggaagtcgggaaccaggccagggagggagagaaggcaggagcacagttgtgggtgtaggcacccaccccgtcccgaacgatgttcctcccggcccaccccactccagtcctctgggccggctgccagagggtgctgcttgaggccacttgcttcctcagaagaaggtctcaccttcagagccagcctttgagctcctggtgacctcagcctgttgcccttgaccctgagtttgcctagatcaagtgggaggccactctttgggcctcagttctcccgttcccagggagcaggtcctctgtcccctgacagcacccctcctcgctgtgcagccaccactgccaggtttctgactaggcagtgttccccagggggtggctctgggccctcaggcaaacagccacgctgggaggggcggtggtttgcacgtgaatagtgtcactcgggtcctttgcttgaagttggctctgctgagtgcagcctgcagacattttcaggaaactcagtccacaggctggaggcttctgcttccccacaacccaaacggcctccagccagccagagagccatgagaatccagccgctagcaactgccagcaggaaacccactaccagctgctcacagatggacagcccatcccggtagctggccccacctccccgcccctctgctgaccaacccagcagctccttgggtgggtgtggccaccctgctgcccccacctgctcccggaccctgtgccaggcggtgccttgcctcagcggggcctcgcctcccccagagccgctctgctgcctgaccttgtgatatcttgggtcctctgggcactggcgcaattgggtggggtcagctttggccagcaagtggggggcaggtgggtaaatcctccctctctgccatctccacttccttcctcctacccggcttccctgccttttccccactctggctccagggttgcactgctcagaaagctgtcgctgcccggctgcgcacaggcctgattttcttgggagtctgggctaagattctgactggccctcccacttaccacccacacsaccacgcagctagccagtaacagggccaggagtgatcaggagggggcccacctgaccacccacccggcgcctccagctggccaactctgcccgctcagggccatgagctggaggtgccaggagcctcccgggaggcagtgtgaggcattcttcttagtaagtcccgcatcgatgataaagggcagtatcagcccctctctgatgcgcagtgagcggctcaccatacaggggaggcgtttaatttatctcgggaactgggcgcaagttataaaaatggtaatttcttggagattcaattacgtgttttcattgttaccctcggtaatcaaggaaacaattttttataaaaggctgttggatgatactgatctcaggagaggatctgggccgggtgggggctttgggaatgaagaggagggcagtgtctgctgggggcaggcagggcaagtggagctgagccgtccagcccaccagctgttccagccctccaattcctccattcctctctggcctcagtcttcccttatgccgatggggccatctctggtagggagggtctggcaggagctgatgaagtgaggcatggctcctgggccgtgagggtggctgtgagggtagctgcgtccctgcccctccctgcctggtgcccgagcagtctcgtccatctcctgaggcctctgcagggcatagagaggggttcctcatggagtgcggacctgatttttttccccaagtgatgtcttggctctaaataacatctccaggattaatggtgccagcccccaacagcaccaggtgattgaaaaaatggttttatggccccgtgggtgaaattcaacttgcatctgaggtgtatttccaagatgggattttcctccctgggagaggcggcacattccacactaattataatggcagctcctcgacattcatcacccatagtgggggggacacctgtctggggcacaggggcagggtgtccctggggtaacctccaggtctcctaatctcagcagactctggggggctggttctaggagatgcgccctcacgcagtgcagggccaggggagggggaggcgggagcccccaggaaatgaacaaactctagctgggctgcgccagggaggaggctggaaggaggccccaggctgagggtaggacccggctagtgcttgcccagggacccacaggccccttgctgagcagactccagcgaggggcctggcccatcttgttgcaagaggctggagtcctgggctgagctgggcagttgaccttggatctgactgtctcccctgaaattccttttaccccaactcaggctcctgcagtcccgcacagcgcccagccaggatgggcaggaggaagcccttcctccgacgggccctcaccgcaccctgcctgaggggccttgagccccagggctcttgtctcagcacttggccgtggagattcgggaactatgggagtttgggggatctcggtggctgagggctgtgctcatgaaggactccttgagtttggaagatgaggctcaccttctgcacagccaataggtcattgtcatgggaacactgaccaccagcaccaacctccatcccccgccgggggcacgtgcctttatcacccatttcctaggtgagtacaggggctcaaaaaggggcagggttcctgaggtcacacagcaggtgagcaacagagccagtgagggcctgggggtgtcctgccaggggctgaggtgtgcccacatgcaagaatccaggggtccgtgggccagggccctgccaagagttgggggctgagggagggaagggggcattgccaaccctgcagcccctgccgtggggggtagaagagagatgcccctctgggggcccgagggcagggtgggcccatgccgttccctcccacctgccacaggtgaacctgacaggagtggggatggagcctggcatcccaagggaacctcctggagtaatcactccacatgcttgcagtaaatattgggcccttcttcccctcccagtaaatgaacttatttacttttaactaagattaaatgttctatgtgagttcaagatactgactgccctgtcaggctcagtccacgctctgctcttcctgcctctgggggccacccccaggcagggagggaccaggcagccctggggaagcagagaagttgtttctccaggaaactccaggaggagaatccatttacatcatcaccactgtcaccatgagcatggccataaccaccatcatggccagctccaccagcaccccatcaccaccagcaccggcatcatcaccaccaccaccaccaccaccaccatcactaccagcaccatcacctccaccacaatcaacaccatcactgtaaccacaacttccatcaccaccaccattaccctcaccatccccaccatcaccatcaccatcagtaccaccacataacctctattttgaccaccaccatcaccaccaccaccaccatcaccatgatcaccagcatcaccaccaccaccatcaccatgactaccatcatcgccaccacagcctccatcacctccaccatcaccaccatcaccgcttccacaccaccaccgccagtaacaccacctccatcactacccccatcgccaccaccatcaccatcactatcaccatcactacctccatcaccatcaccacacctccatcactatggtcgctgtgactgagcccatcctcattactgtcatcagcactgtcatagtaccatgctgacaagcccacagtgggtttgagggctgccattgcttgggactagttcctcaggcacaggaggctccacgctggtctgattgcattggaggggttgcctgacaaaggtctttatggggtgcgcattgtagagtggggagggggaggctagggcaggtctggaggacttcatgccgtgggcattctccccggcccccttctgtctcagcagcaccccacgcttcttgactgagctggagcagaggaagcaggcaagggtgggaggaggggcaggggcaggaggagggacaggggcagccacaaccatgtccacctaggctggagcacagcccctgagcctccctaaagtgaggggccacccagaggaggcacctaaccattctctcctccagactccacccagtgcttggatagccagcggggtagcttggggttggggctgggcactcagccaaaggggcctgagagcatgccgtgtgcagagcctgctcccatgaggtggtgagagcctgctgcaccggtctcctgccccgagccttggcttgctcatctatgaacgggtgacatggtgcctgctgcacagcaggccacaagagcagagcgacaggacacagtgaggggcggtaagktgctgcctggtaagagagctgtgggctggcctcaaggggtagcctgtgtcctctcactgagaatagtgggaagcgagctgcgagcttgggcccacagtggtggtcttaggctgccgtggtcacataatgccacctcccagtgcctgcggcaccacccctgggctccgcagccccagccagccgtccatgtggcccatcctgtcctctccrggcctgtctgtgtgcacccagtggagggtctcctgtctcctgtggctccctgaggctgctggtcacagggctgatgaggacactggagaccgctgcggggctaggcaggggccctgtgggagtgcagcagcctggaatctgcagctggggctgacctagcacagcaggccactggtgccacctctcacgtggcaggcgcttcgcagcctcccactgcaatcccagcaggcctcggtgccagggcggccccatcctgggggccattgaggacctgcataggccacagggctcacgagcatgggcacaccagggcccggtgggagcagctggagggagggttcagtcacccaggcctgcccagagctctgcycagggcccaggatgaactgatgggggcagcctgcaggcggtgccagcgagagtgggcgctccccacaacaggggggccctagccagcctcacccagagcagggagggcatgtgtggagatgcaggaaacctctcccatgtccaggaaatattattaacaaaaattttaaatcttggtgacattcccgatggccagataattaatataacagcagataataattattaataactgcactgaatagttttcaaagtaattgtgataaagagaatgttaaatgaaaactcatcaaagttgctgatgccctgcacagtgagggcaccttggtgctgggggtggccacatcgactgggccgagactggcccccccgggcccactgtgtcctggtgccacgtattaggggttgttacccatacttggagtgtgaggacccccccacaacacacacggggtgaggaccctgcacgcacatgcaaaggcaggggtgtttcttagtactgggccaggtgggcagagtctgtgtctcttcctgcctcactgggattgtggatggccatggggttggctcaagagtctgccctgtgcctgcaggtgttctggatatctgggctagtgggtgggggtattatctgccccatgagccagtctctggttcttctattgccccagaccctccaggccttgggtgaaccccctccaccatccaacttgacctgccatgttcctgggatctagcccaggrctacttcatccagcaattctcactaaagtgtgagtggctgcttggcactaccgtaatccttgccgcctcatgtgtttattggtgtgaagccttcagctgcagagggatgaagagggtggtcccaggcagagcaggcctgctccctccaccctcaggctactgactctgcagctctggacagtggctgggagctgccaggagcccaagtaggagcaggacctggggatctcctccccacatataagccggtttctctgatcctggttccttgccctgtctggcctgccttccaactgacaccaccatgtggctccctcactcattgagcaggactgttgcggtaaactgaggaacggagagaccagtataagaaacaggaggattgtttattttaggtatgtgccggctcagtggattcatatccaagaagttgagcattaaacaaagagagagcgggggtttttatgagcggacttaaaataaataaaagcagttactcacgtgataggtcacataatctatagcatagcataacttgtggccttgtagctgcattgaaagaaaaacaagaactggctaaatacagacatttataaaacataatcatgcatttggacccattccacagatggagaagatgaggcacaggaatggcataaatgacttcctccatgttgtacatgcagtaggtgctagattctggcaccaaagccagtgctttgtcctcttcccctttcctcagtggctttcctctctttacctgccccaaaggctgtaatctctaacatgaccttaagaaagagaatggaacggatttcttattaaatatataaatagagataatgccatccgaataacgttttatgttccctggtcccagtttttctaatcaataaagtttttaactcttccctcctttttttttttttttttttttgatgcagagtctcatcctgtcacccaggctggagtgcagtggtgcaacctcagctcactgcaaccttcgccacccgggctcaagtgattcttgtgcctcagcttcccaagtagctgggataacagatgcctgccaccatgcccggcaattttttgtttagtagagacagggtttcaccatattggcccagggtggtcttgaattcctgaggctcaagcaatccacccgcctcagactcccgaagtgctgggattacaggcgtgagccaccgctcctgacccttctttctcttccttcttcatctttcatcctttctcctccttccccttctcccttcctcctcctctttcttctcctcctcctctttttctccacttctcctcccctcaccccctccattccccttttctcccctctcctcccctccctctgaaggtagagagctttcctctgaaacaccttgagctgtttttgcttttagacatggcttacaacggtttccatcttcctgtgggtcacaggttcactgatatttagtgaacaatttctgagcactttgaaacttgaaatatgctaatgctcactgttctatgagctttagatatagaattttgtttaaacctcataaaacttcgtgagtgagatagtttccttcttcacatttacagatgggaaaaatgagccttaggttaagtaaactgcccaaggtcacacagctagtcagtggcagagctgggaatcaaacccaggcactcrgrtgccagagcctacatgcttcaccctgggccttcaaaagatgaaacatcacaccctgcttagcaagtgggacatttatatttcatctgaagaacgtgkgccccaaactgcatggggaggggaggtggtgcctggtgggctgatgggacattcctgtctcctcstcrggttttgttgtggttcccaggcggtgccttcgagactggctcagcctccatcttcgatgggwcctccctggctgcctatgaggacatgctggttgtgatcgtccagtaccggctgggaatatttggcttcttcacgtgagtctcttcaaatgatcgacatcccagatccccaaggggcagcagtgcagtagccatagacagtgcccagcaacctaagaaggagtgagccttccaggacattgaacaaaactggccctagttccttaggtaatttttgctgccgtagcagataaatccccaaattttggtggcttaacacaataaaaatctttttctcacttgagtaaagtttaattgagcatccctgatcagcagatattcttccccatggtcagccagggatctggctctttacatcttgagctctgatgtggattctctagggccccggatcttctgcatttggcaggtgggcggagaaagcatggaggaccatgcaagggagagtctcctggcccagcctgcaggtggcactcgtcacttctgttcactcaccattggcagaactcagtcacatggccacatccagctgcaagcgagctggggcaatgtagccccactgcatgccctggaagacaggacactgtttgtgtgagcagttggtagcgtctacctgagcctcaccccaaggcttctcgaatgctcacctgagaatcatcactccatcacagtggcttccctcctccaatcatgcctaacatgtattgggttatcaatgaaccaggcatgcattatttcaactcatcctcaaaataatccttcaaggaagattctctgttgttatcttcatttcacagctggaaaatggaggcccagagaggccaagcaacttcccaggggtcacaaaacagagctaggtctcttgaccacttctattatcctgcctaaaacatggcaggagaagtcctgaccagggaccaatgtaagcaaagagaagtgagaggtggggccaggattatgcttgggggtcactgtcacatactatgggaaaatcagcaatgattcaaaatatgaatcctgccctacagaggctcctgactatgggggacataatgcagggacaaaaatttccacattaccaagaaggacatggttaattctccaagaatgagaggccatggggctgcggaaacagaggaatgagttgcaagggatcggggaggcttcggaagaggggtggcattggagttgcacctgaaggatgtggttgggtttgaggagaaggggttgagagaacgtgtgctcggcaaagggtgctacctgtgcaaaggttaggaagttggaagggtggtagcaacacatgaggatgaagcaatacttttgcaaactgcactgggcctgtaggcctggaatgtggctctgggagtgctgtgcaggcaggacaggctgacggggtgccctgacccgagcaattacacttctagctgctctatacattaggattctgcgtaagattcctttgataggaacgttttcaacaattgtttatcatatctggtttgagcataggtagatgaagctacagcaggagatggatgcagaaaggcaaggacaggcctgacagggaaagaccttgaatgccaggccgtaaatggagtttgggctttatccaatacagattgagggaccaggagtacctttctcagagtagtgtaccaggaacctccagagcagaacagaggctgagccaggggtgcccagctgcagatacggacccccaatgggaggcaccgtcttgatgygggccacggggtggttgaaccacaaaagcaatagctaacatgtatataacaggtgtatatgacatgcttattgtctgcctggcacygtcartcttcacaaccatgtggagtgggcactatccccattttagacatgagaaccattgaagcacagcaggttaagtgacttgcccaaggtcacccagatgataagtggccaggctgtgaatcctgtgctcgaggctgagatagtaaccactaaggtataatgcttctcaggataaacagatggagaaatggggaccagggtgggagccacagaagaatggaggtaaaattggcagggcttgactcttgaccagatgcaggggactgggagagagaaggtggaggcagagccagctcagtggtcatggrtagaggagggaacccaggggaaggagcagtctggggaactggggaatggagtggagtagaatgtgccccaggatgacttgcactgatggtgtgcactgcgtgcatgctttcggtctagacatttctttggttctgtgggatttccagttgtttcatttgttctcccattaattccatcccaggaaacatgcaattgtgcaggagcagcagcatgggggcgtgggatcccaaatctgcagctttctagctcttgagccagggggtttaacctctcagtgcctgaattaaagagtttatgtatccattcatctcctgacagcatgctcacaggtttagtggaagggagttggcatgagctgctgctgtggagaaaagcagcctctgcccaaacacttcccagcagagagggagcacggggtggtgggataaacatcccagtctctctctagcccaccctcacagcacacagctgaggcctgggtgatgacattcctagaggtcagcttttgggggacagggcagagaagggtggagaggacccagagaagcaaagggagaaaacccagcaccatctacctcataggtgtgagggttgtaggagtattagccttaaagcccttagaacagtgtccggtacctgctgcacctgctattattgttattatgattattattaatttagtttcatggaaaattctgtgctcagaaaacccttgctttctagtacagaccaactctcaggaaaggattcatggattccagaccagcctgggcaacacaggattcacgcrytgggattcatggattctgaggagcctatgaatacttgaaattgcacctacagtattgtatgtgcgttcttctcgggtgcatagctttcatcaaattctcaaatccaaatcccagcaaagtgtgagaactgagcccggtttccccagctcctccagacctctgactctcagtcccctccccactgacatctgcccacagcctctgctgagaacttccagggctgtgggaaacacgccatggccaactgagaattctcaccctgcctcttgtcctcagcacatgggatcagcacgctcccgggaactgggccttcaaggaccaggtggctgctctatcctgggtccagaagaacatcgagttcttyggtggggaccccagctctgtgaccatctttggtgagtccgtgggagccataagtgtttccagccttgtaagttctctgctttgtgatttgaatgaatctcagtgtgggaggtccaaaaatgatgatgaggagtcactaacatttgattggtgccttcatgcacaacagacactttaaggcacattgtcttcttcaagcctcacaaacacatcatgagttaggagctcagtctgatttcatggacaagatagcygtcactgggaaactttaaataaatcacccaagatcacatagtgagtaayaatttgaggaaaactcctttatatttgtagaggagaaaccctagtattcaattaccagagcggtaattacttgtttaatagaaaactcagctaaagcatgaaatatcaaaagatgcatataaatattwaattttaattttattttaacttaatttaaaccataaaatgtacattccctcaccaacagtttgatacagggccttatgtttgcagagctggtctgctgactggagttccaacatggattatcttgcataaaccactgcaaatgttgctgtcctcaaattgcagtttcagtttctttacggtgggcacaaacttaaagatgcctgagcacattttggagttttatacttttcctgcaaatattctacttatttcttgcccacacataatttgacagccatatatatattatatatatataaaatatctagtatatacacacacacatagtgtatatacactgctatatatggtatatatactatatatagtagtgtatatacactatacactatatatacactatatatactatatatgtgtgtatatatactagatatttatatatctatatatactagatatttatatatattagatatatatatagctgtcaaattatgtgtggacaagaaataagtagtatacagtatatatatagtatatatacatacacacgtatatagtgtatatagtgtatagtgtatatacactactatatatagtatatatagtatatagtatatatataccatatatattatatatataatatctagtatatacacacacatagtgtatatacactactatatatatagtatatatactatatatagtagtgtatatacactatacactatatacactgtgtatatatactagatatttatatatctatatatactagatatttatatatgtactagatatttatatatatactagataatatttatatatatatagctgtcaaattatgtgtggacaagaaataagtagaatatatacatatatagtgcatataagaatatatacatatatagtgcatatatgcactatatatactgtgtatatacacacatgcacatatatttatatacatatatatacatacacagacatataaggctttttttgtttgttttgagacggagtttcactcttgttgcccaggctggagtgcagtggtgcaatctaggctcaccccaacttctgcctcccaggttcaagcttttctcctgcctcagcctcccgagtagctgggattacaggcatgtgccaccatgcccgactaattttgtatttttagtagagatgggttttctccatgttggtcaggctggtctcaaactgccgacctcaagtgatctgcccgccctggcctcccaaagtgctgggattacaggcgtgagccaccgcgcccagcgacagcaatatatttttttgagacaaggtctcactctgttgcccagactggcatgcagtggggtgatcatagttcattgcaacctgaactcctgggcacaagtaatcatcatgcctcagcctcacaagaagcatgtgccaccatgcccagctaatttttatttatttattcatttttttagagatggggtctagctatattgcccaggatggtcttgaacttctgggctcaagtgatccttttgctttggcttccaaaagtgctgggattataggcgtgagccactatgcctggcccgagagcaatattttttagccatcctttatcaagaatttttttccagacataatttgattttcttttacacatacagttcatttgttctcatgatatttcattgattatgtaattacaataacaagtgcagttgacaaaacaggtttggaagcaaacacacctgattcttggcaagaaactgatgagaagagaaatggacagaggtgctagaaaatggtccattggctcagtgtggtcaccatttccttggcatcagttggcaggttaattgcagaaatcagtgacatggtgttaagagagcttctgctgactagcacttaacaatatatgtggtctttttacatcttcaaaattaccttctaaagtggattatattaacctaacttttcatatattataacagccattatttcatgaacgaaatttgaccagaccacctgtgaagacttctatgtttgtcactgcccctgctcctccaataattttgtgatacgggctcaatttttactccagttttacaggggagtgaactgatacttagaaatattaagtaacttggctgggcgcagcggctcacgcctgtaatcccagcactttgggaggccaaggcgggcggatcacgagatcaggagattgagactatcctggctaacacggtgaaaccgtgtctctactaaaaatacaaaaattagctgggcatggtggtgcgtgcctgtaatcctagctactccagagactgaggcaggagaatcacttgaacctgggagttggaggttgcagtgagccgagatcacgccactgcactccagcctggccacagagtgagatttcatctcaaaaaaaaaaaaagaaaaaaaaaaagaaatattaagcaacttgtccgaggttacacagctaggaagtgaaggagctagaaatcacatgcctgaacatttgacatcaaagttcatgaagaaccagggctcagagaggttaagtaacttgcccaaaccttcacagctagtcctttaacccccgccaaaaagggttttttttcccctctaagtttagagcttttatggaggcttcctgggaaggtttctttgaagagggatgaatggtatttgtgatcggtggggagtcctctgcgtaacctttcctggatcttctgtgttctctctccagatkctgtctcccatggccgaaggcttattccacaaagccgtcatggagagtggggtggccatcatcctttacctgaaggcccatgattatgagaagagtgaggacgtacgaatactgttaacaccttgcyagcttcctytcctcagttaggggagaatgtgttcaggcaccttctcaccatgtgccatctatcccacgatatttgtcatctgtctcttaattatctactacagagtgaggccctagagaccaggatctctctgtccttcaggcccccagcataataagtggtatatatcaggcagctataaatgttctggatgaatgagctaatgaatgagctgtttcattcaatgcatattaattaagcactgggctgtggagccatctcttgagtattaatgattttagtggtaaattttcttaaacattttatagaaagtaacagtatataaccaagagcagaaacatagagttatgaaattgtaaaaaaaaataccctcaatacgtggaaacattgattttggtaacattctccataaagctgctttcagtttgggcatatgtttattcatttgacacatcactgaatgcccactattttccctgctctgttagaactttgggatttatcagtggagaaagcatatccaaacctgagggcaatataatctttttatcacctatccatggataggattaaatcctggaatccatggatggtttgggaagtggtcccacaattgtaccagactccacatgcctgcacattttcccagggagggggtttgtaactttgattggattctcacagtatccacgactcccagaaggttaagagccaccactttcagggagtgagttctacaaatatggaaggttcagtgacaaggaaagcaggtgttcagcaatgggccaggcatggaaggtggggaacatcgagcttataggagattggatgaggaaggcgtttctgggggctgcagtgccctgaaaggacattgtggagagcaggacttgggctttaaagaatgagaaggattggtatacaggcaggaaaaaagacaggtaggacattccaggctgtgagtgggcctggggcttgggcagggctgacaagctgagaatctgatctggagccctgcctctactgacactgaaggagcttgcaaagctgttcctcgctcttggtgtttctgtcttcatttagcacctcaaggttgggcttctagactctggaggagccaagtaccaatgcagccaagttcacaggactgatctctttgtgaccaggaatcttgattccattccatatccacagactgacaaacacccatccccagctgtggtgttttctaaagatgacaaggcgagccaggcaagagagtgagggtgaggcagtggcaacctgtctgccacgtgcaccttcctttataggggcatggggctaggcaggggtagcaggatggacttatatatggaggacaagcctgtggctgataggagggcattttccaggtttcattttcctagatgctttcaaaatcatgctctgacctggtctttctctgaaaatagctgcaggtagttgcacaattctgtgggtacaatgcatcagactctgaggccccactgaggtgcctgaggacaaaatcctccaaggagctgctgaccctcagccaggtgaggacagagggggcagttttggggacagggttgccctttgaatagagaggtgaacaaatcctacccttttgttatttatttggatttggaacatggaaaagaggaggactggggatacttggtaacagctgtaaaaaaaataagtaggggtatagaacccttgtaggtaatttaagaacattgttggggcaggggtgcaacttagcctggagaagattcagcaaagtacaaggcttgtctctaagtccctgaaggcatctcactggagagagggaccacacttgttatgcatgcttccagaagctgaagtcaagatcacaagctagaagttctattcagaagtcattttagttttgtgtaactgaaaacttttcaagacctcagttgtctggaaaaggactgggctcctttagaaggtggtgagatgcccacctctccaggtattcaagcaaaatatagctgaccactgacagactttcaatcagtgacagttaattgaaccgggtgatcttttatgtcccttccaaccttgagagcctttgatgacagtctttgaatgaacaagatcattatctttcagatttcaacatttgctagttaggtgctgtgtactgaatgtccactctgagccatgctagcctcagtgaaatggataagtcctggacctgacgttgtattgaactcttccatgtgctcctttctacccaaatcccaaaacagaaacctgaagaaaccgtgattagagctgagtgttgctttctgagaccccagaaatatccaggcatttcccaggcactgtgtctcagggagacatctgagaaaggtgttcacaccaacccctacagtcctagctactccatctaccaccatttttccctttgtatttggccagtggttctcaaacttgaacatgcatcaggatcacctggaggactggttatgttgtatccaggtgagttaagggaacgccacactttgagaagaattaagagtcctttattaagccggcggccrgagagacagctaatgctcaaaattctctctgccacgaggaaggggctcaattaacttttatacctaggtttaggaaggggagggggactcaaatgtaataattctacagaagtaaaaacatgcaagaatcaaaagaagcaaaatggttacagagtgataaacaaaagacaaatagttacaagaagagcaacggtatcaggtgcaaggttctaaatctttcattataattagatatagagtctatgcagggcatgaactcaaggttttatgttgttatctcttggagagaaatcctgggaacttcatacattgttggtgctagtaccttatcagttaattgggctcctttgaaatgctgaggatctgtttacacaggccaactccttacgaaagggtgttggatgaggagccctcagtgtcttgtaaattaagggatcarctggagtttgtccagccttcctagctggagagagtcttatttacatgagaagcaaggctaggtgattaaagagacaagcaggataaaattcaaagtaacgagttaaagtaaaaacaaggttaggcatttcagttacaagaaggttcctgggctacaccccgaccctagagtttcttattgagggcctgaagtggacctgagaatgtgcatttctaacaaattcccagatgatgctgatgctgctggtctaggaaccacactttgagaatctctgtgctaggctgtattagtctcttctcacgctgctaataaagacatacctgagtctaagtaatttataaaggaaagaggtttaataaactcacagttccacatggctggggaggcctcacatcatggtggagggtgaagaaagagcaaaggcacgtcttatatggcagtgggcaaaaaaaaaagcttgtgcaggggcgctcccctttataaaaaccatcagatctcatgagctttattcactatcatgcaaatagcatgaataagacctgctcccatgattcaattacctcccaccaggtccctcccacaatatgtgggaattatgggagctataatttgagatttgggtggggacayagccaaaccatatccgaggccactgtttttcttaggtagatattcccgtttagcagataagaaaataaggcacacacaagtttagcccccttgcccaggtacatggcagagctgccagggactgatatattgagctgggcccatagtgtttgcttttactttttaagtgcatttaagccagtgctagactgggttggctttgcttggccaggatttgggacagcagattttgtgaacagaaatagctgctggtttttttttcttccctattacagaaaacaaaggctttcactcaagtggttgatggtgctttctttcctaatgagcctctagatctattgtctcagaaagcatttaaagcaattccttccatcatcggagtcaataaccccgagtgtggcttccckctgcctatggtaagaattgtggctgtccatactgccactccctcaaactgtgatgcagctcttggcttcaacagctgggcatttccacaggtgacatccactgttgtaagtgctggagcccaccagccaagcacacagtgatcacctttcctctctctgaaagaggataagcgaggaccaggccaggccagtcacagcaagtgtctgccttgctcctcatgtgatgaggtttagggtggaagaaacaactacataaaaaggaaagaggggatgggtccatttggtctttgttcaaaaaatactataaattattgtttccaaaaaatgcagttactacttcagagttgacattcagataggtttgaaaaacttcagtcctttaaacttttcatgtccagccttggttctagcatcttgacatccaagaatgctaaggttgtataagttgcaaaaytgttgaatcattttatttattcaacaagtatgtgctgagtatttattacaggcttataaaaactgagcagttggcagcgagcgtggtaccagctttctgagcgcttacactctagtggggagagayagaggagacacgaggttgagaagatgatttcggagagtgatagatgctatgaagggcacaagtggggagagaagttatctttagggagacaacaggtggttaggaaaggctcctctgggggagagattgttgagctgaggcctgggtgccgggaaaaacccatgattttttgattccatggtttaggaagactctcttcattggaaataaacttttcatctgtcctcagaagagtggaggcttcaaattcctaatactgttgaagctcatttatatagactgacctcattttaagctgggggaaatggggttaagaaataaagaggtttgtcaaattacaaagctagttgatggctgctagaaccagaatcccgagttcattgggttgtgaaagcatgttgtaccattattaatttgacctccaaggcaatgttttcaagtgggactagggatttttgtcctcatgttgcagatgaggccagtgaatcacagttgatggcttaggtaaggcctttcagtgatttctgggtgtgtattagaaagaagaaggcagtgctagtgatgacaaccaccactgtaactactgtaaccagttccccaatgccttctagtgccaagcacaggcaatccaagcaggaacttgaaaacaggcatgattatccctattttaaagaaactgaggctcagagcagctaaagtggctttccagcatctcctagctagtaaggagacactggtgtgtaatttttatgcatttaggctctgttttttattttattttattttatttttgagtcagagtctcactctgttgcccaggctggagtgtagtagcacaatcttggctcactgcaacctccatctcccgggttcaagcgattcttctgcctcagcctctagagtagctgggattacaggygcctgccaccacgactagctaattttttttgtatttttagcagagacagggtttcaccatgttggccaggctggttttgaactcctgacctcaagtgatccacccaccttggccccccaaagtgctgagattacagacatgagcctgtgcccagactaggttctgcctttaaatgccgagttctctgcttacctgctgtgtgacattagggaagttgcctaccctctctgagtctccattccttcatctgtgaaatasggctattcttagcacctacctcacagctatacatcaaacagtctggcatatagtcagtcctcagtaaatgctagatattggagttattcaactgacagaatttgcagagctcaaaagcctgtgtgggtgctgaaattccatgtgaatttgcagttaaacccattgctagctgttagaaaccacaggaaatcccccagaaacaaatcccagctccttaatgtacaagaaggtttttagtagttagaatatgcttgtaggtaacatgaatgactctgaggttcccctgagattccaggagacaggtatggccctagtattcatttaagtattggccctagtgattcattaccccaagattttcagcagaaaacataccaagaaaatttatttgtcaggtggatagtatttctgctgcctcacattttaaagctgtaattttgccagaaaatggtaatttcacaaatattcacacaaagcgcttactatataccaagtaccactgtaagagctttacaaatatcaactctttcagttctcatcaccaccctggcaggaggtacctgttgcaaactccatcttacagatgaggagcctgagacaggaaaagttgagtcccttgccaagttctcagctggtggccaccagcctcactgctactgcctgacctcccactgtggcttctcagaggccccacccgcaaaggtcgttagaaggagaacagcaaataccagttttgaaattttctggcttctctttgaacttggtgtcaaagccaagttggtgtctcttaggcagtcagggctaccataacaaaataccacagactgggaggcttaaatgacagacattcatgttctcatagttctgggggctggacttctaagatcaaggtgctaatattgctttgtttgtctaaacgttcctttctcataaggacattagccagattggattagggcccactctaacgccgcattttaacataatctcccctttaaaagtactgtctccaaatagtcgcactctgaagtgaaggggggttaagacttcaatgtgtgaattttgagggggccacaacttagctcataatgggagccttcccacaaggtggccactcgggccccacaaggctgcaggtggaatgacagggaacagctgccttttatcaaaagtgagaagaagaaattaactatctgagcagcacactgaggccacttccacacgtggctgcctgggctggagggctcctgcccttcccagcttcccctgtgaaagtcrggtgcccaggccctcagggagatgggtttaaccttctgatgaccagatggcttatggagggcactgcttctctccacagaaggaggctcctgagattctcagtggctccaacaagtcccttgccctctgtctgacacaaaacatcctggtgaatagcttgggaggctgcagtactctagagacacatgcactttcacagatagccctgggtcacactcagcgggagcagccaggggcacagacactcctcactcactcagtcattcagtagacctttactaagcataggtgtattagtccactcttgcactgctattaagaaatactggagactgggtaatttataaagaaaagaggcttaattggctcatggtgctgcaggctatacaggaagcatgatgctggcatctgttcagcttctggggaggcctcaggaaacttataatcatggtggaaggcgaaggggaagaaggcacgtcttacgcggccagagcaggaggaagagagagagggaggtggtgccacgcacttttaaacaaccaaatctcatgggaactctatgacgagaacagcaccaaaggaatggtgctaaccattcatgagaaaccactcctatgatccaatcrcctcctaccaggccccacctccaacattagggattacaattcaacatgagatttggtgggggacacaggtccaacctatatcaataggcccacaatcccaatgcacaatccccaacctggaagagctccaaaaactcagagggtttttgtaacccacccagcagccaaaccacaccttgactgatttgtggctatcagtcatttttgttcttacacattcattcattcattttatttatcccagtattcagatgtttctctgtggatgcattaatgtgggtgttggggtgttaccccaccccaagcctgtgtgataacatgcaacataggtgctgcattgtctacctacagtctgaaaaactctgaatgctaaaacacacatgggactggggacctgtattcactacacaccagccaggcattgggccaggttctgacaagaccagttatttactcattcattcactcatttattgttccatcactaattcattcattcactgcacaaactcagcagtatctggtcttactctagacagtaggatatagagatggattgctttccttccttttctccttttctcctttttccatcttcctcttttccataaacatttattcagggtggactcagtgctaatgttcattttgctcatttgtccatggaacacatgtttagtgagagtccacatgcccctgcattgccctgggcactggggtgcaatgtggggtggacagagatgacaagacagttcaatacagcacacatgaagcaggggagtgtccaaggccctgtggtgcccacagaaggggacaggtgcctctcttggggagaagggtttggaggattaatggagcttgtctggtgatggaaggggtgggtggagaaactgtgaaaaaccaagagtaccaactgggagtagaggggtgtgaagagatcagctgagggttggctgcagcaggagagaatgctttcagctgttgtaagctaggtaataatgagcgtagacttcatcctaaagactgagaacagaaggaagaaggacattatttgatttctatttttaaaaaaagtcctctgaaactgggcacagtgggtcacacctgtaatcccaacactttgggaggccaaggcaggaggattgcttgaacccaggagttcaagaccagcctgggcaacatagggagaccttgtctctacaaaaaataaaaaaattagccaggcatggtggtgtgcatttgtggtgccagctacttgggaggccaaggcaggaggactgttgagcctgggagtttgaggctgcaggatcttgccactgtactccagcctgggcaacagggcaagagactatctcaaaaaaaaaaaaaaaaaaggaaaacagaaacactacaggcagagatccctcaggccccccttggtggagggatgtttgatgagttgcagctgtctgatgatgaactgggactaaggttgagagatattgatgatgtaagtcatacagtggaattctcaggtggattggagatggccttatggagaaggtgctcgatgatctgagccttaggggaggggaacaagtgagcagaaggacatttcaagtagagtgggaagtagattgtgcaaggaagtgcaagaggaatggaagggcatgtgtctctcctgggcgcagtggcatgctaggggctacttttcaaacagtaagtagttctctgatacagaaggcatagccttgctccagaaccctaggactttgcactctgactgtcctatgggggcttacctgagactccacacagcatgtgtacccaccttggacacctccggcaccatggggtctgctggttatatggccaaagaggccaggcccttacaccatagactggacctgctgcagaggcctcccttgctctggcctgattaaaaaccattagcctcctgaggacgcgatacacgagtctgagcagcattcccgaatgttatgtacactgcctcgcctccaaattccaaagaaacccatcaagggctgtgctgctgtcttagtggtaggggtttgagctgcaacacctttccagcatttcccagagcaccagatccctgaatcttcatagaatttaccatgcactctttgccatttgtgcttggggaaagttgagagggagaagcctgggaggcaggctggtgccaggtcagagaagcatcagatgtcctattaaggcactcagcaatggggcctgggtgaaccaacaggactgaaaacgtgctctgggtcaagcagcatgcttttctcttcatatcttctataatcctccacatccctagagatgaggaaactgaggctccaagagaccaactagcttaggtaagataatagctaagtgcaggaagcagcgctggtaccggagcaggactggtttcatggatgttctgcctgtgtagtcacagaggaccttgttgctcagaagggtcctacatttggttgaatgctcygctgtcaccatcttgaaattcttaatgatttgtgaacraggagccwgtcttcactttgcactgagctccacagatgatgcagccagtagtggctcattctgagacacaagagagaggccaggagcatgrgatttggatgcaaatacacttttgaaagaatcatggttcttccaggtgggcccaacgacttcacctctctaagactcagtttcttaatctgagaaatggggctagttttgatacttgcatcacagggttgctgtgtgggttaaatgaagcaatgtgggtaaagcattcagaatcatacctgcagagttaacgtgttggccattgtggttgacctggatctcctatgactatgatttttttacagcacatcctgcccaattatttgcaccttgtggctggtgaatacttccatgacaagcactccctgactgaaatccgagacagtcttctggacttgcttggagatgtgttctttgtgatccctaagctgatcacagctcrgtatcatagaggtgagtctctgagcaccccgcttcaggacsacagcccagcgaggttgatggccaaggagatccatgttgtctactgactggctgcctcctctgcctctgtttcctcatggagagggcattcccaggtgtgtgtggatggaactgtaccatggtgagctgtgccattcacctgcctttcagagtctgggaatgttgatcagttgttgtttccrttcctgcctgctcttcaggaccaggtagaaaattcccatctccctataattttctgggggccgtcccccaggattttttctttctggaaatgtcttccccaacatcttagccatacgtagtaatggaacaaacattttagctgtaaggagtaatggaactcctaaagtaatagacttcaaatcaaytattttaaatgcagccgaatactccaccctgtaatatcagattcyacattcttctcaagtgcacatgcaatatcctccagaataaaccatatgttaggccaccaaacaaatcccaataaatataaaaggatggaaatcatgcagagtatcttcttcaaccacaagagaatgaaattagaaatcaagaacaaaaggaaatctggaaaattcacaaatatttataaataaaatggcatacttttttaaattttaaaaattgtggttaaatatgcttaataaaaaatttaccattttaaccattttaagtgtatagttcaatggcattaaatacattcacattgttgtacaaccatcaccactatacattttcagaatgtttttatcatcccaaactgaaactcagtacctattamaaataactcctcacacctccttcccccagaccccaataaccaccattccactttctgtctctgtgactttttagytactttagtgactttggttacccaatgcaaatggaatcatacaaatgtttgtccttttggctggcttatttcacatagcataaggtctcagggttcctatatgctatactatacatcagaatttccttcttttttaaggccraataatgttccattgtatgtatatattatgttttgtttatccatttattcattaacggacatttgcattgtttccaccttttggctattgtgcaatgaacaatgggctattgactacaattggctattggctataatgctgcgatgaacatagttgtagaaatatctgttcaagtccctgttttcagttatttggggtatatgccagaggtagaattgctagatcatatgtaattctttgtttaattttttgaagaattgtcatgttgttctccactgtgtctgcaccattttacattcctaccagcgatgcacaagggttgcaatttctcaatatcttcaccaacatttgttattttctgttgctgttttttaaataatgactattctaatggatttgaagtagtatcacattatggtgttttttcattgttttgttttgttttgtttttgagacagagtttcactcgtcacccaagctagagtgcaatggcgcaatcttagctcactgcaacctctgcctttgggttcaagagattcttctgcctcagcttcttgagtagctgggactacaggcatgcaccaccacgcccggctaattttttgtatttttagtagagacagggtttcaccatgttggccaggctggtctcaaactcctgacctcatgatccacctgcctcggcctcccgaactacttttctagccatcctgtaaaggggtcatttacccctgagttgctggctaactcattggatagagcagtccgaccttgcgatacctttgttatacttcccttaggggtggtggtgtttgggatgaaggtgcaacattgagttttaatcatgacgcaaacccctcccctttctgctaatatcatgtctaaggctattttcccaagccatctggtagtagcccctaattgctcagctattcctttaacagcatctctagtgtagttaataagtcgctgctggttgtaatagatgtagtttatccagtctgcattttggttaattgtccacccaccaaaatattgactcaaatcctgcagctatttgatttcgggcttcaaactgatctggkattccccgtgggactccaattgcgcctaattagacgtgagagtcgaaagactcataagggacttctctcrctttacgacgtcttatttttccttcctctggttgatgaattgccagggtgaaagggatatccagctggactaaagcacaagtgccacttcagttttccggcagagtgtccagtaaaggtccaccacaataccaccacacatccgcaaggctagtctcactcactcagcacaacacacacacgcacacacacgtgcctgttaaccatcctgcctgttgccctagccagctgacctttgcaacccgggaaacggccctggctcttggcctatgaagactttacggtgctgtgttcgcaaaatataaaaggtaaggattagttcttctcttgatccactgctcratcacatgcccgcttgtgacactagccaattctgcaaacagagaatcttttggccactcctgggttttgccagggtctggctgcagcctctgaagccaatttctggttcgtgatgactctgcagattgtgatgggtgaggctggagcataccaagcctcacaatagatctcatttttgtttaatacgtgtaacacctctggcaccacttcagctgtaagcagtatgtctcttgtttaagtggcagttggttggggttattgcttttttctggggaacaccctctggtttcccatgtggaattacatgatgtgcagagtaaaatcctaggaactggccttaacttctaagcagttgggtaggacttgggagagtgggcatatctgggggcttcaaatgaactcccccaaacctctccacctccatcaatttaccccagcagatatatggamagcacatattagagcaggyattgggccacagcaagcccatgtcctactgggccccttactcagctttgtctgtgaaccatgggattgatcaggtgtagattttgtggtggagaacactgaactggaagacagaagtctgagaatccactgggtgacatttggggattccttgtggaaagacggggttgctctgggggaggggctctctcaagcacccttcactgtggctctgcactctatgaatccaggattctatgacattctccaccrcagcctaggcatatgcagtgtttctggaacctcagttattctcatactaatatcgtggttttttgccttatcagcgtatcatctgtacttctatgagcagttttctttaaatgaagtaactctttttacttcaacatgttcactcaaaaaggagactttataccatttccataagtgcaagacctgtataacctgcaataattagaggtatgcatggaaaatgtgtgagtgcagttttttaaattaaattgatggtaaaaataaaaagtacataaagaaatgacagtaaaaacacttctagtttacaaaagtatataactgaaaaaaagtcacttaatgggaaaagcgaaccattgaaggcaagttagttacatgaaagcagggacacccttgatcgccatcatgaccaccaggtaggtgacaaggcattggctctggcaagggtcattgtcaccaaagtcatttccttgagcttcagggaacatcttcctgttaacattcagttcattgggcaggagttgtattatgtttataccttcccaggcccatgatgttgtgttatacttagggggtcagactccctggagtcaatcaggtcctaggactgactggtcagagcatctagaggaaattttggcctggtggtgggtcgtagagaagagacctgtactcccgtgggcataactagtcagcctcattggctcaaacaactggaagtcgggtcatgtacattcatcaggcaatcaccctgagactgctgagcaagacttattagtgagagcagggtagactatggtagcaaataggcccagaatttcaatggcttatttttcgcttaggtaaaggactagaatgttgttcaggtcaataaggtggctgtcctccatatggtcattcagagattgaaattaaggtgtcagcaaactttccctataaaagggccagatagtacgtacttcgggctttgcaggccatgggctgtctgtgacaactgctgtggtagtgaaggtagcccttaaacaatacctatgcaaacaggcatggctgttcttcaataaaactttatttttaaaaagacagtgggccagatttggcccttaggctctagtttactcactcctaatctagactacggtgtctttgccatccttaactcatggtttctaaagttgccataggtgtcaattccccatcacctggaacaggcaggagcagaagtgtgaccatggagcatttgtatgggccagrcctggctgtggcactcttcactcccactcagagtccattggtgagaacttattcacgtggtcaatctaattgcaaccaaggctggaaaatgtaatctggccgtgtaccaaggaaggtgggacagattttaacagattgccagcaatccttgccacaggtaatatccattaaaccatggactcgatagtaaggtgttttttttttcctaatgcacagcaaaataaatacacatccattctataagtgctttatagtttctatgccatctaaaatgatctcgcataactccaggaataagtgcactacactctgataaacactaagtttttgtgtttctttgattcaaatcacaaaagcctgattataaacccagatcctatttgttagcactactctattaacccttcctttagcctgttaagaataaaatggtaacaaagatgattcagaaagcaatgtaaaaatttagactcagagaagttaagattgaattataatctggaaagagccctgtaaattcaaactatagattacattgtaagcatccaggtgaatagagtggcctccatagagaggcatgtgctgtgtgttttcttgccctgagaactgtcagtgttcatatatctcaatgcccaaaactgtgatgtctcttgatggtaccgggtattgagacatgggcaaaatttggagaggcagagaagaaattaacattggtacaaggcagattcaggggcttcttggggaggccagttggactggaagggtgaatggaagacagagagcttcaatgccaagctaaggagaacagacttcatccctggacaatggggaggagaagctgaaagtctttaattctgagactgacacgatgaagggcatttccaaaagtagagcctggcagaagcagccaagccatctgaagggaccagtggttattctcaaagggaaactcctacacactcttcaggagggtagaaggtaaacaactcctttttaaaggtgcctaagtcctatgcttgcaaaagcttggctttggggcttacacaggactcagcaagcataaatgacattaagcttctccaaaaagctggactgtagaaaggtctacccaaatcccaggagctactgatgctggccctatgttctcactttagaaggtcatgcaagggactaaatctctagaatcctttgtgggctgggtcacagctggggtggggaagttgtagcccttctgaaacttcccacatagctgtccttccatggaggccaggagcacatcagggtgggtacagtccacagtcctctccatcccaccagccaggctccaaggggtcttcacatccacaaaataccattttcacagatcagtagcatgcacaccaagacacgcaaattcaaaccagatatccaaatggcacctattgaatttgcaaggatctttaccactattctttcagtggtagtgcctagtggcaagaatatagaaaaccaggaactttcaccattgatgtgagagatcaattagttcaagctttcttgggggcaatttggcaaaatctatcctaacatttcaaaggggcatctcttttgccctagctattttttactaaccatgttctttattgtctcctttctgatactttaacatccagggctttgctgctcctggagggtgctcctcccaggtttagccaattcctagaaataagccacttgtctcttagtgtgcctttcatatacaaactcaccaatccagagcccacatccccaaccacctcctttatggggctctcccactctggactaatagcctcacaccctaatcacaccagggctaggtaccagatggaacarccccgatgccacagagcccactgaaattgtttgaactaaccartcctgaacctgctcaccttgccttacctcttccttcctatggaaaccacagcaacacctcttgcaacatcccccatccccaccaccttctgacagactgcagcattctctgtgcagcctcttgctcccatggcatggagtgtccccttgtcttgggatttgcaagtaacaaactactcttttcttttctttcttctttcttttcttttcttttgttttagatagagtttcactcttcttgcycaggctggagtgcactagcacgatctcagctcactgcaacctccatctcccaggttcaagcaattctcctttctcagcctcccaagtagctgggattacaggcacccaccaccatgcccagctattttttttgtatttttagtagagacagggtttcaccatgttggtcaggctggtctcaaactcctgacctcaggtaatccatccacctcggcctcccaaagtgctgggattacaggcgtgaaccaccgtacccggcccaaattgctttttcaatggctgacatctgatctgttggccctgccatacctaaataataataaaacctttactttaaagcactattctctaggaataattctgaatgaacccaaagatacatgtatcagatggtcacctcagtgaagttgacaatagtataaaataggaaatgatttgaatggctaacaatagtagatggttaaataatttattgagtattacactatgggaagcaatgtagctgtcaaaaggtagaaaaaattgtttttaaatgtttgtgtaaatgaaaaatcgttcaccacttcctgtgaaagaagagggatccaaaattttttatttccccccgccaattatccttaaaaaaaaaaaaccatgaaataaagtttttaaagctacaaacccacatagacaaactgtggaagaagagatgacagcattttggacactggaaggccagcttttttgagatggagtctcgctctgttaccaggctgcagtgcaatggcacaacctcggctcactgcaacctctgcctcctaggttcaagcaattctcctgcctcagcctcccaagtagctgggactacaggcacccgccaccatgcccagctaatttatttttagtagagacagggtttcaccatgttagccaggatggtctcgatctcttgacctcgtgatctgcctgcctcggcctcccaaagtgctgggattacaggcgtgagccactgtgcctggccgagaactagttttagaaccgagaaagtaaacgttaactaatggagagaaagacaccatcatgcacctatgcaatcagaatagacagaaaagactccctgggtttaggggtactaggtacctgtgaaagtttgggtataggtatcccccacttatgcccatggggagtgcacctctcccctttgagctccaccccaaggccaaagtttccttcaggctctctccctctgccagtcctagaactgggctaacttctggaatgcattgattttggatcagcaattccaaatctgagaagctatctgtcagaaatatgcttaattgctcatagtgatataggatcagaggcattcattataacattatttatggtgggtaaacattagaaaaacccaggctctctcttggtagtggtgcatgttttaaaatacaaaccaacagaagataacacttcccaagggcacattcttacagtgactatgacctaaaacttgtaacattcatcacttctaaaatatgttgagaatatttaatatatagttccattgtgaactctttaaatattttcataattataaatagaaaacatacgaaaatgaaatgttacaatataaacaaatataactgacatttaattcactgctctgattagctgtgcacttatatatattggtaattgagtttaagactatatgcatgctttttttctttgtctcatttttatttttaaaataaaattgaatatatttaagtggacagcctgttttgattcatatatatgaaaatgtatatatgtgtttgtgtgtgtacatatatatacacatagttaaataattactacaaactaatgagcacatctatcttctcatatagttagatgacagcacctgaaatatagtctcttcacaaatttgcagtatacagtattactgactataatcacataactgcaactttgtactcttggactgacagatccccttttctcccacctccctgtccctggtaagcacaattctaccctgcttccatgtattaaactttttaagattcccgccaggcacagtggctcacgcctgtaatcccagcactttgggaggtcgaggcgggtggatcacctgaggtcgggagttccagaccagcctgaccaacatggagaaacccagtctctactaaaaatacaaaaaattagcagggcgaggtggcacatgtctgtaatcccagttactcgggaggctgaggcacgagagtcgcttgaacccgggaggtgcaggttgcagtgagctgagattgtgccattgcactccagcctgggcaacaagaaagaaactccatctcaaaaaaatattaataataatagagtacctccacactccactataatcaacacgccactatcgtcaatgggcagatcatccagaccacgaaaaaatcattagttaagctgtactctataccaaatggaccgaacagaaatgtacacagctttgcacgactccacgactgcacaatgcacattctactcagtagcacatggattattctcaggataggctatgtgttaggccgaaaaacaagtaatggcacatttttaaaaactgaaatcatatcaagtatcttctctgagcacagtggaatactactagcaatcagtaacagcaggaactttaaaaactgtacaaatatatgaaagttaaaacatgcccacaaaccaccaataaatgaaaaaattaaaaattcattgaaacgaataagggaaattaaaaattaattgaaagaaataagaatagaaacacaacataacaaaacctgtgggatgcggcaaaagcagttaagaggcgaagtgcatagctataaatgcctaatcagaaaagtagaaagatctcaaatagccaatctgacagtacactttaagtaatgagaaaagcaagaaaaatcacatgctaaaattagtagaaagaaataagtcatgaagattagagaagaaattttagaaatagaaactaaaaaaaaaattacaaaaagacaaaggaacaaagagctgggggctttttgaaaaaaaaattgacaagctataatgagactaggaaaaagagaaagaaaactgcagtaaaatcatagatgaaaaaggagacattacaattgataacacagaaacacaaaggatcgtaagagattactaaaaacacctatatacaaacaaattgaaaaatccaggagaaatgaataaatgtctggaagcatagcaatttcacaagctagaataataaaaaaacctgaacagactaataatgagtaatgcaattaaggcagtaataaaaatctcccatcaaagaaaaacagaagaattatggttttactgctgaattctaccagacatttttaaaagaggtaataccaattttattcaaaatattccccgaaaaatgaagaggaaggagtacttccaaacttgttctatgaggtcagcattaccctgctagaaaaaaaaagttcccaggacacaacacagaaagaaaaccacaggcaaataaatatccctgatgaacatagatgtaaaaatcctcaacaaaatatttggagattcattggaggaataygagaatgattcaataaacacaaataaatgtcatacatcacattcagcgaatcaagaacaaaaaccatttaatcatttcagtagatgctgaaaraaaaattcaacattctttcatgataaaaattcaaaatgagtacaaaagaaacatagcacaataaaggccatatatgacaaacccacagctaacatcgtaatcaatggggaaaaattaaaagctcttcctctaggatcttgttaaagtgtggctaattttaccacttttattcatcgtggtaatggaagtcctagctagagcaattagacagcagaatgcaataaaacccatccaaatttgggggaaaaaaagtcaaattgcttctgtttgcaagtgacatgatcatatatacctagagagagaaccctaaagattctacaaaaaaaactactagaaataataaatttagtaaagttgcaagatacaatatcaatatacaaaaatgagtagcacacacatgmaccaacagtgaaacacattaaaaaaaatcaagaaagctgtttaattacagtagctacccactcccgccctccaaaataatgatacctagggataaacataaccaagaaagatcctacaatgaaaactataaaacatagatcaaagatattaaagcagacacaagtaaatggaaagatatcccacgtccatgcactagaagaatattgttaaaatatctctatcactcaatgtgatctacagaatcagtgcaatctatgttaaactacaaagacatttttcatggaaatagaaaaaaagattctaaaattcacatggaaatgcaaaacacctcaaagagacaaaaaaatcttgaataaaaagaaaagctggaggcatcacactacctgatttcaaaatattctacaaaatatactgtaaatccatagtaacttcagatctatagtataatatcaaaacagcatggtactgtcaaaaaaaggggcaggagagagagacagacaaatgacaggcagacataaacaaatgaaaacagaatagagaactcagaaataaattcacgcatttacagtcaactcatttttaacctaggcaccaagaacacaccctctggaataacaatctcttcaataaactgtgctaggaaatgcccaacacccacatgtagaagaataaatctagaccgttatcatatacaaaattcaactcaaagatttaaatgtagatttaaacctgaaactatgatatcatctcacgccattcacaattgcgatgattaaaaagtcaagaaacaatagatgctgccaaggctgtggagaaataggaatgtttttacactgttggtggaaatgtagattacttcaaccattgtggaagacagtatggtgattcctcaacgatctagaaccagaaataacccagcaatcccattagtgggtatatactcaaaggaatacaaatccttctactgtaaagacacatgcatatggtatgcttattttatatacatatatatttttattatactttaagttctagggtacacgtgcacaacatgcaggcttgttacatatgtatacacacacagtatgtttattgcagcactgtttacaatagcaaagacatggaaccaacccaaatgcctgtcaatgatagactggatgaagaaaatgtggtacatatacaccatggaatactatgcagccataaaaaggaatgagatcatgtcctctggagggacatggatgaagctggaagccatcatcctcagcaaacacaggaacagaaaaccaaacactgcatgttcttactcataagtggagttgaacaatgagaatacaaggacacagagaagggaacaacacacaccagggcctgttgtggggtggggaacgaggggagagaacttagaggatgggtcaataggtgcagcaaaccaccatggcacatgtatacctatgtaacaaacctgcatgttctgcacatgtatcctgtttttttttttttttttttttaataaagaacaaaaaaccaggaaggccacaaaggaccatgtattatatgattccatttatacaaattatctagcagaaacaaatccatagagataaaaagaatatgagtgattgccaggggttggggtagggagtatagaggctgrctactaacggatacagggtttgtttttggagtgatgcaaagttctaacattagatcacggtgatagttgcacaatcctgtgaatatattgaaaaccactaaattttacactttaagtgcattgtatgacatataaattacatatcaataaagctaaaattcaaagacaaaaaacaasctaatgaacaacatcgaacaaacatttctggaaaatatatcccaacactgtgaaagacctgataagaagaaagactacggttttgcagaggtccaagcggagaaaagaaacacagtcaaagctttaaagatgctgagatgcagactgctcaaggaggctggcagcttgagatcacttagaccgccggttcttwgccatatcagacccaaataccccctgcgcaccttttttttttgaaacagggtcttactctgttacccatgctgaagtccagtggtgcaatcatggctcactgtagccttgaccttccaagctcattggatcctcccaatgagcctcccgagtagctgggattacaggtgtgaactatcatgcctcatcccctttctttaaaaactattgaaaatatacctttattatcctgaaatgaaattcagaaataacttatttattagatatatcttccaaaaatatctacttaacacagcaactataatataaaaaccatttttaataaatataaatttcaatatgtaaattttcaggcagaatggtcagaaatccacatctctaagttgaatcactgaatttcacagctacaaacrctcttcatttgggtatgtcattttggcaactcagataccacactacctatcatgaatgctatcaataatgtgattgattcttcatttacctaaaaagatgaatcactcttagtgtgatggttaatttatgtgtcttctgactgcatcatggggtgcccagacttttggtcaaatatcactctgggtgtctctgtgagggtgtttctggatgaaattaacattttactcaatggactgtctaaagcagattaacttccctaatgtgggaggacctcatctcatcaactgtagacctgaatagaacaaaaaggctaagtaagagggagcccctcccacctgactgctgagctgggacatctctgcttgccgtccgactcaaactgaaacaaacattggttttccttgggtctaaagcctgctggatttcagacagaaacttacatgggtggcactccaggttttgaggccttcagagccagaccagaatgacaccatcagctctcctggatctctagctggccaactgcagatcttgggacttctcagcctccataattgcatgagccaattcttttaataaggatcttgttatatatagaatgcttcccctttatccgagggggatatgtttcaagaacccctacggatgcctaaaaatgcagatattgcccaactccatatatactgtgtttttgcctatacataaagatgctgctcaacttatgatggaataaaaatatcgtaagttgaaaatatcatgaatcaaaaatgcatttaatacactttacctactgaacgtcatagcttagcctagcctatcttaaacatgctcagaccacttacattaacctataggtggacaaaaatcatctaacatgaagcctattttataataaagtattgaacacctcatgtaatttattgaatattatacattacattcaaaatgtgacagtttcatgccatcataaagttgaaaaatcttaggtcgaaccacagtaagttggggaccatgtatacataccacctatgataaagttaagttgataaattaggcacagtaggagattaacaacaataactaataataaagtaagcaataatacaatatgctagcatcactactcctgcactgtgggtccattattaagtgaaataagggttacaagcactgtgataccagacagttaatctgataaccaagactaagggactaatgggcaggcagcacacacagcatggatacatcggacaaagtgaggactcatcttccaggtgtgacaatgagaccgcacaagatttcatcatgtcattcagaacagtccacaatttaaaacttaccaactgtttgtttcaggaatttttccatttaatattttcagaccttggttgaccatgaggtactcaaagcatggaaagcaaaaccatagataaagggcaactggtgaatacttgtattttctccagagaaacagaaccaataggatgcacatgatacaatcatatatattggttaaatatagttaaatatactatatatatataaacatatctcactctttcctactggagacatatatatatatatgctatcggttctgtttcttgagagaaccaagactagtaatacacttagtaaaaccaagaacaaaatgagataatttcccttcaaagtctagattaatcccatttcctgaaatttccatttctactaaaattacattttaaaaaatcctttatgtaaaatggaattcagttataggttcrgccttaaacagtttttttctatctacataagttattcatcaagatattctaggccaggcgcagtggctcatgcttgtaatcccagcactttgggaggccgaggtggatggatcccctgaggtcaggagttcgagaacagcctggtcaacatggtaaaactccgcctctactaaaaatacaaaaattagccgagcgtggtggcacatctcttaattccagctacttgggaggctgaggcaggacaatcgcttgaacccgggttgcagtgagctgggatcacaccactacacyctgtcctgggtgacagagtaagatttggtctcagaaaaaaaaaaaaaaaaaaaggatattctaaagctgtgcagatcataggaaaagttctattttacagaactgtcaccacattaagccttgaattccatgggccctacctattaaataaatgcctatagcacccaccaaccattgagacaatcacaagtgcttccacaaattccttaaatgaccctcaggctcataaaaaaacaaattagaattcaccagaagatcctgggtccctacctggtcgagacagaggaatcactggctgacactcctccctagagcccctctagagcccccccaggcagagattacagagcggaggagcgaaggagcacagttcacagcacttccagtgtcttggagaaggggaggtggtggaaattaccactctctcttctccaactttgctcaagggtgtcacatcagcacacatcactgagacctctagtccaggaaagtcaaggtttgggggaacaaaaagtagctctcctcataaaaacattgtggatcctgcctctgtgttctaagaataatctgaaacaatagtccatgaagtatgcctcatgtatttgtcaaacagtgtttcttaaaaacatcaaaatagatgcactactcccaaaataacagggaaaggcactgaaggccttgagcctctcccaggcagcaagcaccatgtcctgtgcggtgccttgtacagttcactggatcctcacatgatcccaggtgggtatgtctagatgaaggaactaaggatcagagattgcaagtaattctctccaggtcaattcattcttgaggaacaacggtctgaattcaaaccccacttcacttctgccactccatatggcctccaacatacacataacacaagttaggaatgccagattttgatctcaatgaatatttcacaacatataaacaaaccataacaacactaaaactacacagctcaacctgccccttctagatctgtctacttgtccaatgttgtcatcagtgctggtatactttttgtttttgagatgaagtcttgctcttctcccccagtctggagtgcgacggcacgatcttggctcactgcarcctctgcctcccgggttcaagtgattctcctccctcagcctcccgagtaggtgggattatgggcacctgctaccacgcttggctaatttttgtatttttagtagagacaggtttcaccatgttggccaggctagtctcgaactcctgacctcaggtgatccgccctcggcctcccaaagtgctgagattacaagcgtgagccaccgcgctgggcccttgctggtattcttaatcaacattttttattttgaagggactaactaccatgttatttaacataaaacctttcttagagcagaatatttattgtcaggtctagatcaatatgtattaaattagagctgtaaaagtaaaattcttagttgtaatcatactaattggaagaagggaatgagggatgggcatgagttgaaaaactatgctcactacctgggtgacgggatccgtaccccaaacctcagcatcgtgcaacatacccatgcaacaaacctgtgcgtgtaccccttgagtctaaaataaattattgacatgtattaaaattacttttttaaacaattactgaaattattttaaaaatcatactaatttatgtatatctacttttaaatttaaaatatttgtcataatttaatattaaaatattatttgggtgaagacacaaaccactctcattagagaaataaacccttcatttacaaggctgcaatctgggtggcctgaacgctcactagaatgtcccagtgctcctcaggacagggttcacagctctgggagccctgcccaaagctaattacacattcacagccacacaggaagctccagagtttcctttacttctacaaggagatcatataattaaaacctcctgaggaaaacaaagggctatctcttacctaccacgtaaggtagacataatactatttaaaactcggctcacagactctttactagaaatgaaaaatatcttggaagccattttacaggaaactctacgtgcaacatcgacaaaaaaacattcttgtagttacaagagtctactgtgggaggatcctgactactaaaaagttatgagacaagtcattgtgggcacaacatttatttatcaataaacgtttattccgtgtccaggcaagccaagcaccaattctctgggaacctagtcaaggaaatatatgggcatataaagactaggacaggccggccacagtggctcacgcctctaatcccagcactctgggaggccgagacaggtggatcacttgaggtcagaagtttgagaccagcctagccaacatggtgaaaccctgtctctaccaaaaatataaaaaattagctgggtgtggtggtgggcacctgtaatcccagctactcaggaggctgaggcaggagaatcacttgaacccagcaggcagaggttgcagtgagcctataccatgccgctgcactccagcctgggcaacagagcgagactccatctcaaaaaaaaaaaaaaaaaaaaaagactaggacaaaaatacctactttcaaggagttcacagtctacaggaataaacaggacatgtaaatgaacaaaatatgtccccatcctttatgaacctactttaaaaaacaaaaaacagggcaagtatatgtacaggatacaatgggagcagaaagatccccagttctgccttactttgggcaacaaagtaggaggtacacctcgaaggtatgagagtaaacacaggttcaactgaagaactctaatgacttggctagaatacagtatggctagaatacagaaatgtcaaaatgaggacttgtcggcaagggccagaagaccagtcaagccctggacttcatgtgacacaggacggtgaataaaagccgtgcagtcctataacgtgacttgcagttcccaaagactaacctgcgctgctgtactgaagatacagaatgggagggtcaggaatgaggaaaacagaatgggcatctaattccctgtaatgtctttgctctcccttaatctaagctttatgttcaaaataaaagtaccactctcactccacaactcccccagtatctgaagaccaccatggagcttccctaaactggccctccttccaagtcagcaccacacattccccatccactcctccagatttcagtaccctgtacccactggcatcaaagtatgacaggcacctcggaagtgggcacagatacaagacagatctggtctggcaagcacagagctcagcaagactattatttccctcgatctagaaactgagctgctcctaccttaatctaagaaaaaaaaaaaatctgcttttctaggagcttccagaggctcatgataagttcatggttatctaatattttcaagtcttttaccacacaaactgctgctaagctactgttctcttttttcccccttttatttttgttttggagatggagtctcgctctgtcgccaggctggagtacagtggcacaacctcggctcactgcaacctccgcctcccgggttcaagcaattctcctgcctcagcctcccgagtagctgggactacaggcacgtgccaccacgccccgttaatttttgcacttgtagtagagacgggtttaactatgttggccaggatagtctcgatctcctggtcttgtgatcccactgcctcagcctcccaaaatgctgagattacaggcatgagccactgtgcccagcctcccctaatgttttattatgaaattttacaaacatgcagaaatgttgaaaaagctgtacagtaagcaacatcccacttctttccttttcttcttaattttttttctctatcatagcacactacagcctgagctccgcctcagcctcccaagttgctggcattacaggagcacatcaccatgcccagcgtttcctcttcattgctgtgtaatctgtattytaaaaaatctaaacctttatctgttaaaatttttatttggtaaatcagcycaaggttccagccttcaggatattttaaattctgactttgacttgaaacccattagtcttccttctaacaagtgctgtcttcaatctaagtcacttggccacccagtattctcatctacaataaaaaggaagttggactctaaggcatctctacgacaccttctgactcttgtaatgtcagataattcacataattgatgacgttacataggacagagcaatggtaaggctatgtgacacaccaaaagaatctccttccgggtctcccatacagtgagtagagaactgaacttaaaggtcaagagacctgrgttcaagctccagttctgccatccaagttgtgtgactctggacaaatcacttaatcactttatgtatctacaaatctgtttcttctcctataaaaaagaactgataaaatctagtttatagagttcttgtaaaaaataacgtgtaaaccaacaagaacataactcctgatatctcacttccagaagttacttcatcacagatcaaaggtcaaaggaaaaatggtgtaacagtccaaggtcagggatggcaaattatttcagtgactcagaaaccccacccttagaaaaaatcctttctaaaaagcttataattggccaggagcggtggctcacacctgtaatcccagcactttgggaggctgaggagggcggatcacaaggtcaggtgttagagaccagcctgamcaacatagtgaaaacccgtttctactaaaaatacaaaaattagctgggtgtggtggcagacacctgtaattccagctactgaggaagccgaggcaggagaatcacttgaatcgaggaggcagaagttgcagtgagccaagattacaccactgaactccagcctgggcgacagagcaagactatgtccaaacaaaaaacaaaattttatatttgaaagtttgacagtggtgcaaaggaagtctttctaaactaaataagttaaaatagattggaattcaaattcagtttagtaaaagagaagactttttttcaacaagcatttcactggttaggttaaaaagaaattaataaaaaatgctaagaagttatttttccttgggaggctgaggcaggtggatcacgaggtcaggagatcgagaccatcttggctaacacggtgaaatcctgtctctactaaaaatacaaaaaattagccgggcgtggtggcaggtgcctgtagtcccagctactcgagaggctgaggcaggagaatgccatgaacccgggaggtggagcttgcagtgagccgagatcgcgccactgcgctgtagcctggatgacagagcaagactccgtctcaaaaaaaaaaaaaaaaaaaaagttatttctccttgtgtctagtgagtataaagcagtggtacttaatgaggagtaggggataattttgtaccctaggggatatttggcactgtctgtagacatttttggttgtcacaactgggtgggaggcaaggtgctacagacagtgagtgtgtaagaggccaggaatcctagtaaactccctacaacacactggacagccccccacgacaaagaattatacagcctaaaatatcaatacagccaaggttgggaaaccttggtataaggggactggttaaacttggaaggaagggtttgtctttctgtaaaccattccgtaaaaaaggtctcatgtgtacagacaatctgctgagaaagccacagttctggcagctggcaaagctgaaagagaagggaaaatctatgcacagggcccttggatttccacccatatttcccaagaaaggatacagttccagaaaaggctctctctgatctcctggaatgaaatctgagaatgaaccacaggrcctcattgcttacctgtacctcctttttgtagtctccagctggcctggcacagactgacaaccccaaatggatggtcgaaatccactgttctccagtccctctcaaacctcaccggcaagaaggaaagaaactaaaccccgagggcccattatattccagcggggtcctagggattccacactcattcagttccttttcatcataagaagtgggtattataatatcagatccactgtaaaaggtgatcccaaagcaaatggtagagcaggagtctgaatagggacacctccaacagccacacccaccccaccacagctcccaggggtttctttctaatctcaagggtggcctataccctgggactatagggggccttggtgtgctaaatcttcagagacatttttaaacggtcaagacgcctcttggcgactggaggaagttcctgacctcgcggcattccctccttcccatccccactaccacaccaatcctatgccagcctgtctgtgtcagggaagaagtccagctggacaactctggcagcctcctgtcgccctcccctgccagcaatccttctgtgccacagctgtgtgtccacactctaaagcacacatcccaccaggccactctcctgtaaaataatgcctcactgtcccaggccaaataccccagggccgatacctgcttcttcgaatccaggttccaacccatccctccatctcatttccattttacgtgcacacatagtcacacactctcacatacccacactttggctcctactgttcctacccctgaaaaccccttaccattttcttccctgagaaataattgctcgtgggtcccttcaggactcagttccactgccgtgtccttagtgataccttcccttgtctctagttggttggtcccccatccctcttgccttcctggccacagcactcacctaagtgtcttttatccagacaacatttagggtatacttagaccaaaagagtcatcgctatttatctgaaattcacatttacttatttgtaattttcatgtttttggagatggtgtcttgctctgtagcccaggctggagtgcaatagcatgatctcagttcactgcaacctccacctacagggttcaagtgattcttctgcctcagcctgttacttgaaaaacagacgaaaatcaaaggtatgatgtgaatagcatgaattactgctgaaaaatactggcaactatgtgtctctccctttctcttctcatcaactccctctactctgcatgagtcaccccactggcctggaatggaaggggtgacaacactacagattctacagctatgagaggataataagggactattaggaaccactttatgccagtaaattcaagaacttagataaaataaatgaatttcttgaagtacaaactactgaagctcatcgaaaagtggtaacttgaatagctctatatttattgaagaaattggatttgtagttaaaaacctttctacaaagaaaactccaggcatagatggattcactcaggaattccactaaagaagaaataaaacaaattctttacaaactcttccagaaaacagagatttcccaactcattctatgaagccagcatttactttgatgccaaaatctgacaaagacactatgataaaacaaaactacagacccatatctcttgtgaaaataaatgtaaaaattacaaacaaaattttagcaaattgagtctaacaatctagaaaaaaaggataatacatcataaccaagtagggtttatcccacaaatgcaaggttggtttagcattcaaaaatcagccgggcacagtgactcatgcctgtaatcccagcactttgggaggctgagatgggtgcatcacttgaggtcaggagtttgagaccagcctggccaacatggcgaaaccccacctctactaaaaatacaaaatttagccgggtgtggtggtgcacacttgtaatcctggctacttgggaggctgaggcagcagaattgcttgaacccaggaggcgaaggttgcagtgagccaggattgcgccactgcactccagcctgggtgacagagtgagactccatcttaaaaaaaaaaaaaatgcaaaagtcaatgtaactcaccaacattgtaaactaaaacagaaaagccatatgatcatctcaatacacacagaaaaacactaaacaaaacccaacattcattccttatttaaaaaatacaaaactccacatagaggagaacctactaaacttgataaacagcatatatgaaatatctgtagctaatatcatacttaatgacataagactgaacattttccccataggatcaaaaatgagacaaggaaatccacttctaccacgactgaaactgcctttgcaaaattatgactgagacagtgagagatctaacttaactgactccatcttgcttctaacctccaagttgtccttgctcattcctgggtgtagactgaactacctttgggagaaacttagtttatagtttatagtttaaaacaaagacggtaacagccctttcccaaagcagacctccttcttgcctgggcaccagactgccttcgtaggactcacattagacacaagattagaaattatggtttaggagtcatgcagctgaaggctaaagattctgaccctccctaaactgctcttgagatcagtgcttgagaaattttgcagaccctgcacttgatggatcagctggcaccatccagatcaataaactggctcatctgaccttgtggcccccacccaggaacggactcagctcaagaagaaagcttcaactccttttgatttcacccctgaccaatcagcactcctggcccactggcttccccccacccaccaagctgtccttaaaaactctgctcctcaaatgctcagggagactgatttgagcaataataaaactccggtctcccacccagcaggctctgcctgaattactctttctctattacaattcccgtcttggtgaatcggctctgtctaggcaatgggcaaggtgaactcattgggcagttacacttctattcattatgtacttagaagttctagccagtgcagtaaaggaagcaaaaataaataaaaggcattcagagtgggaagagaaaagtacaactgtctttattcacagacaacattgacagaatagccaatggaatccacaaaaaagctttgaaaacaaattacattaaggtctcaggatacaagattaatatacaaaaaccaagtgtatttttatatattagcaatgaataactggaagctgaaattcacagtatcaaaatatatgaaataggagtaaatctgaccacatcccttcaaaaaactggaaagatttgtacacaaaactacaaaatattgttgagaaaaattaaagaaaaactaaataaattgagaaatataacatagtcatggtttggaaaattcaattttattaagaagtcaattcttcccctgaaattatctgcagactcaaaacaatcccgacagaaattccagccagcttttttgtagaatgtgacaagttgattctaaaacagaaatgcaaaggacctaggactggtaattgttgaaggtaggtgataaatacatcacttggtatttcattacatttttctctctactttgtaaatgtttgaaattttccatagtgaaaatgtttgaataaaaactgagattttccaggaacacatataaatacaaaatatccttcctttaaatttttcattacattacaaaaatggtttcctctttcacactaccttaagtctaactccctggcttggtttcccaggccctataaccagtcctctctgcttcctgttcctctatgacaggggtcaacaaaccacaatccagggctaaatctgacccatcacttgttttttttcagcccaaaaactaagaatgttttgaacttttaaatggttggggaaaaaaaatcaaaagactattttgggctggacactggctcatgcctgcaatcccaacactttcagtggccgaagagggtggatagcatgagcccagaagttcaggagttcaagaccagcctggccaacatggtgaaacaccgcctctacaaaaaatacaaaaattagtggggcgtggtggcgtgtgtctgtagtcccagctacctggaaggctgaggtgggaggatcacttgagcctgggaagtcagggctgcaataagctatgatcaggctgctgccctccagcctgagcaacagagtgacactgtctcaaaaaaaaagaaagaaaaaaagaaaatgttattgaaacatagtcacattcattcacatctgtagtggctgtggttacttttgcactacaatgatggagttgattagatgcaacagagaccttaaggtcttcaatgactaaaacatttactgtctggccctttacagacagtctgtcaatccctaatttattatatgccttcttctccctcagctaactaattgcctcaccccaggaatgttcattactacctcttctttgttcaagccccagctactcctcaaaacccaaaattcccttcttcccctttcccaaatcctaaccatatcagcagtttgtgtggaagtaggtaagcaaaacaccattcgttattgtgtaaagcaaggcattggagatgcggtccctacatgtacaaggggaggctgattaccccccgattcatttccaatttctcaaagcaggttggcaggctagcacctaggaaggagagagcgagcagatgatgcagacagagcactgagaaactcctcagtaactcatgagagttcatgtgtcaggccccttgtctgctatgtcatcctttagacatcaattcaagacagcaaaattcaaaaaagaaatgaggaagaaaaaggtgatgaggggcagaaggaaaagagaagagaacttgtcacttcacaatgtagagacagtcacaaactgtggtgaatgaaaaactattccattcacctgggcatggtggctcacacctgtaatcccagcactttgggaggctgaggcagggagataacttgaggtcagaagttcaagaccagcctgaccaacatggtgaaaccccgtctctactaaaaatacaaaaaattagccaggcgtggtggcacacgcctgtaatctcagctacttggaaggctgaggcatgaaaatcacttgaaaccaggaggcggaggttgcactgagccgagatcgtgccacagcctggacgacagggtaagatccaaaaaaaaaaaaaattaaaaaaaaaaaaagaaaagaaaactgtagagactctagcaagaaaagaggtagtcctccattactgggaggcccaagcagaacagcctatgaaggagggggcatagcagagctttaccttgaacacctcaactcatcaggtgtcctgatttcttgagttagcacacaaaatgaagtggcaaaatctgctggcttaacactcagagattactatcttccttgcgtgccatttggaaacaaatagttttgtttgcttgcttgttttcaaacggggtctcactctgtcacccaggttggagtgcagtggtgcaatcacaactcattgcagcctcaatctcctagactcaagggatcctcccacctcagcctcctgagtagctgggatcacaggcgagtgccaccatgcctaatttttttttttattatttttagtacagatgaggcctcactatgttgcccaggatggtcttgaactcctgggctcaagcaatcctccctccttggcctcccaaagtgctgggattacaggtgtgagccactacacccagcttggaaacaaaaaaatgaatctctgtaactgaagtcccaaataggaaaccctgagcttttgaggatacataattttttcatctcctccaatttaaagtggcaaatgaggacgggcatggtggctctcacctgtaatcccagcactttgggaggccaaggtcaggagtttgaaaccagcctggtcaacatggtgaaacccccatctctaccaaaaatataaaaattagctgggtgtggtggtgcttgcctgtgatcccagctactcaggaggctgaggcaggtgaatcacttgaacctaggaggcagagctgcagtgagccaagatcgtgccactgaactccagcctgggcaacagagtgagactccatctcaaaaaataaataaataaagtcgcaaatgagagaggaagcagattttggaagtgcgtagatgcctcaaaggtcagcatttgatcttactgcctatgagttcccagtaaaagcagaacatgtgaaaggactctgaggcacaaaaatacagttggatagtcctgggcaggcaataggaaagttgagtaaatgtgtgtctaaaatgtgcatttctaggctgggcacagtggcttacacatataatcctagcactttaggagaccgaggcaggagaatcactcaagcccaggagtgtgagatcagcttaggcaacatagtgagacgctgtctctacaaaaataaaaattagctgtggtgatgagtacctgtagtcccaactactcaggatgctgaggcaggaaaatcacttgagcccaggaggtggaggctgcagtgagctgtgattgcaccattgttgccctccagcctgggcaacagagcaagacctgtttctaaaataataataataataataat

SEQ ID NO: 95977 - DNA, 24961 bp, Homo sapiens
  misc_feature (1)...(24961): n = A,T,C or G
tttctagctatgggaacttggccaagtcatttagcctcactgagtatcagtttcctcagctggagtaataaatatttcaaagagttgctgagagatgttaacggtacagtccatcgagagtacctggcacgtagtagagacttgacaagtgccacctccgcttgccagcccctaaacttgggctccctcacgcagcttgcatcggggaaaatgctcttgaactggcattggttgaaaacaggacgttggagctgaaagtgggtgaagttcaggtgaggcagaaatcagatctccaaggtctctgcacagatgggagcagactctcctgctggtgcccacagaaattcagccaacatctagagatgtttgttctgagtaggagtcagaggcaagatcaagttgctgaggtctggtttcccatcagggatgacaaaagggaggccaggaaaaggggcaggtcacagggctggtggttcctggtgaaagcagtgcaggcccaattgcggctgggcttaccgccaagtggattaaacactcaatgctctgaaacctgccaggctgacccttgctcagctcaatcagatctgccagggacattggcttgatgaggttaagcaagccattcaaggtgatggacaccccaattaccctgatgtgattgtgacacatcatacacccgtgtccaaaatattgcatgcaccccataaatatgtacaactcttatgtattcataataattaaaaataatttttgaccaggcatggtggctgatgcctgcaatcccagcactgtgggaggccaggcaggtggatcacctgaggtcaggagttcaagaccagcctggccaatatggtgaaatcctgtctctactgaaaatacaaaaaattagccaggcgtggtggcgggcacctgtaatccttgctatttgggaggctgaggcaggagaatcacttgaacctgggaggtggaggttgtggtaagctgagatcatgccattgcactccagcttaggcaacaagagtgaaactccgtctcaaaaaaaaataaataaaaataataatttttaaaaagagtaccatgaaagcaaaagtatgtacataagaggtatcttttggccgggtgcggtggctcacgcctgtaatcccagcactttgggaggccaaggcaggtggatcacaagagtttgagaccagcctggccaacatggtgaaaccccgtctctactaaaaatacaaaaaattagctgggtgtggtggcagacacctgtaatcccagctactcgggaggctgagggaggagaattgcttgatcccaggaggtggaggttgcagtgagccaagattatggcactgcactccagcatgggcaacagagtgagactctgtctcaaaaaaaaaaaaaaaaaaaaaaaaaaaaaaagaggtatcttttgcttggctcttgtccatatctgctgtgtgatcttgaataagtcacttcccctttttgttctctgactacacaggtagacatcagagcatcatgattctctatgttaattgttacaccccataaatgtgccgttgtttcctaatcattcgttgaagaccgagacctttttgctgaggacaggccccctgactggagtcccacactatctttctctcaaagcgcaagaatgagtggtgtgtaatttcctgtttctgtttctttaaaggaaacaataatttaaagccacctgcaaaggcatgaaggcataatcctgggcaaaagtggatttgtttcaacttattttctcaatcttctatgggatcatctcactcttagctaattctacgcaatgcttgcctttattgcatctttccaaagaattggatgttggtttcctaaggacagctctcttttgcactcatctgtttacagatatatatatttaatcaaaaatatttaacaactgcaattgccatgaggacatttgggagcaaacaaaattttatttatttatttagagacagggtctcactatgggagcaaacaaagtcttctttatttatttagagacagcatctagctatgttgtccaggctggtctcaaactccggagctcaagtgagcctcctgcctccacctccgaaagtgctgggattacaagcctgaatcactgctcctggccagaatcttttttttttttttcagttaatttagaaagtttattttgccaaggttgaggatgccaacccgtgacacagcctcaggaggacctgaggacatgtgcccaaggcagtcagagacagtttggttttatacattttaggggacatgagacatcaatcaacgtatgtaagatggacattggtttggtctggaaaggcgggacaactcgaagtggggagggggcttccaagtggtaggtatataagacacaaatggttgcattattttgaatttctgattagcctctctgaagggggcaatcagaaatgcatttatctcagtgagcagaggggtgattttgaatagaacgggaggcaggtttgccctgagcaattccccagcttgacttttccctttagctgagtgattttggggccccaagatattttcctttcacatttcctcccttttctttttaaaaatattttagacaaagcattttagaagaaaatgagtctctagtctcaggtttcatctgatttctcttggctaggatggtttattactataggggtaagtccggagttattaggaaagctcatttttagaaggttgtaaagtctcatgtcctgtgaagagaaaatagggggaggaagggagaacacaacaaacaaaagaacaatcctggaaaatcaagatacaggccagagtactccgaagttcacacatcagcagataggtatgaaagtggcttacgtctgtaaatatgtaattatttttttctgaggtttaagttgtctagctccagtttgcagggctttataaaagcacaacttagttttcagtgattccaaattagggaaaatggggggaaaagaaggaaaaaatttaaaatattattttggagacttgtagccaagaaaaattagaattcagtccaaactatagaaaataataaaaattgaaaaacattaggcaagactagaatgcaacaacaggtgtactatagtttttgaagcataatctttctccaatttcccatttttactaaagatgaatcatggtaagggaggagaccacccctcatattgtcttatgcctaatttctgcctccaaagaaagaagatgtaaaaactaaaaggcagaaatgaaatccacaagcaggtagcctggtgccacaccctgggcctggtagttaaagatcgactcctgacctaataggttatttgcataaaaaaggcactgtgaagatccctgtcctattctgttctgttctaattactggtgtatgcaacccccagtcatgtaccccctgcttgctcaatccatcacgaccctctcacatggacccccttagagttgtgagcccttaaaagggacaagaatcgctcactcggggagctcagctcttgagacaggggtcttgcccatgctcccggccgaataaaccccttccttctttaactcggtgtctgaggggtttttgtctgcagctcttcctgctacaatggtatgactggtttgctttatcatacttggcctaattttttgcatacagtgcagcaagaatcttcaactagtaaatgaagtgagtattgcaaagacagcaccccaccctcatggtgacatttagtcttaggccaaagtcaacatcttatacagtaggagtggagagtgtcaactcatgaataatctggttaagaggttaaggggttgtaagaaagatagttggcatttacaaaatatttcatccaacaaaaacaggaaacacattcttctcaaactcacacagaacattcaccaagacatattatgttctgggctagaaaacacactttaacaaatttcaacagagatatgttatgcaaagcatgccctttactacaatggaattaaaaaagaaacccacaaaagaaagatagctggaaaattccaaaatatatggagattaaagaacacacctctaaataacacatggggcaaggaagaagtctcaagagaaattttaaaatattttgggccaggctcagtggcttacgcctataatcctagcactttgggaggctgaggcagatggatcgcttgagcccaggagttcgagaccagactgggccacatgcagaaaccccatctctacaaaaaatacaaaaattagccaggcatggtggcatgtacctgtagtcccagctacttgggaggctgaggtgggaggatcacctgagcccaggaggtcaaggctgcagtgagctaagattgtgccactgcaccccagcctgggcaacagagtgagaccctgtctcaacaaaataaataaatatattttgaattaaattaaaatgaaaaaacagcctatcaaaaagtgtgggatgtagtgaaagtagtgtttagagggaaagttatagcattgaatgcatatattaggagaagaaagatctaactcagagagggatgaacaggtgaggcataggggattttaaggtagtgaaactgttgcagggcaggggagccccaaaactgggacaccgtccgggaaggctcttggcttcgtccaggaaggaattcaagggtgagctagaggaggaagaaaaaggtttattgaggcagcagggttacagttctgtgactgtccctgcagagcagggccaccccataggcagtgcctggagagcagcagctcggggcacttctatagtcacattcatacccacttttaaatacgtgcaaattaagggcaggttattcagaaatttctagaagaagggtggtaactgggtcattgccagggaatgagtaaactgttcatggtgctggtgctcatgccagccagtcttcaatctggccctgagtcaagccccacctcctatctcaaaactattctgcatggtgctgtaatggtggatacatgacatgttatgtttggcaaaatccatagaactgtaggacacaagagtgaaccttaatgtaaaccttaatgtaaatggacttttgttaattatgatgtattaatatcaattcatcaattgtaacaaatgtatcacagtactgttaataatagaggaacttattggcaggagagagagcttatggaactctctgcacattcagctcaatatttctgtaagcctaaaactgctgtgagaaataaaatccaacctgggcaacatagcaagaccttgtctctacaaaaaataaaaaatgagctgggtgcagtaacgcatgcctgtagtcccaggtattcaggaggctggggcaggaggatcgcttgaacccaggaagttgaggttgcacgagtcatgatcatgcccctgcactccagcctggataacaaagcaagatcctgtctccaaaaaataataaaataaaataaaaatctactaattgaaagggaaaaaagcatagtataataccattcttaacaaaaagaaaagagacctgtgtttgtgtgtgtgttaacatttgaaaaaaatctggaaagctctatatcaaaacgtttatagaggcaattttgtagtgttagaatcatagatgatctttccacttcctggtttttctgactttttttctttttgcagtgggcatgtattgctggaaaataccacagacaactgtgaaaggatttcatcaacaacaaaaaaaagataaagaaggaaacacaaaatctgttaaataagatttatgttggctggaggttaaaatgcatttccagagcagagttcagagaaaggctgggctgcttgttgctggctaaaggacaaagggtaagtttcaggaagcagaagagtgagcagatgaaattcagcactgggatcaggggagtgtctgatttgcaaaaggaaagtgcaaagacagctcctcccttctgaggaaacgaaaccaacagcagtccaagctcagtcagcagaagagataaaagcaaacaggtctgggaggcagttctgttgccactctctctcctgtcaatgatggatctcagaaataccccagccaaatctctggacaagttcattgaagactatctcttgccagacacgtgtttccgcatgcaaatcraccatgccattgacatcatctgtgggttcctgaaggaaaggtgcttccgaggtagctcctaccctgtgtgtgtgtccaaggtggtaaaggtgagtccaggcctgcctggccaggggaggggtggctgaatgtgcaagagttgagattgagaatgagagagagagagagagagaagcaaaaacctagaacccagggtgcaaatgtgagtacagagagctgagatcttctgggctggtggtttcttatttatccacacagcatgttaaaatagattctggggtgaaatcctacatccctattattaacaagtgaccctccccgctacttcccgctgaagtttatgaaccactgtcctgggcgatgcccatttcagaaatagggaactgaatcccagctctggtaaacagtttgctaattcgtggccaggctaggggctcaccatttctgcagtgaagaatcatatgttttgaaagcaaatagcacctgctggctgcaagaccttgagcaagtcacttaactactctgtgttccaatttcctcagccataatccccaatactgttgcagtcttgccagtgcaccttaatgtagcagcttctcactgaattagtacccaaggttctttgtcctgcatccaagaaaattaaggaacatggacacaaacgtgagcttggagcaaaagttcagtaagcaaaagaagaaagctgtctccactgtggagagggaagtctgagtggattgccagattgcagctgaatgcaaaamacttttataagaaaccactctcctccctgtaactgtttgagaaactttttatcagtaaagctgtgcaacttcccttaccttatgcagctgtgggtatatctctaggcaagcataaagcgctgcttctcttgtatgtataactgtggatttgttttaggtaagtcccactccctgcgccagtttcaggcaggccgctcctccagggcccagccttgaccatttacctaactgatttttcctctactttccctcaatacctcatagggccgtgyagattaagtaaaatagtaagtgtgaaccacccagcataagctagtcctgggcatcgtaaaggacaatgggaaaagaacacagatcctggaagaaggcccccaggtttgaattgtatttgccacctactagctgggtgatggggctgatayattatntcactgagcatccattttcccatctgtaaaatgggaactaatgataatggcatccaaatcatagcatcattgtgagcattataggagtttaagacatgcaatgccttcagaacagtggctagtgctccataatgttagtgattgctcctgtcattttatttagggaggtttgcctcactaagcatcaattattatttttgtcgtctttttcagggtggctcctcaggcaagggcaccaccctcagaggccgatctgacgctgacctggttgtcttcctcagtcctctcaccacttttcaggatcagttaaatcgccggggagagttcatccaggaaattaggrgacagctggaagcctgtcaaagagagagagcaytttccgtgaagtttgaggtccaggctccacgctggsgcaaccsccgtgcgctcagcttcgtactgagttcgctccagctcggggagggggtggagttcgatgtgctgcctgcctttgatgccctgggtgagagctcccagcttctttttctccctcttcccatttctgagcagaaatctcccacagtttgagagctttttgccccaacagggcatctctctaaagcagggtgggaggagatcttaggatctgtcccggggcaagaatgaatacggkcatgatctatcacaggagagacattaaacagcaaattggcataatgtggggacaaagacatttcttacagaacatctgcaaggcttactggttctgtttaaggcaaaatgtgtgaattttatctttctaaaatcaggcagcaaagatgtggcttaaagttcatgttactctcatctttgtcccaacatgagatctcatcaaacgtatgcagcacgttgggagatagatatttataatttgcaggaacatttggacaggaagtgtaacctctcagaggctcccttgccacatcaggagaattgrtaaaaccacactacctgtatcatatcattattttaagtgataaatgatcatctacattcagctctgatgagtaataggtgttcaaaaataggaacttccagccaagtgtggtggctcatgcttgtaattccaacacttttggaggctgaggcaggagggtcgcttgagcccaggagttcaagaccagcctgggcagcaaagtgaaacctcatctctactaaaaattttaaaacattagccaagtgtggtggtacatgcctgtggtcgcagttattcaggacgctgagactgaacgatcacatgaggccagccaaggattcgaggtgtcagtgagccacgaatgtaccactgcactccatcctaggcacagagcaagagcaagaccctgtctcaatcaatcagtcaatcagtcaaaactatgaatttcccagctgtatatgaaggcacctcaaaacaccacagtgaactcacagagggacacggaatagtttagattttaattttttgagggaaatgcgatgacatctgtcacacaccgcacaaacggctactattaaactgaacttactgattagtggctactaattaatagttggtcattaagcagtaattagtgattaattatcaagtaattaggacttaattaaaggaactgtcacagtttcctttagtcctagggcagccatgaaaaaaaaaatgctgactctccaaagacaccagggtatgagaaagttttggattctctcctttgtgccatctcctgtgttgggggctgaagtacaatggttgtaaaagacaagagggagaaggctggtcacagtggctcacgcctgtaatctcagcactttgggaggccaaagtggggggatcacttgaagtcaggaattcaagaccagcctggccaacatggtgaaatctcacatctactaaaaatacaaaaattagctgggcgtggtggtgtgtgcctgtaatcacagctactcgggaggctgaggcaggagaattgcttgaacccaggagatggaggttgcaatgagccaagatcatgccattgcactccagcctgggcaacagagtgagactccatctcgaaaaaaagaaaaaagaaaagaatataaggagtgattaaaaaagaaaagaaaagaaaactaagtagggtgaaacaatagatagccatgggggttagggagcttttttagacagggtcgtgagggagggtccctgagcctgagtggcgagaaggagtgagccttggggagatctggaggttctgggaagaggaatggcaagtgcagaggccctgaagcagcaatgaccatggcacatttgaggaagagagaaaaagtcagagaagtagaaagtgggcaaaggaagcaagacaggaggtgaggtgggagaggttccagagaccagatcacaccagacatcattggccaccataagatctttgggttttaaaattccagatgttatgggatgcaggaagcagcatgatcagcagcattctctaggtgccaggttgagaacaggctgtgggggaacctgtaaagaggttgctgccatagttccggcgagtgayggtggtggcttggatggggtgatggcagtggagagggcaggagggaggatcaggaatggacctcaagacttcccagccctgggtctsctgcacttttcaatcaaaccccatggccagggagattgtcccctcagagtgactgaaggaaattcagagaagagctgacacctaagttgtagattttgccygaacaggtcagttgactggcngctataaacctaacccccaaatctatgtcaagctcatcgaggagtgcacckacctgcagaaagasggcgagttctccacctgcttcacagaactacagagagacttcctgaagcagcgccccaccaagctcaagagcctcatccgcctagtcaagcactggtaccaaaatgtatggccctcccaccaggcctggtgggtcctgtctcgactgggagcagaggaggggtggggggaggagagaaagaagggagtgaagggaagaggagggggagtggtggagggaaatagagggatggaaaaaggagagaaaggaaaaagaggtggagagaggagcctgcaacagaagggagaatgaaagggaaggaagagagaaaggaagggattttggtgttctgttcactgctgtatccccagaacttaaaacagagcctggtgcataataggtgtaaataactgttgaataaatgaatcaatgctacatacacacacgcacgcacacacacacagagagagagtcaaccacactcttcagaaggtggataagttaaaacaagagtttcaaacaaatatatgttcagatgccctttcctcccacttactggctggctggccttaagtaagcaacttaacctttctgttctttctgctttcttatctgcaacgagtagcatgccatagctagagtaacacggcatatagttggtcctgataaatgtagcatattttagccaccataggagtacacataataaaagctaacatgtagtatgtgcttagcttatctatgttttgtggatgtgatacaattttctgttcacttttaaatgccctgcatcttagtcaattttaacagtgattctgtaagttagataaggttaggcattattattaaatccattttacaccaagagaaacttgggtcaaaaagagaaactcctgggtcacatggctcattcggccaataagtagcagaagtaaaatttgaatttggctgggcgcggtagctcacaccagtaatcccagcactttgggaagccaaggcaggtagattgcttgagcccaggagttcaagactagcctgagcaacatggcaaaacctcgtctctacaaaataaactaaaaatttagccaggtgtgatggtgagcacctgtagccccagctactgggtaggctgaggtgggaggatcgcttgagcctgggaggaggaggttgcagtaagtcaggattgcactactgccctccagcctgtgagacagagcaagatcttctctcaaacaaacaaacaaacaaacaaacaaaaactcgaatttgggtctattgacttaagagtttgcctgataataataggcattcaatgtatatttcttgaatgaacgaatgaatgaaaataatcaggaataaactttccaatttaaaagtaacacctctaggtaaaaaaaagacaatcatttagttgccagacttctaagtgtttgctgttctatgaattgtaatcatggagcctgagcattgtagaatttacaaaagcagttcctgacaaaagcagcactgcccccagggacatattgaaaattaatgagggtgtttttggtaaccatggtgatgggaggacatgggtgctacttatatttagtggaaagaagacaagaatgctagttattgtacaatgatcaagagagtcctgcacagccaagaattgtctttttctttctttcttgatgctgttctcctttaaaacaagacaagattaacaataatttaactccactaaccaccatcatcaccacctccaacttatatgctacatttcttgtatatttcaagtctgtttatattttcaagtgcctcgaagtattattgttttatagccaaatgtttagttaatctgctcacagatttaccactttcttcactattcattctktcttacacctctaacattccatctggggtaattttcctaaatgatcatgcatcctttgggatttcttttgatgatggtctattggtagtaaactctctcagttattgtttgtctgaaaatgtcatgcttttgccttcattgttgaagggtgcttttgctgggtggtcatttcagtatattgaatatatcattccatcttccagtgtcatcattaaaaagtcagttgccagtctaactgcagctcttttataagtaacctgtcttattcttctggctgcatgtaaaagttttctctttgtctttgattttgtttagcttcaatctgctgtgtcttaatgatgggttcctattgtttgtcctgattgggattccgttaagattcctgaatctgtgggtagatatctttaatcagttttgaaacttctcagccattcttctaaaatattgattctccttcattctctcctcaccttctagaattccaattaaatgtatgttagaccctgctctatctttcatatctctatactctcttctgtgtttttcatccttttgtctatttttccatgctttattctgaatagttccttctaatctaccttccaattaactaattttctctttagctatatctaatttgctgtaattaattacagttgccatttttatcctaaaatttctatttcatatttttgtatctgccatggtacttcttatggctttkaattccctgctaactatttaaagttcttattttatcctgtgaatatgatattcctagttattttatttttaatttttattatttgttaatcttatgttttatttacacttcttttctgtgacatgagcacacacagattcatgtgtatacatatatggctctgatacctctcctttcctgtcctcattcaaaccactgatcacagagagaggactatttttttttatttttaatttttctatttcaataggtttttgggggaacaggtggtgtttggttacatgaataagttctttagtggtgattttggtgcacccatcacccaaacagtgtacattgtacccaatgtgtaatcttttaacccttgccacaccccaccctttccccgcagtccgcaaagtcccatgtatcattcttatgcctttgcttcctcatagcttagctcccacatatgagtgagaacatacaatgtttggttttccattcctgagttatttaattaaaataatagtatccaattccatccaggttgctgtgaatgccattattttgttcctttttatggttgagtagtattccatggtgtgtttgtgtgtgtataacatttttctttatccactcattgattgatgggcattygggctggttccatatttttgcaattgcaaattgtgctgttataaacatgtgtgtgcaagtatcttttttgtataatgacttcttttcctctgggtagatacctagtagtgggattgctggatcaaatggtagatctacttttagttctataaggaatctccacactgttttccatagtggttgtatgagtttacattcccaccaatggtgtaaaagtgttcccttttcaccacatccacaccaacatctattattgtttgattttttattatgaccattcttgcaggagtgaggtggtatcacattgtggttttgatttgcatttccctgataattagggatgttgagcatttttccatatgcttgttggtatttgttttttttttttttttttcattattatactttaagttttagggtacatgtgcacaatgtgcaggttagttacatatgtatacatgtgccatgctggtgtgctgcacccattaacccgtcatttagcattaggtatatctcctaatgctatccctccccaattccccccaccccgcttgttggtatttgtatatcttcatttgagaattctctgttcatgtccttagcccactttttgatgagattttttttttcttgctgattcgtttgagttctttgtagattctggatattagttggatgtatagattgtgaagattttctcccattctgtgggttgtctgttaactctgctaattatttcttttgctttgcagaagctttttagtttaattaagtcccatctatttatctttgtttttgttgcatttgcttttgggttcttggtcatgaagtctttgcctaagccaatgtgtaggagggtttttccaatattatcttctagaatctttatggtttcaggtcttagatttaagtatttgatcgattttgagttgaattttgtataaggggagagagaaggattcagtttcattcttctacatgcaacttgccaattatcctaggaccatttgttgaatagggtgtcctttccccattttatgtttttgtttggtttgtcaaagatcagttggctgtaagtgtttggctttatttctgggttatctattctgttccatttgtctacgtgactatttttataccagtaccatgttgttttggtgactatggccttacagtatagtttgaagtctgataatgtaatgcctccagatttgttctttttacttagtcttgctttggctatgtgagctcttttttggtgccatatgaattttaggattgttttttctagttctgtgaagaatgatggtggtattttgatgggaattgcattgaatttgtagattgtttttgggagtatggtcattttcacaatattgattctacccattcatgagcatgggatgtgtttccatttgtttgtgtcatctatgattttctttcagcaatgttttgtagttttccttgtagagttcctagttattttaaagtctgtgttcggtctttcagcatttaaagtttgtaggtttattactatttctcttctttctgttggtcataactcttagtgttttgtttccttgtgtgcctggttacatatgtgctggtcattgtatttgaaaattatgtgtgaaataatttgaggttttggattatgtatattcctccagaaagaatttcatttgcttctgtgcatttcttaggaacattacaagtccttcttctcagttaattttcgtagtatctttatcagataggtgctattacaaccactcacttagcagatgaaaatcatgaggctctgagagtctaagtcatctacttagaattggacaatggtgaagccaggattcaaacccacatcaataagaatccagcgctcttaacaaggggccagtacacttttttaaaaaataaaaggctagatagtaaatattttagactttgtggactgcacagcctctgttgcaactactcaaccctgcctttgtagcatgaatgcagtcataaactatacataaatgaatgagcctggattcgttccaaggaaactttataaaaacaggtggcaggctggatttggcccatgagaagtgtagtttacacaaaagttgagcaaaccaatttttttctgattgtttttcctcttctcagtgtaagaagaagcttgggaagctgccacctcagtatgccctggagctcctgacggtctatgcttgggagcgagggagcatgaaaacacatttcaacacagcccagggatttcggacrgtcttggaattagtcataaactaccagcaactctgcatctactggacaaagtattatgactttaaaamccccattattgaaaagtacctgagaaggcagctcacgaaacccaggtatgctatccccacatggcttagctcccctatgtaaatgaacacctggatacaggtacagtgccttggaaatggaggaggtgggagggctccccacttagtgagaatctcctgttgcccatcattgtactgggcattttactactgccatctgttttaaacacctacctccaaccctgtgaggcaggcactatgccaattattttacaggtgagtaaactgaggttctgagaggtaaggagcttgtccaacccttaacagaaaatgagtaaaatagctgcagtttgaactgaaataagaacagcagcaacaacaatgatagtaattgctcccaggtattgaaagcttgttgtaagactaacacatgctaatataatagtaaaaattattagcaatattactgatatgtatgttatgttctagtcgctgtgctgagcatttcatataactgggctttttctatcctcacagcatagcctttgagataggtatgtggaactattcccattttacagataagaatcctgaggcttagagagttcaagtgacctacccaagggcacatcactgataaagggcagaggtgggattcaaacccacatctgtcaggtgcaagtgcaaggctccttctcctcatgctcactgcctgctggggaatagggcactggggacataccccagggagcccttcctcatgttctgagtcccagttcatcccatgctgctattttkctctcccaggagcatctggactccctagacagagccccagcttctcacctgtccctctctaaatgctgctctgcaggcctgtgatcctggacccggcggaccctacaggaaacttgggtggtggagacccaaagggttggaggcagctggcacaagaggctgaggcctggctgaattacycatgctttaagaattgggatgggtccccagtgagctcctggattctgctggtgagacctcctgcttcctccctgccattcatccctgcccctctccatgaagcttgagacatatagctggagaccattctttccaaagaacttacctcttgccaaaggccatttatattcatatagtgacaggctgtgctccatattttacagtcattttggtcacaatcgagggtttctggaattttcacatcccttgtccagaattcattcccctaagagtaataataaataatctctaacmccatttattgactgtctgcttcgggctcaggttctgtcctaagccctttaatatgcactctctcattaaatagtcacaacaatcccatgaggcatttttaaaaattttttattattttagattcagagggcacatgtgccatttgttacacagctatattgtgtaatggtggggtttgggcctctattgatcctgtcgcccaaatagtgaacagagtacccaaaaagaattttttcaacctttgcctttctcccttcctcctccctgttggagtccctagtgtctattgttcccatctttagcagatgttaagtatttgattttctgtttctgggttaattcacttcggataatggcctccagctgcaaccatgatttcattctttcttatggctgcataatactccatggtgtagatataccacactttctttatccagttcacactgatgggcacttaagttgattccatgactttgctattgtgaatcgtactgcgataaacatacgagtgccggtgtcttttgatagaatgatttctttacctttgggtagatacygagtagtgggattgctgggttgaatggacattctacttttagttatttgaaaagtcccatgaggcatgttttctatcattcccatcttacagatgagacaaaggctcagagaggtgaggtcacttgctcaaggacatcagctaacaagtggtggaaatggaattcaagctcagtggactctaaagccagtgctcatgtcactgtgctaaacagcctgccttgtcacatccccacctctcatctgaccaatgggagactctgagcagctgagtgacttgggttgtcacacagctaaacaggggcaaaggacccagtcttggatctttccacctccaagcaggaatctgtctgattccaggggattgatgatgttgcagatggctaggaagcagactccaggatggaatttagtatgcaggatgttctgggggagagccactggaaccagcactcagggaaaggggggaagaaaggataggaaggaagcatgaaagagaatagggagaagtgaacagggatgcagagcgaatgccagtttcagccaactccaaggacagccctggagctggaatggcctttagagctgccccatggtgacagaggtggccaggcttctatacccctacgtggatcactcactgtgcttgggcaccttgggaaagggcatggctttgagcaaaaggctctctgcagctgaggcaacccctaaaagggctgacggctgaagtctgtctgctgaccactgtcccagcagctggggcttgttagtccttcctcaaagggggatccagatggcatgtcacagtgtctaccgtaaatgctcactgaatccagctgcaatgcaggaagactccctgatgtgatcatgtgtctcaccctttcargctgaaagcaacagtncagacgatgagaccgacgatcccaggasgtatcagaaatatggttacattggaacacatgagtaccctcatttctctcatagacccagcacactccargcagcatccaccccacaggcagaagaggactggacctgcaccatcctctgaatgccagtgcatcttgggggaaagggctccagtgttatctggaccagttccttcattttcaggtgggactcttgatccagagargacaaagctcctcagtgagctggtgtataatccaggacagaacccaggtctcctgactcctggccttctatgccctctatcctatcatagataacattctccacagcctcacttcattccacctattctctgaaaatattccctgagagagaacagagagatttagataagagaatgaaattccagccttgactttcttctgtgcacctgatgggagggtaatgtctaatgtattatcaataacaataaaaataaagcaaataccatttattgggtgtttattaacttcaaggcacagagccaagaagtacagatgcatatctaggggtattgtgtgtgtatatacattgattcaacaagaaatatttattgagcacttactatgtgccaagcatagctctgggcactgggaatatagcaatgcacaaaagcagacagaaatccctgtcctcatgaccctgcagagccaagacttccagaattttttaaataaaaaaatccctgtcctcatggagttgacatttgtgcaaaacatcttaatgttagatggttttcctattactaataattctgaaataagcatccttgatttatcctttctccatatctctgagaaaaattatagaacctccctgtgtgacacagcagccactagccacatgtgtcaaatgcttaaaatgtagctagtctaaatctacatgtgctgtgagtgcaaggtatatacttggtttcaaagacttagtacaaatgaaaagaatgccaagttcttgccaactgataatttttttaattgtgtgctgaaatgacaatttttaaatatatttgagttaaatcaaatgaacttcatctctttcttttccctttttaattgtggctactagaaaatgtgaaatcatacatgtggcttgtgttatattatgtatttctattggacagctctgtcctccaaggtaaatcactggattaaagattcgactatactgacttacattgccacattgtcacactgtccttgggaccaagaatcaacatatcattcataagactctaaaatataaaactctcataaatactcacaaaagaacctagcatgctctgatcacctgagttgctggtcacttttggtggctggtaagcagcctttggtccgtccagattatattcttccatttagtccccccacatccctgtgagatgggttttgttgttattctcataatattaagtggaataacttgaggttctaagaggttacagtgcttgcccagggtcacccagctggtcaggggcagagtctgaacttgaaccctaatccttctctctctaaagctcatgttcttaatcactgcagtatggtcttaatgtgtcctcattcattgaaagcttatgttttcctactctggcgccatgagaaccagaagcatcaatgtccaggggcagggaaagatgaatgtcccagctcaacctgagcacagattcacccttcctcggtctttttgtcctatttgtagactggattagatgatgccagtctactgattcaaatgtgaatctctttcagaaaaaccctcacagatacacctagaaatgatgtttcaccagctatcttggcacccttagcccagtcaacttgtcacataaaatcaatcatcacacactccatgctgataggcaagtgtggacatcccagtgtaatggcttcattgtattttaccgtgtggaaaatgcacttgtgttgccttttgagagtgtttcattttatagcaatgccacaaccaacagtagattaatggaatcagtaattagttgcttgatcgaagagccacatggccacgtgatcagccttccatctacaacaggacccaggagtataccaggattgtttttcaaagggcatagacatttttgctgcaaatgacatgggcttactccagagtcctggaggggtctgtgttataattctctaaatagatattgccataatctctgaatgacaccttttcccatgactaacactttgaacaccatggggtctgccaggctggtgtgggccaagtagaggggcgacttgcaccacagcctataccagctgcagagccctttaggacttaataaaagggtgctaatttctgtatttccctggctctgagatgtaatagtggttttaatttactatcctggccagggaggtggcagtttcaaaggtatccccatgaccttcctcactgtgatagccctcacttaaccctcaggccaatgtggggtagtgtcttttaccaagcatgtcctttttgaatatacattcaggggacagggaaatgatcaccaggtcggtccatagacacagtgggcaaatgacaagcctgacttggccagggctccatttttcactcttggctcctatatgcccctactctgatggggacagaatctgatgacgcttttcgttatcagtgttgatcctctgcccaacagtcttagaaatgttgagtgactccccttttccagtgtatcatcctctgaataaatggccataggtcctttgggggaaaccattactatatatgctatggtgtcacagcrtcctttcccaaggggactctgcctcctctttgttaatggggtctagtctgaaaactgggttggtcagttccaaaaatcaggaagggatgatgactttttattggaatggctccccttaaccccctggtcgtccggccttgatttcttctaatggtataaattgagtagtgccctttcaagatactcatccactaagtcactaagaggccacattgtgttaaccaggtccctaaccctgtatcagtcacgacccctggctgcccctccaacctcaccgttcattatagtcattgcacccacctggcttctattgctctgggagtcctgcctgccctattgcccttatcaatccaagctctgtaacagcccctcttcccaggaggccaccaccagaacacctcatgatgcaggtgtccctctctccacacattccttatggccttggggaatgttttgtcccctgggactctatttccagacttacatagtaaacatatccactcctcttcactgtgcccatttcccttggcctcttaacaccttcttccaccagctccacagcaattctggaatttcatacttttctgcatttctaggagccatcctaggagtcagggaaaacctcggcttcacaagtaaatgggacttcagttgtgtgccaacatgcctggctaatttttaaatttttttgtagagatggggtcttgctgttttgtccaggctggtcttgaactcctggcctcaaacaatctttcctcctcggccactcaaagtgctgggatcacagctaccattcccacacacattttcttatttttaaaggctgtatgtgcactgtatacattaaatgtgtgcactgtatacattaactgtgtgcactgtatacattaattttctttaacgaatttatccatttatagttgctttggttgtttccacttgattattgtgaatagtgctgcagtaaacatgggaatgcagttatctctttgatatcctgatttcaattcttttggatactcagaagtgggattgctggaacatatcgtagttccatttttaattttttgaggaacctccatactgttttttacagtggctcaccaacagtgtgcaagagttcccatccctctacatcctcacacttgctatcttttgttcattctttaaaaaatgatagccatcctaccaggagtaaggtgatattgcattgtgattttgatttgcacttctctgataattagtgatattgagtatattttcatagacctgttatccatttgtgtgtcttctttggagaaagatctattcctatccttagcccatttttaaatcaagttattaatttttttgctagtgagtggtaggagttccttacatattgtggagattaacccttattagatgtatggtttgtaaatgttttcttcattccatagattgtcttttcagcccgttgattgtttcctttgctatgcagaagctttttagtctgatgtagtccaagttgcctatttttgcttttgttgcctgtgctttgcatacgtgtccacctgatctttgacaagattgccaagaatacacaatggggaaaggacagtgtcttcaacaaatggtgtttggaaagctgaatgtccacatgcaaaagaataaaattggacccttaccttacagcatacacaaaatcaactcaaaatggattaaagacttaaacgtaagacctgaaactgaaactactagaagaaaacttaggggaaaacttcatgacattggtctttccagtgatttcagggatgtgacaccaaaagcacagacaacaaaaggcatttatttttatatggcatgtgaggaaggggttcagttccagttcttccaatgtggatgctcaattatcccagcagcatttattgaacggatcatgttctctccacttctttgcaaagccacctcttaaatattcccagagcccatctatgtgggagtctgtttctggactctgctcttttccattggtctattttttgtgtccttcagttaacacaaccttgtcttaattactataaccttataattcttagtatctttgggagaactctgttctctttttatcaagtcattggttcctcttggccctttttatttctacattaattttatactcaatttgtgaagctcctcccaaaatatggggaggcatttgattagaattacacatattagcttgggaagaataacatctatattttatatatatatatctatatagaatttgatgattctgatccatgaacttggagtttcttttcattaatttttgtcctctttagtgacagtgacaatgttttatcattttccctgcagaggtctttcatggtttttgtcgtatgtattcccaaatatttgtttcagtactatcgtacttggcatgctttctttaatttcattttgcaatggttgcttcatgggagacttaaacattttcagtggtgatatttggctatagcattataggtgatctttatacttttctaaattttctgtggccacgggaaataataaagacacttttcttgcacagaaaaaaaaaacttttgggaagtatttctcacagctaagatctgatagtttacgcaaagttggcaggcacaggctacagaaagctctggggtgctgttgtttggagctgctggttcaaggacaaattcacaagatttggaaacagaggagcaagtgtgtaaggacgagggaaactatggtataacattgaagcacctgagctggaaatttctgagccctcagagataaatttcctcagctcctccctgccgagaaaacaaaactaaaaagagttaatgtttagccaacagaaatgagagtgaagttcacagaagaaattagggcacagctggaagtgttcaaaatgaggaaacgttcaatgtcaagtttgaggtccagggttgatgggtgaactckgcacgctcagcttcatgttaggtctcccagctcaacgagggggtgaattttggtgtactgctgtctttgaggccctgcgggaactctcccacaccctcccccttttcctcacacaaatcccctccttgcacacccctcacgcctgtctgtgaggtgccagggcccctctcccagccaaccacaggccagtattgcccctccccaaacttcccttcaggcagatcaaacccagggctctggagtcacactgcctgggctcaaatcctgcttctgaatcttatgagatgtcaagtcacttacctaactccttggtgaaacaggctctcctctgtcaaataggtgtgcatgctttgggaggccaaggcaggaggattgcttgagcccaggagttcaagaccagcctgggtaacgtagtgagaccctgtctctataaaaataaaaaaattagccaggtgtggtggctcatgcctgtagtcccagctactcaggaggctgaggaggaagaattccttgagcccacgaagtcaaggctgcagtgagccatgatcaagctgctgcactccagcctgggcaacagaatgcgaccctgtctcagaaataagtaaataaataaatacataaataaatttgggtgcaattgtggctcttagtgttacagagaggactgaaggagctaatggatgatggatttatggcagtacctcacatatagctt

SEQ ID NO: 95978 - DNA, 45806 bp, Homo sapiens
agagagacagagagacagaaagaagagagagaaagaaagaaagaaagaaagaaagaaagaaagaaagaaagaaagaaagaaagaaagaaagaagcaaacaaacaaacctgtcagccaggcacagtggttcacacctgtaatcctagcattttgggaggctgagacaggaagattacctgaggtcaggagttcgagaccagcctggccaacatggtgaaaccctgtctctactaaaaatacaaaaattaggctgggcgcagcagtttacgcctgtaatcccagcactttgggaggccaagtcaggtggatcacgaggtcaggagttcgagaccatcctggctaacatggtgaaatcctgtctctactaaaaatacaaaaaaaaaaaaaaaaatagccaggcgtggtggctgtagtagctggcctgtagtcccagctactcgggaggctgaggcaggagaacggtgtgaacccgggaggcagaccttgcagtgagccgagattgtaccactgcactccagcctgggcaacagagcgagactcgtctcaaaaaaaaaaaaaaaaattagctgggtgtggtggtgggtgcctgtaatcccagctacttgggaggccaaggcaggagaattgcttgaacttgggaggcggaggttgcagtgagccaagatcatgccactgcactccagcctgggcgacagaataagactctgtctcaaaaaaaaaaaaaacaactacctgttggtactatgttcactacttggacaatagaatcattagaagcccaaacctctccatcatgaaatatacccatgtaacaaacctgcacatgtatccctgaatctgaaattaaaactaaagaaaaaaatagattcaaaaccgtgtagtgcttgacatctctcacctgtagggccccaagcagcctcctctctggctcctctcctgcattgccccagagcaggcagagtgaaaatccaaccaggtccctcccctgctcaaactcctttcatgcttccctagtgctctcaggtggaaacacattagcttcacctacaagccaccctgcctgatggagcaactctgcccctcttcagcctcacctttcaccatccctccctgacgctgggctcagcctgaatgcaccgtgctcatccacgccacaccttcacccacagcttttcctctgttcacaatcagatcattccctcccttttctccactgtggggactcagatttctccttcaatacccaaccctggggacccttgttgggagcctgtcctggatcctttccccaaatctaaggcacagcccattggtttgaccactgcccaattctccactgcctccctctgttagaatcatacacctacaccttgccatgtggcttaatagttactatttttagagacatgctcttactatgttgcccaggctggcctcaaactcctgggctcaagtgatcctcccaactcagcctcctgagtagctgagactacaggtgcacaccacagtgcccaggttttttatctatttatttatttattttatttttgccatgtggctttgctgttcttctcactagagtgggtggagcacatgtcccctccccattgatgttggtctcagctgtgtgacttgctctggccaacagcatatggcagaactgacagtgtaacagttctgggctgaggtcttaagagccgtcatgcgtttcttctcacccctcttgccattgcccttgagaagaacgtgcccccagtggccactggctggggaagacacaggggacatctgcagaccttaatccttccccacattccaaagcagaaccaccctaaccctcccacagacccaaagcatcggaaacaaatgtttcttataagctgctgctatttgggggctgtttgttatgcagcattaccaagcaacaatagctgattaaaacaacacaccttctctctgacttccttggtgccctgtgcttcccccgtggcaacacttttcacactttgttaccatcatctggttacctgtgtgtctcctcataataatctcaaatttatgagtgtaaagaccatgtcttactatctctgtgtttctagaatgtctaacatagcaggtactgaatatgtgctcaatcaatatctgatggatggatggatgggtggatggatggatggatggatggaaagaagggagagaggagagagaaagggtgatgtgtggaaggatggttagatggatgaataaatggaaggaaggaaggagaaaagaaggaaggaaggagagaaagaatgaagaaaggaaggagggagggaaggagggagggagggagggaagagggaaggagggaaataatgaaggaaggaaagaagaagagagggagggaaggaaggacagaagaaagggcagaaactatatacaggaagtatttgggaccagctttaacgtaccatagtttggcttttagttttaatttcgagaggtttaaaaatctgttttccattatttgaatgattttttccttcttcacagaaggaaagacagattttgtatctgtgtctctatttctttggtaacaaagggaaccggtgatatctttctcagtggataccatttctattggggtggtctcagaatgagaactaatgctgccatcatcttgatacttcttgtcttatctaacagcaaaaatgttaaaagtagataataccaggtgctggtgaggatataaggagacagacagtctcctgttcatcgtcagcttcccatttgtcttggttcacacatgaggggtacttctcagggtgggcagaggaaagttgggagatcccagccctcaacacccatcccacctcattcccccctcagctcagctatcctgagagaggactgggtcccagccacagctcatcgaaaggaaaaggagacaggatgtcttaggggtggggtgaggtgaaggagagcagcccacccagatggttctccccttcccagagcccttacctttccagtcagctgaacctcggccccctccccctgcagcctctgcaccacctgcagggaggtgctctcggggagcacgatggtggcaggaatgcccagcttcctagcagcataggcagcagcgatgcccgcattaccccctgtgcagaaaggaggaaaggggcagtgggcagagctgattggcctttgatatgccttcccctccccctccatatcccttcagagtcactcgtccccaacattcatatgccccattgactccttcctccactcaagagggggacacataatttaggttgagccaatcagaacctaatcccccaacccatgattggttcaaggatgaagacgccacccaagcggggccaaaaaaaaaaaacaattccaggattgaggcgaggcatcgagaaggggtgctcccttttccctagggttgggaggctggtaggatgcaaggctggaattcctggtggccatcttgctaccatgaggcccacctaaaaataaagctaatatgcaggaaagcaaagtccagagaaggagagacagagaggagagctcctggatccccctgtgcctgaaagccacttatcccaagaattttccattcttagagcctgtagcttaaacctatatgaattgggtttctggcacttgctaccatcatgagtcctgaactatgggagaaggctaggatgggatgtacacagtagtcatctcatcaatgaccttgatgaggctgggcctttaagaggagaccaaccctggatgtgtactgccgctccagcctattcctcctcccccaacctctgcccatgaaacaaaaaaaggtggggtcacctgaggagcacaccaggtgtctgcatcccttcttggccatctgggaagagaaggaatggggttagcggctaacccaagcaggtgtcatgaaggcctatgtggaatggcgttagagtctccccatcccactcccaatacgcctttacccctcatcctgcccacagccctgcccttacctttcccctcccatctgcacgagttcatgtttcccctcctgcccgaacccgtccccagcccacacccctcactcttccctccctcctgcacaacctcacttctcccctccttcccacacaccctcacctcctggcagaaatgcccaatgccccgaatcttgaaggagccgctgggctgcacattctcacacttgaggaagacaggcatgcccgccacctgggacagcgcccagctctccaacagaggtgtgaccacgtgaaagggctcctgcttggcatgctctgccacagggccgtccattctggagaccaggtagacagcctgcaggaggacacaaagtcaccacccaggcagtccccatcaagagttcccttaaccaggacagggaggggaaggtggagaaagcccttggcttaggtgcccttcacttcatccagctgctgagctgtgagacccccatcaagtatctgtgactctctgggcctcagtttccccatctggtcaaagaagtttggcctggggtcctttcattccataagtgtggctgtgctggggatgtagaaagtggccaatatatggtgagaaatgaatgagagagtgggagaattcattcctcagtcaaaaaatacttattcagcacctactatgtgccaggcatttccaggtttggggacccacgagtcataaaaaacctcccactaggaaaagtcacagaatttcaaataggagtgacttgcagagggtatggggtgttattttagcaaaagcaatcatgaaagacatctctcaggaggaaaactttgtaaaaacgtttgttatggaaaatgtaaacatagcaaaagtattgagaactgtataaagaccttcagctggcaggggcacagcggctcacgcctgtaatcccagcattttgggaggccaaggcaggcagatcacttgaggtcaggagttcgagaccagcctggccaacaaggtaaaaccctgtctctactaaaaatacaaaaattagccaggcatgatggtacacacacttgtaattccagctactcagaaggctgaggcaggagaatcacttgaacctgggaggcggaggttgcagtgagccaaggttgtgccactgcactccagcctgggtgacagatcgagactccgtctcaaaaacaaacaaacaaacaaaaacccttcagcttcagcaatcaactcatggtctaactcgctcccctatcggtgcccactcccccttcctgtgtcattatttaccccttaattactattattcttttatattatttcacctgtaaatatttcagcatgtctctctggaggtaaagaacttgtgtttttgagacagagtctcactctgtcacccaggctggagtgcagtactgtaatcacagctctctgcagcctcgacctctcaggctcaagcagtcctcccacctcagcctcctgagtagctgggactacaggcacacatcaccacgtctggctaatttttgtacttttttgtagagatagggtctcactatgttgcccaggctggtctcaaactcctaggctcaagggatcctcctgccccagcctcccaaactgctgggattacaggcgcgagtcactgcatctggcctaagaactccttttttatatgtaaccatatggtttcatgactgtacatacatttgttcaaacacattgaattctatacttaaagtgggctaattttattttatgtaaattatacctcactgaggctaatttttttaaaaatgtaatcacaatactatgatcacatctaaaaatataattttttcatatcatcaaatatctgttaattgttcacatttcaaatcatcccattaaatatgatcagtggctgattctgtggttggttgtggtttggggtttttcacggtttgaatcaggatgcaaatcagatccgtgcattttgattggctgaggggtcttttaactctgcctccatctgtacgttcttgaaaggggaactttgaaatggatgacaggaagagagccaagaggaaaagttcctacagagaacagcagccaggaccacctcgagggagaaatgcactttggggtgccgcggatgcagacagaaggrgtttgsggcaggaggtgagggtagggggtgagggcggagatgtggacaagggtgccagcagggggttcccgcccacggagaggagtttggttgttattcaaattctacctgcaatggaaagccattgggaggtggtggtggaggtggtggtggtgttggtggtggtcgtggtgttttgaaagggagtctcgctcttgcccaggctggagtgcagtggtgcaatctctgctcactgcaccctctgcctcccgggttcaagcgattctcctgcctcagcctcccgagtaactgggaccacaggcacacgtcaccacgcctgattaattttttgtattttttgtagagacggggtttcaccatgttggctggtctcaaactcctgagctcaagtgatcygcccacctcggcctcccgaagtgctgggactacatccgtgagccaccgcgctcagcccwttgagaggtttgaagccgaggagctgtgtgtgaatggaccagtgggtaaggacgaaaagaagagatggaggaaatgagagggaggaaaaatagtagagaaaaaaaaaggaaaaaatacagccagctcctcttgtcccaggcagaaaagcactgggccggtccccaccattccattattggccgctagggggggcgctgcaacttcccctgcccactcacaaacctaaccttcttgtccacccttaagtcatggctggggttccaagatcagagagatcagggtctcttggccctgagtttgaccccacgcccttgtcagaatagccttgagaatcctcagggccccctcgggcagggcacagcytgagccacctcttcccagtcccacccagggcacctctcagcttcgggcatcaggggaaagaagcccatgggtcatcactgatccccaaatgccgcataccccagcctaggcctcagctcaaccctggaccccaagagcacaggctttggggtcgaccagaagcaaaagttagaaaccagctccgacttcctggctgtgtgacccaarcaagtgtcacaayctctctgtgcctgtttccccttctctaaaatggggataaaaacagtccccaactcacaggttgtggtgtaagttaataagaataacattggccaggtgcagtggctcatgcctataatcccagcactttgggaggctgaggcgggtggatcccttgaggtcaggagttcaagaccagcgtggccaacatggtgaaaccccgtctctactaaaaatacaaaaattagccgggtgtggtggtgcacacctgtagtcccagctacttgggaggctgaggtgggagaattgcttgaacctgggaggtggagattgcagtgagccaagatctcaccactgttctccagcctgggcaacagwgtgagactgtctttaaaaaaaaaaaaagagagagagagagaataacatctgtcatttgttgagtccctattatgtgccagtcatcagctgagtcctctggagacgttatctcactgataccttgtgtcatgctttgagcatggtgacctgcttacccttactttagcatgtttacagggcacctacaagatgcaggccctgacctagcaacaggggataccactgtggacaagatagacatcaaccttggagctgaattatagcctgatgagatgggcacttaacaaataactgcatagacaaacaaaataatcagaaatgttgaaaacttctaagagggaaacacgcatatagggagtcctaaagagaagaacaaggggacctactttgggtatggaggtcaggaaagacctcttagaggaagtgaccattaaaactaagaactgagacagggcgcggtggctcatgcctgtaatcccagcactttgtgaggcagaggcaggcggatcacctgaggtcaagagttcaagaccagtctggccaacatggagaaaccccgtctctactaaaaatacaaaattagccgggcatggtggcgcatgcctgtaatcccagctactcgggaggctgaggcaggagaattgcttgaacctgagaggcgaggttgcggtgaggcgaggttgcrgtgagccgagatcgcgccattgcactccagcctagagagtaagagggaaactctgtctcaaaaaaaataataaaaaatwaaaaattagacccgaaaaatgagaaccaaccaaccacacaacaaactgcaagaagagcgtgtacatggcaggactattgtgaggattcaatgagcctgcatggtaagggcacccatgttgggtgtctgtccacttggaattgggtctctcttcctttttggtgaaatccccagatttttcccctggggatcctgggattgtcaggatgaactccccctactccataatccttccgctttcttgtttttttggtgtttgttttagagacaaggtctcactctgttgcctgggctggagtgcagtggcacgatcatggctcactgtaaccttgaagtcccgggctcaagcaatcctcccacctcagcttcctgagtagctggaactgtagacatgcaccactgtatccggctgatattttaatttttatagagatgcagttttgctgagttgtccaggctggtcttgaactcctggcctcaggtaaatctcttgtctctgcctctcaaaacactaggataacaggtgtgagccacctgttggctcacaacagatgagtcattaactcaccattgactccattttataaacagtgaacctgaggtccagagagattaagtaacttatccaagttcacacagttagaaacagcatagccagaattcacaccaggcagtgtctttggcatctgtgctattaaccgcgatgctatactttctctaatatactagtgttatcgttactattatgaaagctgcatgcatttaatatttattgccaattgtcctttggaaccaaatgctcctggctcagtttccaggcttccccagccctcttggttatactgactcacaagaggacagcaggcatcagttaaatgaaaaagccccaagttgccaacagccttatcaaccccagaccccatcaggcacctgaggtctgggactgagctgtcttggcccagggacacacasctcttgtcccgtatggcagccaccagggctgaaatgggggacctgggtctccctgctgtggaataacccaggggaaagcagggggctcaggctcaggtcccagtcatgccaaccttggccaagtcacttttgtcactgggccttacctgtcacatctatgagttgaggtaaggaccaccagtgctgtccacctcacttgtccccraagcctttccccagaggccaccttggtggcactccacagccaaatccctggtgccagggctgggacacctcgggctggccccttggctggcagaatgcccaaccctgcccctctggcaggcagaacccactctcgcccttcagggtccccagcacaacactttcttctgcagggcaccctgaattcaatcgacattcccaggagggcctagamcacgctcaggccctctcactcccacctgctcagcttggactttgcccaaagcctcccaaactcctgcagcctctcatcagcctctcattcacacacacactgagccccaggggccccagctggccccagaccccttacctccctgcccaactatcccagaccagcgtggccccagctcctgccctccagcctgccagggaaccagctctttccaggaaccggctctgtccagcttcaggcagcttccggcaaccttggyccctcctcctttgttaaagagaaagctccagaccctaagcctccgggtgaagacggaggaggagaggggatgagagcaaccctcacygctttcccgggcactgcctatgactcatgcaccaccctgtctcatttgacagatgagcaaactgaaactcagaaaagggaacttatttggccaaagcttcccagacagcaaggggcagagacagcctttacccctggccctgggccatctcttccgggatgcaggcatctccatgtcttctcattttaggtctagtgattgtcccggatgctgaaccactgttggggtcagcttaggtctgggatgggaaaacaaggacaagggaactttttttttttgagacacagtttcattcttgtcccccaggctggagtgcaatggtgcgatctcggctcactgttacctccgcctcctggattcaagcgattctcccacttcagcctcccaagtagccaggtttacaggcacccaccaccacgccagctaatttttgtatttttagtagggacagggtttgaccatgttggccaggccagtctcgaactcctgtcctcaggtgatctgcttgcctctgcctcccaaagtgctgggattacaggcgtgagccactgcacctggccaaggaaacaattattataattattatttgtgacatgggaaaggtatatttttgtctgaagcacytctccgtctcggatattttacacgcagcatgagaacccaagcaattatttgctactcagatgaatgactgaccattcattcattcattaaatgtttattggacacctactatgtgccaatccctggaactttggcctcaaacaaaatagcatrtcctctgccttcacaaagcccttagagagggccattagagagcacttattagtgctatcagatgttagcagctggcagggtgrggcagggctgtggaacccagagcaggcaccccgcctggccctggggggctggggaggcttcctggaggaggggaagtctgagtggagccaggagtcaggcacagggagtgcaaaggtctggaaatgaaaaacatgatatattccagggtcagggwagtatccagtggggctgggagggagaaggcaggggtggggaagcaagtggggttgaggctggagatgtgggcagagatcagagtccacagggatgcctgtaccaatccagagtttggaccttacccaggggcactagggagccacagaaggctttaggtggggggaatgacatggtcaaattcatgtcttgtctctgcaccatctcactgggtgaacctgagcagctcgtgcccatctctgggcctcagtttccctatgtggaaagtgggaacaggaagacctggcatcacagatgttgtgtgtccttcttgggctgtttctgatctccccaggtttgatgattaactcccagccacttggggttagatggagctgcttggccgtgatccttaatgtggactctggcaagtttctacccatcctcgctttagacacacatccatccttgttgggtgccttgtcctggactgggtactggggacacagaggtgataaaatccagtttgtgccttgaagtggcccccagcatggaggggagaggaagacacccaattcggtagcaacaataacacytcctaagatgacagagggcagaaagtccccatagggtagctggggatggggcaagatcagggagggcttcttgaagtaggcagagactcagcacacagctcagactttgacaagaagcagactagctgcatttagtgcatgtctactgtacaccaacacgtgcatgctgtccagcrtaacccacactgtttatttgtttgtttgtttgtttgtttgtttgttttacaaacgaggtctcactgygctgcccaggctgatcttgaactcctgacctcaagcaatcctcctaccttagcctcccaaaatgctcggattacaggcaacagccactgcgcccagcccccaaaggttttttaatagttggcaatctatttctgtgtgcattaggaaagatgtgtgtatgtatgtaggtatatatatatgtgtatacatatgtatgtgtatgtacatataaaatatcagacccatagtttcatggatatgatggcttaggaagaagctaaggtaggtattaaagtttaaaaatggagcctctttaaaaaatatattaattggccaggcatggtggctcatgcctgtaatcccagcactttgggatgccgaggcagctggatcacctgaggtcaggagtttgagcgtggccaatgtagtgaaaccccatcactactaaaaatacaaaaagctagctggacatggtggtgggcgcctgtaatctcagctactcgggaggctgagacaggagaatcacttgaaccggggaagtggagtttgcagtgagccgaggtcgtgctattgcactccagcctgggcaacaagagcgaaattccgtcttaaaaaacatatataaatatatatatgtgtgtgtgtatatatatgtttataaatatatatatttgtatataatatatatttatataaatatatatacttgtatataatatatatatttgtatacaaatatacatgtttgtatacaaatatatatgtatataaatatatatatttgtatataaatatgtatatgtatataaatatatatttgtatattatatatatttgtatataaatatatatatatttgtatataatatatatatttgtatataaattattagtagcaataatagtagtagtagtttctggcatgaacaagcagcatgcctagtagttaaaacacagacctgcagccaggctctgatacaaatacttgttctgccactttctcactgtgtgaccytgtgaccttttgtaagtcacttaacctctctgtgccttgttccctcaaatgtaagatggggataaaacactacttccctagtacagtggatgtgaggatcaaatgcattaatgcaggaaaatattaggacagtagttagtgctctgtgttcgctgctgttgcttttgctttattttgttttgttttttgagacagagtctcaccattcactctgtcgcccaggctggagtgcaatggcgcgatcttggctcactgcaaactctgcctcacrggttcaagggattctcctgcctcagcctcctaagtagctgggattacaggcttgcaccaccacgcctggctgatttttgtatttttagtagagacagggtttcaccatgttggccaggctgctctcaaactcctgacctcaagtgatctgcctgccttggcctcccagagtggtgggattataggcatgagccacsgcgcccagctgctattgttttgtattgctaatataaaagaggtgatgggacaatatggcaaaagttgcaaaggtggcacgtaagcgttcaaagtaccatgatgtcattatattacagaatgctaacaactacctggaaaagtaagtattataataaaccctacattgtggaaatagggccagagaggccaagtcgctttcccaaggtcacacagcagtagcagagtcagggctcagacccagagggacgaggctccagagctcctggcttgggtgacaaagaggatgggctggggaagccacgtggctgcattggagagcagatgaggctggagaggtgggccaggtcactgacctgtccccaccagagccatgttcgtcagccagcccctgtccctgacaccttgggccgcaaaacacccaccccggccagtcccctgggttattcattaagcttcattacaccatcctcacccctggctgaccttcctgttcccagggcaagggaattgcgtggagaagagggacgaagcctctgacgcctgagattagcctttcctttcccaatttgcagatttaaccctggactcttcgtcatatgcttcccaaggccgaaggcttagttcccctaaatggcaaaagagctgaggctcaggcagccccagctagtgagtaataactgtgccggaattcgggtgcaggtctcccaacacccaatacaacagagcatcttacctaagttctcagactcatcaaccctggccaagatgacaaatcactggagcactggagaccagagagggtctcacactgggaggtcacattccccctggctggagctggggcacactgtcctctgtaaagggacatggctctatgtgtctcgctgtcctaacctctccctactgcagccccaacacctaaccgccccttgattgaccccttgtaagtgtttacctttgagacctttatacagaggaactttccctctgtcctcttgcccttgaaaaggaaaggaatcagtgatcaagggagaagctgaagcacagaaaggttaagtaacttgctccagcttgcccagcaaatrggccatgggaccaatcttccagggaccccacatccaacctggatgctcttgtcccaacagatagaaattcacagccacagcgtctgagctgaaagaattcacagaggccgaaactgcctttgcaaagaatatgacagtgagaagttcagcccggcggactccagcctgcttctagcctcactggctgcggactccagcctgcttctagcctcactggctgcggactccagcctgcttctagcctcatgggctggccatcctcattcccaggtataggccaagccaaccatgggaggaattcttttttctttgagacagggtctcactctgtcacccaggctggagtgcagtggcaagatcacagctcactgcagcctcaatctcctgggctcaaacaatcctcccacctcagcctccagagtagctgggactacaggtgcgtgcccaccaatttcatttttatttttattttttagagacagagtctccctatgttgcccaggctggtctcgaactcctggcctcaagcaatcctcccaccttggcctcccaaaatgctgagattacaggtgtgagccaccatgcctggcccaccatgagaatttaatttaatttatagtttaactttgaagcaaagtcagtcacggtggttcacacctgtaatcccagcactttgggaggctgaggtggaaggatcgcttgggccaggagttcaagaccagcctgggcaacatagtgagaccctgtctctacaaaaaataaaaattagccaggcatgatgcacacctgtagtcccaactcttaaggaggctaaggtgggaggctcacttgagcccacaaggtgaaggctacagtgagccatgatcatgccactgcactccagcctgggcaacagagtaagactctgtcccaaaaaaaaaaaaaagaacaaaaaaaacaaagctaaccccctccttgctcagggactgaaatcacttttgtaaaactaataaaagatcatgaaattgagattatgaaaggggcttgaattctgctacaatctaagtgcaatctctgtaatcccttactgtttaacagtcatgtgagggctgagagtggtggctcacgactataactttaggactttgggaggctgaggtgggaggattccttgagcccaggagttcaaagccagcctgggcaccatactgagaccccatctctactaacagaaaaaaacatgagctgggtgtggtggcacagctgtagtcccagatactcaggaggctgaggcaggaggatcccttgagctcaggagttcgaggctgtggtgatctgtgatcgcaccactgtactctagcctgggcaacagggtgagactctgtctcaaaaaaaaaaaaaaaaagaragagagtcatatgaccagaggtcacaagatttgtgacttccccaattactcctatagaaacattgctattatagaaccttagattggtcttttgagatgtttttcagacttctgcattctggtaattgactgacctcccagccccccagacccaggactcatgactcaaccggtatctgatgacaagtgccccacctggaggtggactcaccccatattccccaacctcagcactactgacatttggggccagatcattctttggtgtgagcggcagtcatgtgcactgcaggagatcacgttacatcttccagtcctgtgcatagcagccgccctggcctccacccaccagatgctaatagcaccctctatcccaggcttgacaccccaaaatgtctccagacattggccaatgcccacacccgggttgcaaaatcgccccactttgagaaccactgtccttgagtagggggtctggggtggagccttacttgcacaggggctggagaaagtggagggtgtgcagaaacaccagtcctgcaaaaggaagggcaraaggcaaaaaacgttccaggggccttatcaagcactgagtctttagaacatttggggtgcttttgcatttagaatgatgaatgcgtgaaaactgggtagtaagaaagctgggcaagcggtggaaacacatactggcttagagcaggtataaggggctaacagaaagatctcagagggccctccctccggaagagaggggccatatgcccgaatgcacttttttgtgtgtgttttttgtttttttgagttggagtctcactctgtcaccgaggctggagtgcagtggtgtgaccttggctcactgcagcctccacctcctaggttcaagcaattctcctgcctcagccttttgagtagctgggattacaggcatatggcaccacgcccaggtaatttttgtatttttagtagaaaagaattttcatcatgttggccaggcaggtctcaaactcctgacctcaggtgatccgcctgcctaggcctcccaaagtgctgggattacaagcatgagccaccacccgcagmcactgtatgcactttgagcaaggtctcccagagctcctcagtcacgatcattacaagagcccactgtcagagctactgcgatgctccccagccccatgcctgcacagcacgggtgatcatttagcatttttcctcttcttcttcttatgcttctcagatattttgttcatttcasttggtaatgaattaaccgatgtttattgagcacttaccttatgccaggcactgttctaggcactgggaattcagcaggaaacaaaacaggcaaaaaccctgccctcctggagctcacagtctagtggggtgcagctggagttggggaacaggcactaaccagggaaatggcgggtaagataatggcaagtgctaccaaaaaaaaacaaaaacaggctgtgtggttttcaatagagggaccagggaagtcctctctgtgaaggtgacatgtaagtaaatatttacaggaggtaagggggtgagacaccctgatatctaggggaagacggagacaggcaggaaaggtcaggtgcaaaggccctgaggcaggagggtgccccgagtgcagcaggaacagcagagaggccagtgtggctgcagtagaatgaatggaggggacagtcggsgaggaagaggacagaaagagaatggagccacatcacrcagagccttggaggctgaagcaccgtcaggacttcagcttttattccaagtaagacgggagccatgggaggctcttgagcagagcagcaatgtgacctgactccagcagaataggatccctccagctgctgtgtggggaatcagctgccagggaccccagtgcggaactcctgcaagggtccaggcacaggactcaggggcttgaagcagggtggcggcagcagaccttggtgagaagtggtcacattctgggtattttgaaggtaaggccacctggccttcctgctgcagcaggtgcagtgcatgtgacagagaaagacacatcaagacgtttggggccgggtgcggtggctcacgcctgtaatcccagcactttgggggctgaggtgggcggatcacctgaggtcaggagttcgaaatcatcctggccaacatggtgaaacttaatctcttaatctctacttaaaatacaaaaattagccaggtatggtggtatgcacctgtaatcccagctacttgggaggctgaagcaggagaatcgcttgaacctgggaggcggaggctgcagtgagccaagatcgcgccactgtactccagcctgggcaacagagtaagactccatctcaaaaaaataaattaattaaattaaattttaaaatagcagctgctattctttgagtccttactcggtgcctggccctaggctgccattatctataagactcayaatacctagtagctatcatcgttcccatctctccaggcaggaaactgaggctaagggaacttaggtgaccaccaccccaaggtcacacagcagggtagcagtttcagcctgaggtctgagaccttagttaaccacgagactcaggagctggctgcactggccagggagggcaaacagaggtgagagctgcctgtcctcccgagctgtgaaaacaaccgtcagaatccccacctcctgccacaaaggacaggctgatctggccatcccccgggacacttccctggagggtatgatgtaactgatccaggaagtggagatgacasaggcacttgacaaagctccctggcgggactccaccatcctcctcctaggatttcaggcttgttttagatggagctgggcctcagtttgtccatctgcgaaatgaacagaaggtgacttgcactttccttcttgcttcccaagacttttttctttcttctttttttttttttttttccttttttgagacggagtctccgtctgtcgcccaggctggagtgcggtggtgcgatctcggctcacagcaagctccacctcccaggttcaagtgattctcctgcctcaggctcccgagtagctgggactacaggcatgagccaccacacccggataattttttgtatttttagtagagaaggggtttcaccatgttggtcaggctcatcttgaactcccaacctcaggtgatctgcccaccttggcctcccaaagtgctgggactacaggctcacccagtcatccaagaccttttaaaggaaaactaggtaagagaagagcacccttgtgctccagcacccggagctacagacatgaatgccctaatgccctcttaagcaccagaaaataaaaatgaccatctctatttttttttttctgagacaaagcctctcactctgttccccaggctgcagtgcagtggcacaatctcggctcactgcagcctcgacctcctgggctcaagcgatcctcccacctcagccccccaagtagcaggactacaggcacttgccaccaagcctggctgattttttttgtattttttgtagagacagggtcttgccacgttgctaagtctggtctccaactcctgggctcaagtggtccacccgcctcggcctcccaaagtgctgggattacaggcgtgagtcacagcgcctggtccagccatcacctcttgagtgctgactatgtgctgggaactgtccttacagctttacatcaattaagctacttaagcctcataacaaatctaagaggtggaawctactcttagttgaagaaaccaaagcacagaaaggttaagtgacttgttcaaggtcacatagcaagttgatggcagaggttggatttgaacttgggcctgtccgactgcacagcccatgctgtccaccacaaggttacacagcctctcagggaagtgayttgcttgctgtctggaaatgaacaagcctgggatactacaatcacaggtatgaactaatccctctgaggttcgagcctttccctgagacccctccagcagctgatggactggtcagaatgcccctatcacgtggccactctaactggttctgcccccattctccccagagtgacctagggcaagcccctcgtcctcttaggttctcagtcagcccatccacatgacgggacaaagaaacacacatgtacggcatgtgtagggttttttgttgttattgttgcatatttaaaaattaagaggttgccaggctyagtggttcatgcctgtaatcccagcactttgagaggccaaggcaggtggatttgttgagcccaggagttcaaggccagcctgggcaacatggtgaaaccccgtctctacaaaaacatacaaaaattaactgggcgtggtggtgcacacctgtagtcccagcttcttgagaggctgaggcaggaggatcacttgagcctgggaggctgaggctgtggtgagccatgattgtgccactgtactccagcctgggcaatagagtgtgatcttgtctcaaaaagaaaaaatgaatatgtactcagaaagcaaatgtccatgaattgatgaacagataatcaacatgtggcttatccataggatggaataatattattcatgagaaggaatggaggactggtacgtgctgcgatgtggatgaatcgtgaaaacgtgccaccagtgaaagcagctggacacaaaagcccacacattgtgtgattccattacaccaaatgacacaagaacagggcagctgggcacggtggctcacgcctgtaataccagcacttgggaggctgaggcaaaggatcacttgaggtcaggagttcgagaccagcctggccaacatggtgaaaccctgtctctactaaaaatacaaaaattacctgggcatggtggtgcacacctgtaatcccagctatttgggaggctgaggcaggagaatcacttgaacctgggaggtggaggttgcagtgggccaagactgtgccactgcactccagcctgggtgacagagtaagactccatttcaaaaaaaaaaaaaaacaggcagatccgcagagacagaatacagactggttgccagggtcctggagtggggagggaaggatagggagagactttttggggtgatgaaaatgttctgaaattcatactctaaatgggtgaattgtattgctacatgatttatatctcagtcgagttgttattttaaaaagcatattcccagacgggatatcaaagacagtgatatatattttgtctttttccccttttttggttcttatatcatccattttcttaagttgatgtttttcagatcacaacactgatgcattcttttttttttcttttaagacagagtcttgttacattgcccagattgatcttgaactcctgagctcaagcgatcctcccacctcagcctcctgagtagacaggtgcacaccaccacactcagctttgatgcattttttttttaattgagacagagtcttgctctgtcacccaggctggagtacagtggtgcaatcttggctcactgcagcctccatttcccaggctcaagtgatcctcccacttcagcctcccaagtagctgggactataggcgcacaccaccacacccggctactttttgtattttttgtagagacagggtttcacatgttgcctaggctggtctcgaactcctgggcacaagtgatcctcccaccttggcctcccacagtgctgggattataggtgtgagccaccacgcccagcctgatacattcttrgtgaagcaaatggaacaacatgcagaggtctagagagttcgtcatcttgtccctaccagttgcagctccaaatccatctccccccccccatattcaatcatgacactggagtgtaaattaatttggtggtgtaagatagtgaattgctgtcttccttcagtctgaactccctgacttcgtgggtaacctcatgtggagatatcatcaaaaccctaaatctgagacctctgaaggttaccaggcaggcaagctctcccamccccttcctgctcaaccctttccactgaccctgtgtcctcaaaggactcaggattcctgagctgaccttcctctactgccattcactacctggtgctcccatggacacttttacccaacctctgagcctattcgtcacctgtaccttgagaatcaaaatgcccattcctgtggttgtctggggcttatgagagaccccacctgggaaacataaggcatgggatcgggcactgggaggtgctccagcaatgggagcaccagctgtatacactcaggtgcacacgagggaggctctgtctccacgtgaacttcgccatccccgcctccccctaggtttgccacccctcatccccaaaactcacccatggatgctccactggggagggagcctgggagcgccatggaaggtcagagggggccagggagaggtgacagcttgtcccacagaggacgacggctgagcaggctgtttgtaccctggttgccctctgtctcatcaatattctcgtcctggccagcttgacaagagagctttgttgagggggccagggagagagccagccagacagacctctgtgcatgtgtatggtgtgtgtgtgtgtatgtgtgtgctgccctgtggacagacagatctccgcacagctgggaacaaacaagaggcttggcatggggcatggagagttttcagatgcaagaccttccagttctgtgatgatgatgatgatgatgaygaygacgatggctgctaacttaccaaacactcagtcaattcgaggcccctctcacacatgcattgtcaagtcacctaagcctagaagggaggtaccattatcattcccatttcacagataagcaaatcgaggctccagaaggcagaatagcttgtccattgccacacagctaggaaacaacagagccaggatttgaaccctgctcccctggggtcttacccccccccccccaccccttcatgccaaaggtcataaaaggatgaggggggaaggcaatacagaactgctctgcttggcggtttttagtttttttttaattttaaaaaattttggtgggtacacagtaggtgtatatacttatggggtatattgatggggtaagaaactttttttttttttttgagacagagtctcactctgtcacccaggctggagtgaagtggtgcaatctcagctcactgcaacctcctcctcccgggttcaagcaactctcttgcctcggcctcccgagtagctgagattacaggtgcccgtcaccacatcccactaatttttgtatttttagtagagacagggtttcaccatgttgcccaggctggtctcgaactcctgacctcaagtgatcggcttgcctcagcctctcaaagtgctgggattacaggagtgagccaccgcacccagcctgttttggattgcaggtttaggagcagactgcctgggttctgaggccagctcctccctcttattgcctgggtgatcttgggcaaatgacaatctcatgtgcctgtttccctttctgtaagatggagataataacagtacccgcgtcctctgtggtttggtacttgctgagggctcagtggctgttagacattctagctttattactgttattgtttcttgggcacctactacgtgccaagcacatgctagcaactttaagtgcattatctcacacaatccttattccattttcctaacggtccttggaaaatagatattgtccccatttgcaagtgaagaaactataaatcaagaagtatcaggccgggctcagtgggtcatgcctgtaatccagcactttgggaggccaaggtgggcagatcacttgaggtcaggagttcgagaccagcctggtcaacatggtgaaaccccgtctccaccaaaaatacaaaaaattagcagggcatggtggtgggtgcctgtaatcccagctactcaggaggctgaggcaggagaattgcttggacccaggaggcagaggttgcaacaacccaagatctcaccactgcactccaggctgggcaacagggtgactccatctcaaaaaaaaaaaaaaaaaaggaagtatctgaggcagttctcaatcgatttaaaagtttattttgccaaggttaagggcaagggcacaaccagaagacaggtccttgcctttctccatagatgattttacgtcttcaatatttaaaggggaaaagcaggctggaagctggaaggaaaagaaagagggtacggtcacactactgaacccacatgtttcaagagaagaggagcaggtaggggaatagtcagttatgtgtttgtctcatatttaagcttctactgtagctctctgcttaggaacgaaaggaaaggccgcttcttgcatgactcagcttccagctcaattttggcagagtgaattggtgtcccaagttttgtgaatcctgagaaagcatttgggctcacagtctctatttttctgataaagtatctgatttaagtacttttttctttaaatcatttcattagagctctgttgtctatttttagtagtaacattagatacatgtattagacacagacagaggtagatcttataaattcataagacttccttttttttcctcctatttaagactttgaatttctttttcttttcttctttgtttctttcttttttttttttttttctgagacagggtctcactctgttgcccaggcaggagtgcagtggtgtgggcatggctcactgcagcctcaaccactcaggctcaagtgatcctcccacctcagccttccaagtagcttggactatagttgcatgccaccatacccagctaattttttattttttgtagagatggggtctcactatgttgcccaagctggtgtcaaactcctgggcttaagccatcctcccacctaggcctcccaacatgctggaattagtgctagtcaccctacgcccagcccaacctctaatttctggataacctgtttcattaccctaggcaactgccagctagatagccttaaatttacatactaaataaacaactcttagatgaaaatcagatagcaaaatgtttatctcaaagtagagaaagagagaaaagagagtctgggtgtgttagagagatttaaaatggatgccacagctggcatggtggctgacacctgtaatcccaacactttaggaggctgagatgggaggatggctcgacctcctcccatctcaggagttcaagaccagcttgggaggctgaggtgggaggattgtttgagcctgggaagtcaaggctgcagtgagccatgatcgcaccactgtactccagcctgagcaacagagtctcaaaaaaaaaaaaaaaagcaaatcaaatcaaacattaagttatagaaatctatcaaataaatatattttatttagataggtagttttacatttagtttctatcttttaactggaactcagagctctggacagagcccacactgaatcccgggtctccaaagagaatgatatggtggacctaggctgtgtgatgcttttacagtgtactttgttgcaaagacatttctctaagggtctaaaccatactctctcttatctttaaaaaaaawttttttatatataactaggcccacacatccagaccctctcctgttttaaacattcaagagtagcccctgttgtaataaagattttagtcaaaaaagaagtcaggtaacacacaacaaaagcaagcagttgaagatctgagaggaacttatctgtttatattcttagggctccataaggttatggaaaaacagaggtttctccccaaaaaggagtctggcactttctctgttttccttaagggagtcccaagctgttagaaattattttaggttccttgagctgtagagggtggcaagagaaaggagacaggcagaagtaaattggaaaaaacagaaatcagtcaactgagaagaaaaaagaaaactttttctcaaaaaacaagatcctggccaagtggggcggctctcacctgtaatcccagcactgtgggagcctaaggccggtgaataacttgaggccaggagttcaagacccgcctggccaacatggtgaaatcctgtctctactaaaaatacaaaaacaatagcccagtgtggtggtgtgcgcctgtaatcccagccacttgggaggctgaggcaggagaaccacttgaacccagggagtggaggttgcagtgagctgagatcatgccactgcactctagcctggacgacagagtaagactccatctcaaaaaaaaaacagatcctaagagagaaaaaaatgcattaaggccctatgaataaataaataaataaatacacacacacacacacacacacacacaycttagatattcgcctttaattaagcttttaaccattgagctctttaaaaaatccttttaaatctcatcaccatattttagctgggacaaactgctaatatttcaaaagtaacacaaacatcaaaccagaaaggacttgatttaggaaccaagcccaggccacggtggtgaaaaaggaacagaatcttagctactgaactagcrtgaggtgacagccatgtagcctctttcagtttggcttggctagcaaaagatggccttgttatgtaaataatgcccctcaggtaatcaaaatccttgtctctctctctcttttttcttttgctggctgttttttctttttcctttttttttttttccagctgtgggtatttagccaattcatgagaccttgttcgccataatatgaaactttccttcagatttgaccaagtcaaatggagttggtccagtccaatggggaaaagacagaagcaacaaaacaacaacagaaacaaaaacagttaagcaagggaaacaaacaatcaagcaatttatacgattactgcacgctctaaaagtagggagaaattaagaccagctggttgttaaccctaacttctagtcatggggcccaggctgaagaccgctctctaccatcctagaagcggggaaatctcaaacttgccttccctgccggacacaagcgaaactccagaaaggagctgcctgcttgccatcatcatggaagccagaaaactcaccttccttgttggaagtgagtaaaacgcagaaaaggagctgttcagggaaatcaagcttagatatcaaccaattgtgggagatcaggagttctctggaggtggggagctcccaggcctcagcaaactgtcctattttggagggcaatcaagatcgctcaaggccggcatggtggctcacgcctgtaatcccagcactctaggagactgaggcgggtggatcacttgaggtcaggacttcaagaccagcctggctaacatggtgaaaccccatctctactaaaaatacaaaaaattagctgagtgtggtggcacatgcctatactcccagttatttggggggttgaaacaggagcatcgcttgaacccaggagatggaggttgcagtgagccaagatcatgccattgcactccagccagggtgacagagcaagacccaccaagcaccagtaggagacttgtcaaaggtcagggccacctccacccagggtccctttcatgagtctccaatctgtaaatcaaaaagaatcaaaaagattgagacaggactcaatccatttagaaatttatttygccagggttaagaatgcacctgggagacaggtctgtgcttttctccagagatgactttaggtgtcagtatttaaaggagaaaagcaagctggaggggaaagaaggaggctatggccacattaccaaatccacagtttgtaagagaagaggggcagatagggaagtagccaattatgtatttgtcttgatctcaataaatcggcactttacataagataaggtgaacatagagtagcgacctgtggagatatttaactttttttyttctttctgttgtgaaggctggagtgcagtggcgagatctagtctcactgtaacctctgcctcccaggttcaagcaattcttgtgcctcagcctcctgagtagctaggattacaggcacgtgccaccacacccggctgatttttgtatttttagtagagacgggatttcaccatgttggccaggctggtttcgaattcctgacctcaggtgatccacccgcctcggcctcccaaaatgcggagccaatatttaacctttcatctgaagctatctgcttaggaactaaaggaaaggcagtttcttacatgactcagcttttagcttaattctttttcttttggcatagtgagttgggggtcccaattttttattttcctttcacgaaactgaggacrgaaaggggaagtggaaagagggaggaggagtgggttgtgggaaaggcaggaggaagctgccaaagaagaaagcttggccagattccacctcccttctgacagcctcagtggcctcaagccaggggggtgggtcctggcaggagggaggggggggtgtagccagccccagggccccattggctgcccagaggtgccagaggaataaagcccaggaccaagtagcccctgggaccattcagaagactgtccacccgtcctcagccccctctcttcgtgggctatctactcagttgatccctccctcgctggcttggctctgactcctgctcagacccatcacctttgccgggtaagtggccccatcctcagtcccacctcaggactggagtgtcccgggctagcctgtggtttcccaggggaagagggagacatagaaagagtctgtcaaggctgggcatggtggctgatgcctgtaatcccaacactttggaaggctgaggtgggagggttgcttgaggccacaagttcaagactgagctgggcaacagagtgagaccccccccaatctctacaaaaaaaattttttttttttaagacagaggtctcactctgtcacccaggctgaagtgcaatggcacaatctgggctcactgcaacctccacctcctgggttcaagcgattctcctgcctcagcctcccgagtagcttggactacaggcgtgtgccaccacgcccggctaatttttgtatttttagtagagatggggtttcaccatgttggccaggctggtctcgaactcctgacctaaaaaaagaatttaattagtatagtgtggtggtgcacacctgtagtcccagctactgggaaggctgagttgggaggatcgctggagcccaagaggtcgagtctgcagtgagcaattattgcgcccctgcactccagcctgggtgacacagcaagaccttgtctcaaatttttaaaaaacagccatttgggcctaaacactgagtttgtgtccagttctgtgcctcagcttccacatctgtagaatggggatgagcatagcgccttcctcctcaggtggttgtgacggtgaaaggatgacctgcacttaaggtgtccagcccagatttcataatagttcatatcgactgagcacttactgtgaaccaagtgaaagggaaggtggcttccgactgccggagtgggcagacagcggcttcagggctccctccctcctcctccccgggcacaacctcttctgaagtcttgcgatccttggggcagggatccttggggcaggctggatgcagttaatggatgctcacttcacggaaagccgcggcagagggagccctgtccttttacctgaaggcatcccatggcaccgcctgggacaaacggcgagagaggcgccccaaacccacctgaaaagggtcttcgtggccggctcctctgactcccaccccgattgtccctgaggccaggccttggtgacctacaccggcctttaatgtcaagtcagtcggtgtggtggctcacgcctgtaatcccagcactttgggaggccaaggcaggcagatgacttgaggtcaggagttcgagaccagcctgcccaatatggtgaaaccttgtctccactaaaaatgcaaaaattattcgggcgtggtggtgcacgtctgtgatcccagctactygggaggctgaggcaggaaaatcgcttgaacccagaaggcggaggttgcagtgagccgagatcatgccgctgcactccagcctgggtgacagagggaggttctctaaaaataactaaataaaaaccgggatcccattgtttggggattaacctccaggagctgaaagttcatgccgatttggggatgtcctgttttgaagtttgccccagtctctgatttttattcgagagatccagcggagagagggtgtctgttcaagttcccctcccaggccccgaatgtcagttaattcagatagacaaggggtgacctatttaggggatgctaagtctggcggggcagttggaatccccacccctcattctccctctgaccaagggatgtctggctcattctgggagcgggggatggatgtccaagctaggagtgcccaggacagggggctggacaaggtggcattggagatgggtctctggctagccacccttgcctggccttctgggatggtggagggagggggaaccagagagccccttggccatcgtcagctgatctcttctggcccggcccaagttgaggagaatcaaatcctccctgagactctcagcagaaggcaggggagatgggaaggctgggtgggtggacgtggctgtggctagaccccgggccaccccagctgcttcatcccccagagcccatccagaagcaggagcctgagccacayccatgggtcgcagagagagcctgagccctggagccagctgcccgagttcaaatcctgcctccctgcctcactcacagcgtgactttgggcaaattatgttaatattccccttcctgttgctgtgtaccaaactaccccaaaatgtgacttaaaacaacagcaagccaggtgctgtggctcatgcctgtaatcccagcagtttgggaggctgaggtggkcagaacgcttgaggccaggagttggagaccagcctggccaacatagcaaaaccccatctctactggaatgaatgaatgaatgaatgaatgaatgaatraataaaatttaaaagctgtgattagtcactgctataataattatgacaaaattaataattatgaaagagcttttcctaactgaatattgggcttcccaaaagttaggttattttgtttttttttaaataaatatttattgaacatctactatgagtcaggcattttgctgggtcctgggatcgtccatttaagccaagatacttggaactgcatgtcagaagagccagctgccaggttgtttttgtttgtttgtttgtttgtttgagacagagtctcgatctgtagacgaggctggagtgcagtggcgcgatctcggctcactacaagctccgcctcccgggttcacgccattctcctgcctcagcctcccaagtagcttgtatttttagtagagacggggtttcaccatgttagccaggatggtctcgatctcctgacctcgtgatccgcccgcttcggcctcccaaagtgctgggattacaggtgkgagtcaccgcgcccagcccaggttttttttaaatgtatgcatttaagtaagtaatagaggcacatggtaaaacatcaaactgtgcaaaaggtgggtgctatgatcccgagggccagctctcctcagaggccccaccctggccagcctgtcatgcatgtttcctgaaatgctctgtgcacatggaaacatgtggaacaaaacaaaaaaaaattcaaataaaaaaattaaaaaaatatataaaagaaacatgtggactatatgtgtgtgtggatggattgtgcgtgtgtgtggatggattgtgtgtgggagtggatcgtgtgtgtgtggatggagtatgtgtgtgtggatggattatctgtgtgtgtgggtgtccctgaatttttcacatagatagatagactattcttttttttttttgagacacagtctcactctgttgcccaggctggagtgcagtggctcgatcttggcccattacaacctccacctcctcggttcaagtgatgctcctccctcagcctcctgagtagctgagattacaggtgcctgccaccatgcctggctaattctctttcttcttcttttttttttttttctcaagacagagtcttgctctgtcacccaggcaggagtgcaatggcgcgatctcgctcactgcaacctccgcctcctgggttcaagtgattctcctgcctcagcctcctaagtagctggggttacaggcgtgcgccaccatgcccagctaattttttgtatttttagtagagacggggtttcaccatgttggccaggctggtctcgaacttctgaccttgtgatccaccagccttggcctcccaaagtgctggtattacatgcataagccactgtgcccggcctcacctcatgcattttgaaagctccaaggtttgagtgttctctcttcagcctcccagcaaatgtgtgagaggtcaggagtggagggtgatccctgatagagctgaggccaaggcgtgattacctgtctgatgtcacatggtgagtaggtggcccacttgcgattagagcccaggtctccaggatgctctctcgtctgaggccttgcttggcttgctgggaagcgaaggaagggatcactctggcagtgctggcacsggggctagctctcctaaccctctgggtttccttcctttctcccaggaatgatgtctggagaacccctgcacgtgaagacccccatccgtgacagcatggccctgtccaaaatggccggcaccagcgtctacctcaagatggacagtgcccagccctccggctccttcaagatccggggcattgggcacttctgcaagagggtacrggaccgggtcagcattatctgggcaggggtggcaggtcctccttcctcaacagggcagggccagtgctgtgtgaaattaaaggcgttgtaggataagcctactgactccccgcaaggactgagcgtccaccattagggcttcctctgtttgaggggtgcccttccaggagggttccttgggactgatcccagagccatcagtcgcctattttcctccaccctttcctragccagtctctttggagatgggaggtgcagtctcagacaagggtagaacaaattctgagtgaaggaaaygtccgtgtcyactggaatcctggcaggtattccaggtggggaggaagagcacaggcaatgactgggaggtgggcctgagtgcctctcctgttgtctccacagtgggccaagcaaggctgtgcacattttgtctgctcctcgggtaagtgatctgcttccccatcctgtcctctgctgtgtgtcctgggatcagacactctgcttctctgagccctggtttccccagcaatgtgccactgaaaacaatggcagcagccaccaatttggaattccagggggaggccagcagtcgcccagggtggggaggtgaggggggaactccagagcccccagtagarggtacrcagtcctgcctgggctcccagatgctcccgcactgacacgctctccacccccgaccctggcagcgggcaaygcaggcatggcggctgcatatgcggccaggcaactcggcgtccccgccaccatcgtggtgcccagcaccacacctgctctcaccattgagcgcctcaagaatgaaggtgccacagtcaaggtggtgggtgaggtgagtgccgacccagggcaaggaagagagagggcrcctggtggctggacagggtgccccctgtgcctcaccccctcctatctcccctgtggctttgcagttattggatgaagccttcgagctggccaaggccctagcgaagaacaacccgggttgggtctacattcccccctttgatgaccccctcatctggtatgtggagttcaaggtcacttggtgggggtggcagccactgccctatatcactgggcaggcattgctatgatgcacatcatcacgtcctcatgcacagcagctgcacatgtgtgcgcacaccaccatgtagaagcacacttaggcggggcacagtggctcacgcctgtaatcccagcactttgggaggccaaggtgggaggatcacttgaggtcaggtgtttgagaccagtctggccaacatggggaaaccccatctctactaaaaatacaaaaattacctgtacttggtgacacacgcctgtaatcccagctcctagggagrctaaggcaggagaatcgcttgaacccaggaggtggaagttgcagtgagccatgatcacgccactgcactccagcctgggcaagagagtgagactccatctcaaaaaaaaaawcaaaaaaaaaaaaaaagaagaaacacacgttacacccaggtgcagcagcaagtgcacacatgtcaccaaatgcccattatccacggctgcacatgcaacacacccaaggctgaacatgcaagcacacagatgcccaagtgtctgcagttgagtcctcctggaagcagacttggggacaaaggtttcagggaaaggagtttatttgggaggtgattcagtgggggagtggggaagtaagccagggaaggaagggggctttgctgtttcttttttctttttctatcatccagtccaaaatgtcaggaagggggctttcaaaggcaggtggccgctgtgggtggctagagcttaatccctcggggaccctgggagccagtgcagaaggcgcacagcagtttcccgccccctgggagaaggagcaggggagtttgtacaccgactcgtagccattggttgagggctgccttaaggggctgccatctcctgactctgtttgcaggtagctcaggtggccagagaaggtcctcaggcagagacacagatgctggcagctagaagccaaggttgggggtggggagggaactagctccaggccccatcagctgggataaggccggtgcaaacctgagctggtgtctccaggaagcctagccctgacctgccaccccctctccccaccctccagggaaggccacgcttccatcgtgaaagagctgaaggagacactgtgggaaaagccgggggccatcgcgctgtcagtgggcggcgggggcctgctgtgtggagtggtccaggggctgcaggaggtgggctggggggaygtgcctgtcatcgccatggagacttttggtgcccacagcttccacgctgccaccaccgcaggcaaacttgtctccctgcccaagatcaccaggtgagcagctggggtgcctccctcgggtgtccagcaagcactggggagtcccccttagggctggctttgagatagatcctgatgtcagcctgtttcacagatgagacaatggaggctttgatcgcttgcccagggccacgtccagtgagtggtacagcttggactcaaacccaagtctgtgtgactccaacatgtcacacttcctcacgtgaaaagcctcatatgaggctgggcacagtgacttgtgcctgtaatcccagcactttgggtggctgaggcaggaagatcacttgaggccaggagttcaagaccagcctgagcaacatagagagattcccacctctaaaaaaagttttttgttttttttttaaattaactgggcgtggtagcacacacgcatagtcccaggctaaggtgggaaggattgcttaagcccaggagactgaggctgtagtgagccatgatcatgccagtgcactccagcctgggtgacagagcaagaccctgtctagaaacaaagaaaaaggaaggaagggagagagggagggagggaggaagggagggaaggaaggaaggaaggaaggaaggaaggaaggaaggaaggaaggaaggaaggaagggagagagggagggagggagggaaagaaggaaggaaggagaaaggaagaggaaagaaagagagagaaagaaagaaaaaaggagaaagagaaagagagaaagaaaaagaaagagaaagaaagagagaaagaaagaaaaaagagaaagaaaggaagaaagaaagaaaaagagagaaagagaaagaaaggaaaggaaaggaaaggaaaaagggagggagggaggaaggaaggaaggaaggaaggtctcataggaatcatttactgagtcctctgtggcaaggttttacatacctcattactttgccaaccatttactgagcccctattgtgtgtaagacactggctgatctggggagagagtggtgcataaacacaagtcttgctcctaaggagttcatatccaagccccaaacctttgatagtttgtttgtttttgtctttgttttttgagacagagtttcgctcttgttgcccaagctggagtgcaatggtacaatctcagctcaccgcaacctctgcctcccaagttcaagcgattctcctgcctcagcctcaggagtaggcgtctgccccaacacttggctaattttgtatttttagtagaaatggggttttaccgtgttagccaggctagtctcgaactcctcacctcaggtgatctgcccacctcagcctcccaaagtgctgggattacaggcgtgagccaccgcacccggctggtagatagtatttaattaggattaggttttgaccccattacacagaaggcccaaataacagtgacttaaatgagattgaactttaccatgaaaagtcagggcgccaggtcccttgagtttgtttccccattatccttagcatgtagtgtttcagtccaaaatggttgcctgagtgccagctatcacacccacattccatttggcagggatggggaagcaagggcagaaggctatgctccaaccttcaaagacagacacaacacttccacttacctttcgttggcctgaacttagtcacatggccacatccagctgcaagggaggctgggaaatgtctttacaccaggtgcccataagtgcagctagaaaagacaccggggcagacaatagtctcccctacagatagggaagactgagcccagccaggtaagaacttcttccagattcctgagcctggcatctggagctgctgtgtcccacactgtagggactgaagacgtcatggctgagcgcctactgtaaaccacgtgctgctgagggctgaggtggctcaggccctcaagatgctcctggggaagggagagggggcagctgagctgggaatagagctagtggtcaccccaggaagctggggacagcgtcaacacattggttaccagtgcaggtcttgaagttatacagatcctgcttgcagccccagctccagcactccctaggtgtgtgaccttgggcaagtgactgtacactctctgcctcagtttcccctttccaaaatcaaaccaattaacaacagcagaattcttgtgtgaattcaataatgcttgtgaagtgcttggcacctaacactttctcaagaagtactcagggcgcttgttactagcagggaggactatttgagaattccacatagggccgtgggactcagtactctcccaggaggactccttggaggaggtggccttaatcctgagccttgaaggacacagcaggatgtgggcaggcagagtggtgctaagcttcatgagggttaaccaggtagcggttgtaacccggagcaaaagcagggagtcctagcagggaacaacaagggtcctcttaggcatttgctcctgacttagtgttgatcagaatatgacgctgtgccgaggcaggaggatcacttgagcccaggagttcaagaccagcctggggtcgggcatggtggctcatgcctgtaatcccagcactttggaaggccgaggggggtggatcacctraggtcaggaattcgaggccagcctggtcaacatagtgaaaccccatctctactaaaaatacaaaaattagccgggtgtggtggtgggcacctgtagtcccagctactcggtaggctgaggctggagaattgcttgaacccgggaggcagagattgcagtgagctgagatcgcaccactgcactccagcctgggcaacagagcaagactccgtctaaaaaaaaaaaaaaacaaaaaaacaamaaaaaaacaaacaaaacaaaaacccrcctgggcaacatagtgacactcagtctcaaaaaaattaaaaaaatgatactaaagaatatactatatgatgtcaattcaaacactctgcaccttattagaagaccccacttggtttggggatccctgaggcttttcagggttttacagctgcagaggtgatacctgtccccctgcccccagatgcattgccttctctgtcwcacatccatctccttctctccctccctgyccccatctctctcctgtttcccccactcccatcctcttctgggttcccacttctctcagtgttgccaaggccctgggcgtgaagactgtgggggctcaggccctgaagctgtttcaggaacaccccattttctctgaagttatctcggaccaggaggctgtggccgccattgagaagttcgtgggtatgtgccaggtcctcccatgacctgacctgctgactcaggcgctaagtggctgtccacttggtatgccactggggatcccactcaccccaagtttccttcacagttctgtcttccacctctgcctagaattttccattaatagaagataatacaatgccgtgtagaaatagaaaagcaaaagccacacataatggaaaagtaaatagaaaagtaagcctgataaccatagcagcagaaaacaataagtgaatatttaaaatgttgcttctgagtttcctggcagccagggtaaaaaaaggaaaacatggggctcagagtttgattcattcagaggtgagtctgtaactaggctggactctttctgggttccgtctagggcagggatggcaaaaaagagagaaaaaaatagtaccatttatgcttctgtacctgctgcacacttggctaatcaaccatggaactcttgctcagatgatgcctcagaatccttctcaacacagtgctcacgcaaccacactcattctatcagtgttagcactcatgatgaaacccaggccctggctcaggcttggaagggccaattcaggccgatgacgggacgtttggttcaggacctgcggctgcagccagggctgagagctgattggctcagtattcccaggtcctgccaatggcctgtcagctcctgtgcaccctgggaaactcaggccacgcccctgtcacgccccttctctggcagatgatgagaagatcctggtggagcccgcctgcggggcagccctggccgctgtctatagccacgtgatccagaagctccaactggaggggaatctccgaaccccgctgccatccctcgtggtcatcgtctgcgggggcagcaacatcagcctggcccagctgcgggcgctcaaggaacagctgggcatgacaaataggttgcccaagtgaggacggaccccttaccgatctgtgctctcctagcccaagagacccctggaggggctggagttttatccagcgcctcgtcgtatgtttgrctgagcacctgtggcctgggtgcaggttaacttcttgttatcaggagcccactatgcagaggccaaaggtcggcagccagcgaggctatgaattggacctttttggtatctgtgtgactgctctgtgcccatccttagccaacttgctggcgtgacaagtgcccacaagtaacacaccaggtacccagagcagggtggacaggagagacctgaatcacagcagtgaggaattcctcaaagctgtgacctcgcccctgaacttgttcccagtgaaggtcaacagggccaccaaccagggttgaggaaccatctcagccatcctcccaggaagcccacccctgacccttactaatttttctaatgtgcaaactttttcattgaaaaataaaatatatttatgaaacaaagatcctgtgcattttcccatcatcagctgtctcctttcctgctttccttccaccccaagtctgctctcagccccagctctcaactggggccccagagtgaggccaggagcctgactccagctagtcttgcatgccaggacaggggcatccctgtaccacaggaagcaggtggctaaacaagagggacttggggtgggacaaaggctgcctccgctgaaggcagaagcagctggggaggccaacttcattctgatatgaagtccttcctactaagtcagaattatttcatcacagacccaatggaagcaaagaagtgaggccccctcccctgggcgtgtgtgagctgacactggacacccatctctgggagagggaaagggtgggtggacttgaagtcaatgtcatgcaaaccctcctcaaacatggagccctctcttccaacaaaagcatatgctgaagcccgtatcatagatcaaagaggaattactggggctggctccagagcatggagggaaccccaccctcagggtactttctggatgaccccaagttcaaactgaagtttaagagtcactcagggctgggcgcagtggctcacgcctgtgggaggatcgcttgagcccaggagttcaagaccaggctggttggcacagtgagactctgtctctacaaaaaggaaaaataacttgaacccaggaggcagaggttgcagtgagccgggattgtgccattacactccagtctggcgacagagtgagactccgtctcaaaaaataaataaataaataaaaaggaaaataagataaaaccacaagtcaattcccaaccccagaccccaaccttgctttattttctccacgggtttaccagcactgacacactgcatatttcatttattttgtttactatctagtcaatgtaaacttcacaagagcaggaatgcttctgtcccttttgttataaagtatccccgggacctcataacagtgcctggcatgtactaggggttcaataagtgtttgctaataaagagatgctgagtgcatgaggccccaagtgggctgcatcacatcccccagggaaacgctgctcacaccattaccccatttcacagatgaggtaatcgaggctcagagaggagtccatagctagctaataagaggtggagacagaattgaaacccaggtctctgactccagggctgtgtgctttcctctctccaagcacacagcactgggagagtcttgtctccaaggcaggctgcatgagatcagacagggagagagcctttttttttgtatctgtctgtataccacaatatggcttaggaaggtcttggtggttaacaaggctcccaaataggacccagaacacaggtgctcaataaacatctggatggatagatggatggatggatatgaatgaatggatggctgatggatagaaaatagataaatatggatgcatgggtggatattaatgaatctgcacagacccgtgtgtggatggatgggtgataaatgaataggtaggtggatggacgggtgggtgggtggatggatgaatggatggatgagtgggtggatggatgggtagatgggtgataaatggataggtggacggatgagtgaatgggtagatgggtagatggatggaaatgaacagatggaaatggttggatgggtggataaatggttggaaggatggatggatgggtgagtgggtagatggatgataaatggataggtaggtggatggatgagtgaattagtagatgggtaaatgggtggaaaatgaacagatggaaatagttggatgggtggataaatggttggaaggttggatggatgggtgagtgggtagatggatgataaatggataggaaggtggatggatgagtgaatgggtggatgggtagatggatggaaaaacagatggaaatgtttggatgggtggataaatggttggaaggatggatggatggatgggtaaatgggtgataaatggataggtaggtggatggaggagtgaatgggtggacgggtagatggatggaaaatgaacagatgaaaatggttggattgatggttggatgggtgattggatggatggatgggtggatgggtgacaaataggtaggtggatgggtggataggtgagtgggtagatgattgggtgggtggatggatggatgcgttggcagatgggtggatggatgaatggataggtagttggatgggtgggtggatgaatgggtgggtagataaatgggtgggtggatgggtgatagatagataagaacttcgtaagccatgctgtggtatacagaccaatacaaaaaaggatccctccctgtctgatctcataggtggatggatgagtcaatggctggatgagtaaatgggtgggtgggtaagtggatggaaaatggacaaatgaggccaggtgcgggggctcacatctgtaatccaagcactttgggaggccaagacgggcggatcacttgaggccaggagttcgagaccagcctggccaacatggtgaaaccctgtctctactaaaaatacaaaattagccaggcatggtggctcatgcctgtaaccccagctacttgggaagctaaggcaggagaatcgcttgaacccaggaagcagaggttgcagtgagcagagattatgccattgcactccagcctgggcaatagagtgaaactcccactcagaaaaaacaaaaacaaaaaaaaaagaagaagaaagaaaatggacagatggagatggctgaatggttggatgggtggttggatgggtgagtggatggatgataaatggataggtagatggatggatggatgatggaagacggatgggtgggtggaaggctgtgcagatggatgatgggtgagtatgttggcagatgaatgaatggacagaaggacagacagagggctgcacaggaggctgcatgggggatggcgcagaacccaaacctgagaggagaaaaagcgctgaccccaccttccctgccaccccaagaagcacagcatggggccacagccgctcttgtttaatggtggcacagcctgcggtctggttcctccatcagggcgctgtgggtatggccctgaggtgaggggcaggcctggggtggggtggggtggggcctgaggcagaagcatgggggctgaccctctgcctgacatggagagaggacattcagaaccctccagccacagatggccagaaactttggtttgtgtttgttttcaagtttctgtcctcaaggaagctgcccagaaagggagacgaggggactgcttcctgagggagcagaggggccagagctgggaggagcaatgccagccgaagacaacgcccagacaaagctcaccagctccagggccacccgtgggaatgcagctgggagaagggtgctggaacaggctccttccaccccatgggagccccagagtctgccccaggaccttcccaaaccctcaggaaggagaagcacgaggaaggggccccagaggtgggaatgaggttgagagagcagcagtaggaaacagacagaaacagagagtgggagatttagggcagggcagaagagacgccacggtgcccacccacctcgggggagagagggggtcagttctgagccccatcaggttcgtgacccactctaggaggagatgactcagaccccagatcagagaacgaagcccccaggaggggctggagttagaagtccggtggccttgggacgggggtgaccctgacgagggtcagcaggggcgaaagcagcagagcagggacagaacttcagtcccatgaaaccttgacaggcgcgaacttccagaggtctggctggcccatgtgcagcaggccgctgaagggcgaggtgctccactggaacgggggcacctggtcccacgtgggaccgctggccgccagcaggctcaggatcctggccagtgacatgctggtcacctggggacagggcagagccgcagctgagcaggggtcctggcctgccccaatccaggcacccagcctcccaccctgaccttgaccccagagcccaattctgaactgtcactttttttttttttgagtctctgctctgtcacccaggttggagtgcagtgacgtgatcttggctcactgcaacctctgcctcccgggttcaagcaattctcatgcctcagcctcctgagtagctgggattacagacgcccgccaccacgcctagctaatttttgtattattagtagagacgggttttcaccatgttggccaggctggtctcaaactcctgacctcaagtgatctgcccaccttgggctcccaaagtgctgggattacaggcatgagccaccgtgcccagcccatactgtcacctttactgtgaccccaaccacagcccaattccgactgtgattcctgccccgccatcagctttgccccaacctgtcccttccccaaagctggtgatggtgacttcccccacccacagctcaggccctagggaggaggcagcaccttcacatcgatacccccatgggagcgctgacrcagggcctggaaggggtaggagccattggccgggttgaggtcggagcgggcggagatagcattctccccattgggctgggggttgcaggctttgcacagtgacagagggtcatggaggaagtcattgtacctggatggggaaaaggagggaacatcagtcatcccaggaaggagaggctaagacgggggccaaaatcctcacaggcagccccgttaacagctgccagccttcaacttgatgagcccctcccactgcacactacccccgacagttcctctgcctggggcccggaccccttcacctaagtcactctgccttcattattcagctctctgctcaggcactcatcctcagggaaggcctccatgccaccaccccagccaggtgaggcacccgtttgttcctggatagcctctcttggaacacagccatctttacacattgacaccagtgcaagaacttgatggatttctgcaccgcccaagagacaggacagtggggcacaggttttctacctgttgctcctggtaccaagcatagtgcctagcagtacaggtcactcaacagatgtctagcatcctccccttagctatgaggacagtgacagggcccaagtggagagcggccaccgagctgctgcactggtgtccaacatctgaccaccccctgctggccctctggggctggcagcaaagtttgaatgagttggtacaaaaagcgcacaggaagttctgtgttcctgcggcctccctctccccaacccaccacccaactggcacctacctcatcagcctgaccatggagtccatgtcttgtaccagtgactggttccgccggaagatctgggcccgggggctcccgtcataagaaaaccagtccccatactgggccactagggcctgcagcccactggcattgaacacagtctcgaaggacctgccggggacaaggatggtcacccatgacccccactggcctcactcagccaaggctgtggccagggaggggaggggcagtcacaccaggacattattacttacaactacgacattcaggctgggtgcagtggctcacacctgtaatcccaatactttgggaggccgaggcgggcagatcacctgagctcaggagtttgagactagcctggccaacatggtgaaaccctgtctccactaaaaatacaaaaattagccaggcacggtggtgtgtgcctgtaatcccagctactcgggaggctgaggcatgtactcacttgaacctggaaggtggaggtttcagtgagctgagatcgagccattgcactccaacctgggcgacacagcgagactccgtctcaaaaaaaaaaaaaaaaaattagccggcgtggtggcacgtgc

SEQ ID NO: 95979 - DNA, 46795 bp, Homo sapiens
  misc_feature (1)...(46795): n = A,T,C or G
atggtgaaactgcatctctactaaaaatacaaaaattagccgggcatcaatggccagcccctgtaatcccagctaatcaggagtctgaggcaggcgaatcacttgaacctgggggctggtggttgcagtgagccgagctcacaccactgcactccagcctgggcgacagagtgagactacatctcaaaaaaacaaaaacaaacaagcaaaaaaacccccacagtaacacaaaagtaataaaactgctgctatttactcagtgcttatctgatgccagccactttgctaagcctatgaatgcattatttccccgttgctacagatgagagaattgaggttcagacaggttgaaatcattgctcccaaagtcacacaactggtgagtggcagagctgggatgcaaaccctaaactgccagccctcaaagcctgtgctcttaatctccaccctgctgtgcttccttgtccatttaattaagctccacaggcacacattccacgccctcctttgctgtacaatcccaggcaagtcgctcagcttctctgagcctcagtttcataatctgtcaaatggaggtaacacaaataattcctagttgtgaccaagaatcatcatagaaatctgccatttccagcctattgtgcaattcctcaagcactgtgactccaagtggcatcagctcctggaagaacacactgtcttactgttgtttcctcctttgtcaactgatccccccttgaacctcactctacccctgctctcaatgccccatctactgccacctgattaaataaaatcttttttgaaaatcataagtgtcatgagtaaggtttcttggtgttgatgtagaagaacaaaacagaattgtgaaatgagaatcactgcagctatcatgaagtccygcctacgtgcccagcagttgctagattggccaagttttcccgtgaagggcaatatagtaaatattttaggccttatggatcatccaacctcagctggactcttcatctctgctgttgccatatgcaagcagccatagacaacatataaataaatgggtgtaatggcatttcaattaaactttatttatggacactgaatttcacaattttcacgtcacaaaatattcttttatttttaatattcttctgttgattttttttcttaaccattaaacatgttaaaaagtacaaaaacagctgggtgcagtggctcacacctgtaatctcaacactttgggaggctgaggcaagcagatcacttgaggtcaggagttcgagatcagcctggccaagatggtgaaaccctgtctctatgagaaatacaaaaattagccaggtgtggtggtgggcgcctgtaatcccagctacttgggaggctgaggcaggagaatcgcttgaactagggaggcagaggttgcagtgagccacgatcatgccactgcactccatcctgggctacagagcgaaactgtcaaaaaaaaaaaaaaaggcacaaaaacaagcagaggctggaccagatgtggcccatgggccatagtttgccagtttcttccaacatttcattaagaaaaatttccaagcaaacagccacattgaaagaattttgcagtgaacactcatatactcaccacatagattttacaattaacgttttattgcacttgcttgattgcatatctacaatttcttcatccttctatccatccatgaatccatcttattcttttgatgcatcagaagattctttttctgccgggcatggtggctcacacctgtaatcccagcacttcgggaagccaaggccgttggatcacctgaggtcaggagttcgagaccaccctggccaacatagtgaaaccccgtctctactaaaaatacaaaaattagccagacatggtggcacacacctgtaatcccagctactcgggaggctgaggcaggagaattgcttaaacctgggaggcagaagttgcagtgagccgagaccacactgctgcactccagcctgggctgtctccaaaaaaaaaaaaaaaaaaaaaaaaaggaaggaaggaagagagagagagaaagagaggaaagaaagaaagaatgaaagaaagaaagaaagaaaagaaaagaaaagaaaaaaaaagagagaaaaagagaaaaagaaagaaagaatattctttttcaaaaagaaaccagcagcaatttcttcccgggccagtacaaggtggtgagtgagttgactaagcagacaggcaaaaagagagagagtatctgtaggaggatactgtcaccttttatatgtaggcaataagcaatagttttccaaggagaacagcagatgatttgctactgtatcaaccaagaatatatttgaccgtagtaagtaacagaatgtgtaacagacattctgagtcattttgttacacccacaactgtgggtgacctgtccagatatgccttctaattccaagcaccccaagaaaacccctgtgcttaagattttatctagccatgaatccaacattttctatttgcttattaattttttgtccatcttctctcgttagaatataaattccatgagagcagaggccttttcacttattcaccacacatgttctgtgctacaccagtggctaccataaagaaaacactgaataaatatttatttatttatttatttattttatttttgagccagagtttcactcttgtcatccagcctagagtgcaatggtgtgatcttggctcactgcaaccattgcctcctgggttcaagtgattctcctgactcagactcctgagtacctgggattacaggtgcctgccaccatactcagctaatttttgtatgtttagtagagacggggtttcaccatgttggccaggccagtctcgaactcctgacctcaggtcatccacctgctttggcctcccaaagtgctgggattacaggcgtgagccaccgcacctggccttaataaatatttataagaataaggaaaggatctgttttccacatctcataagttgtcttttatacctttcttttctatgttctgctttcctgtaatctcgagtaatttcctccattccatcttccagtttactgattttatcttcaggtatatttattcagcctatctatggagaaggttcggtttttctgttcatctttggttttattttgcattatgttttcacttccaatgtgatagtggtgattgttgactttcatcactgttcttatttcatggatatgatgaataatcatgaatacaatgaataattataatggatataatatctaatccctctgaggatattaattatatatttctaagaccgtattagtccaatttgtacttctaaaacagaaagccacagactgggaaattagtaaagaacagaaatttacttatcacagttctggaggctgagaagtgcaagaccaaggcttcagcaggttaggacctggtctctatgcttccaagatggcgccttgaagaatgttgtgtcttttggaggggaggaacactatgtcctcacatggcagaaaagcagaagacaatgagcccattcctccaagctcttttcacagtggccataatccactcacgtgggcagagccctcatgacacaaacacctcctgttagaccccacttcccaactgctgcattggggagtaagtttccaacacatgaattctgggggacaaatttagaccacagaagactctttctcctttattgattatttcagtgtccttacatgtgactttttatgttcatagcattggatctcccaaaataatttggcacctttggatgtgtgctttttgctcactggggatgttctgcttgtctccctgtgaagttggtaccttcttactgcagctggaggcagagatgaggaaaggggatgtgccaggaatgagtcttctgcatacaggacttcctgttctttccagatgtggccaggtatgctgtgtacttccctgcctctctgccccaccctcactgctccctccttaggcaggcacctctgctgcctgttactcaacacagaaaggttggggcgggagaccacatgtctttagaggctgccattactatgccagcacaactgacaaccatgagagttaacctagggtcccttcttttccttcaatccactgcctggagcctgcagctcctcagagcctttccactctgcataggtaccccctcctttatgtgttttggctgcaatttcctccttcatccagtctcatatctctgacagggatctcagattccagtttacctgggacacctctggttaggacccagcaacattattaaagtttttctatcgctttcctgccacctctagaggcctgggatggacgttgaaggcttatgcatatgttcagtccaccatcatgacccaatattgacccttctgcgttccatcttctaaaaatgcctcaaatgtcccgcccccttgactccactttttctcagtttccaaccctgttgatttccattatgcttttaatatatctttgctgctattttaatagaattttgagcatgtgttcaatccactatcttgaatggaaagtttctaaagtggcctgtgactcaggaagaagactgtgattaatgggcgagaatgaaaatcattgctcaatcccttgacttaaatccccaccacaacacctgacctacaaaacctgcccatacttgaatattccaagtgatgcagcattcactactcaaaatattagctggtgtacatattacagacccagcctctctccctctagttgaccatgacctctgaaattcacactctgatcctatctatttcctttcagttaccgtgcagatgtcaggaagcacttgttaagactattacctgaagtgtactcagaggcagagtaaatgctgggtcccggagcagacaggagagaggacctgggagttttttagtaagatggggaggaggagataggctatggcttggaccaggcctggaagagagctcaggtgtgcagtctctaggaacccgggtggagaagcagcaggaaataagcagaaaaaggagacaggccatgaagatagaagcgcaatggtcctggattcaaatctccactctgcagcttatagcttacagtccgcttagctttgtgcccattccaagaggatttccctattgtagctttacaatgttttaatatgtagtattgttgtgcaaggtaccatcctaaactgactgactttccttcctccttctcctccaaaataatttttaattcttgcagacagactttagatcgtgtgtttgaagtttttaaagatggaatttttattggaactgcattacacgtataaattatttaggaagagttggcttctgaagagggcagctctgtgggcttgggctgggtttgaatccagccagacaactttccagctgtgttaccttggacagttacctagttcctctgtaccttgacttcctcatctgtcaaatgggtgatgataatagcacctacaccatggtcgttgggaggagtcagtgagagtctccaagtgtgctttattatcgttggtggtggtagtggtgtttagaacgcatccctcagtcagacagcgaggtaggacttctccgtttattaaatcctgaccttttttttccatgtaaaacctgcacgtttctgaaatgctcagagtacgttactcagtatgtacccatacgttctgtgggtatactttgttaggttgtgattagttcgttggagctggtggttgcagggacggctggaagcaaggagatgaaggagaggaagtcgtagctgggaaggggaccaggaagtgggtgtcaggtccaagagctgctagaaagaaacgaaactgaaagcagggaatttcccaagtttggggaagacaggaactgcagcgcccctccccgtttcacgccacgcgcgggaccgaggacctaggacctggccagctgggcgtggttcggagagccgggcgggaaaacgaaaccagaaatccgaaggccgcgccagagccctgcttccccttgcanctgcgccgggnggccatggacttgtacagcaccccggccgctgcgctggacaggttcgtggccagaangctgcagccgcggaaggagttcgtagagaaggcgcggcgcgctctgggcgccctggccgctgcnctgagggagcgcgggggccgcctcggtrctgctgccccgcgggtgctgaaaactgtcaaggtgaggtcccacctcggggtctttatgtgtccaaagggcaaaggggagtcctgggaggacgcttaagcctcacataggcttacggtgggggtggctttatccgcttgtgcacctcattcatttctttaacaaatacttccaatgtgccagccccgtgctaactcccccgaacatacgagccaggtaggtactcttaagcccgcttgacagatagagaaaatgaggcacagagaggtacagtgacgtgtccgatcctgtaagaggcccagccaggattcaaatccaagtagcctgattcctgcatctctactctcagaggctgcttcttatccattcattcactcattcactcattctcccagtcattcaaacagactgtgggcctcacactatgccagaccttaaggatacagaagtaataacactccgcgtaacagccagagtagcccaatttattgagacattatcaaataacaatgaaaattatctcattaaatgagtattacctcatttcatccccacgttcagtgaggcaggtattattgtacctgttttatggatagggaaactgaggctagacgctaaattactactctgagtcacatcttttttttttttttttttttttttgagacagggtctcgctctgtcacccaggctggagtgcagtagcatgatcttggctcacagcaacctccgcctcctgggctcaagttattctcacacctcagcctcccaagtagctggcactacaggtgcacactaccatgcctggctaattatttgcattttttgtagagatagagttttgccgtgttgcccaggctggcctggaactcctgggctcaagtgatccacttgccttggcctttcaaagtgctgggattacaggtgtgagccaccatgcccaggtaatttttgcattttttgtagagacgggatttcaccatgttgcccaggctccgggtcactttttgtcacttaaatacagccacactgccactgtgatcccaggacactcgcagattcagggaggagacaagtcatgagctaccttatcctcagggtagatttgggggtgccaggagtggattgatggagggaacctgggtgtgctagaggaggttgtcaggagagggagtgaaaacgcagagtagaaatggcctcagagcacctagtggtttcctggggctgactctcagcttgggaggtggggaaggaggagacacttgtcgcctaggaggtgtgaagtcccgtttctaccttggagatggacaggagggatttctgtgcagcaagggaaagccctagcatccttagcttccctggaaaggggtgggagggggttctggagcacaatctccctgtgctttcattgtctcctttgtaaagtgagcacggtgcaatctccctgtgctttcgtttcctcttttgtaaagtggtaccttccttctggggctgtgaggaaggttcaatgagatgagagtgtgcaaaacgtgcaggaagtgcccagcctgtaatattccctgttcccactttgtcagcagcccccagatggtgggagctggwagtaaaaggactggcataatcatcgggataagtagggggtcccagtttgaggcaagccttgctcctggagggctccatcctggttcttgctgtttactggctgtgtaactcatttcaccatctgagcctcactccccatatctgcagccacatgtaactacatcacagttgttttgtgttggaagtgagattagagacgtcagatcccagacacagaacagtggctctgacaatgtttaggagtttcttttccaaatcctcaggttggaagctttgccgaaagaaacactaatcacacaggtctcagaaattgagtcataccacagttctgtacccattctgagcaaagattgcaaatgtgtgttctgcaaagcagaatttgttttacctgcggtcttgagtttttaaaaagttagttgccaacatttaaaaatcatggatataggcctggcatggtggttcatgcctgtaatcccagcactttgggaggccaacgagggcagatcacttgaggtcaggaattcgagaccagtctggccaacatggtgaaaccccatctctactaaaaatacaaaaattagccaggcatggtggcacacacctgtagtcccagctactcaggaggctcaggtgggaaaatcacttgaactcatgagatggaggttgcagtgagctgagatggtgccactgcactccagcctaggcaacagagtaagtctctgtctcaaaactaaaaataaaaataaaattacawgtatggatttagcccagcacggtggtgcatgcctatagtctcagacacttgggaggctgaggcaagaagatcactcgagcccaggaattccaagctgcagtgagctacaatcgtgtctgtgaatagccactgcactccagcctgggcaacatagcaagaccccatctctttaaaaaaatgtaaaaactagccaggcatggtagtgtgtgcctgtagtctcaactacttgagaggctgaggcaggaggatcactcgagcccaggagttcaaggccgcagtgagctatgcgttccagcctgggtgacagaacaagaccctgtttctatggaaaaaaaatcatgagtttacatgttaaaattgcttctcttgaaatctcgagcctggctaccctgggcccacattcccgcgtggcttcaatgcctacagccatgtggccacagtctctccccagcacacttgcctcactcaagttgcctgccaggttgcaaggccactagaattggacagtatgaaattctgagttatttttctttgcccagggaggctcctcgggcyggggcacagctctcaagggtggctgtgattctgaacttgtcatcttcctcgactgcttcaagagctatgtggaccagagggcccgccgtgcagagatcctcagtgagatgcgggcatcgctggaatcctggtggcagaacccagtccctggtctgagactcacgtttcctgagcagagcgtgcctggggccctgcagttccgcctgacatccgtagatcttgaggactggatggatgttagcctggtgcctgccttcaatgtcctgggtgaggggttcctagaccattccagggttgggggcaaaagatcattgggaacaacacaggacttccaattctagcccagccaccaacttgctgtttgacctgggccagcctctacccctctctcagcctcagtctggggactaaacatattggacttgtgccagacaaaggcagagaaaccccagttcctcctggatctgtggtcctgctgtcaagatgcttggccctcccacaggcatctgggagtttccctcagccactgcctggagcggttactgctcagcccttccacaaatactcccgaaagctaagccaagtggacatgtggctagcagtaggggcctggggacaaaaccagaattctgcaaaatcttgtattttatgttgaaaacatcaatgtgatttttgtgttctccttcrtaatacacgtatgcttgagttaagataaaaataggcctctgtgtcctcatctgtaaaatgaggataatactaatggggataatagtaatcttatagagttgtcagaagaattaaatgcattaatatatgtaatcaagcttagaagtgtgtctagtgggccaggcgcagtggctcatgcctgtaatcccagctttgggaggccaagttagagactgcttgagcccaggagttcaagatcagccttggcaaaatrgcaagatctagtctctacaaataataataattttaaaaaatagccaggtgtagtagtacatgcctccctctgatcccagctactggagaggctgaggtgggaggattgtttgagcccaggcagtggaggctgcagtgaattgtgattttgccactacaatctgtctgagtaagactcttcttaaaaaaaaaaaagaaaaaagaatgtctagcatgtgataagggttgtaagagtgtttactattattattatttctattattgttgttgtttctattattattgttattattattattattattatttaccttgatgatctgggggatagctttatcctttgggcagatagccacatcccctatgcctggtaccctatgcctagtgtacccacatactgggtacacacacacacacgcacacacatttttaagacagggtctcactctgtcacccaggttggagtgtggtggcatgatcttggctcactgcaacctccgtcctgggttcaagcaatcctcccacctcagcctcccgagtagctgggctacaggcatgcaccaccatgcctggctaatttttgtattttttatagagatagggtttcaccatgttgtctaggctggtcttgaacttctgagatcaaatgatccacctgcctcagcctcccaaagtgctaggattacaggcacaagccaccccacccagcctgggtacacatatattaatcataatagttactacttattaaatgcttaactattccaagaacttgacatgttttatctcatcaattcttcacaacaaacttatgaggtctgtactgtttcagcttcaattttaccattggggaaactgaggctcagagacatacagtgacccacccawagccacacagcaggcaagcggtagcagcaacctcagggaattatggaaagtgtttacttctcccaagccatgcccatgggagtggtggcggaaaaggcgcaccctgcaaagtccactggctctgagctcaaatcctgcctccatcgcatgctggctgtrtaaccttgggcaaatcatggaatttctctgtgcctcagcttcctcagctatcaagtgggatgaagaactgtacttgcctcatagggttgtggtggggatacatgtaaagaccttctgtccagtgcccagtatgcagtaaaaaaaatatatatttttttctaagacagagtttcgctctgtcccccaggctggagtgcagtggtacgatctcagctcactgcaacctctgcctcctgagttcaagcaattctcgtgcttcggcctctggagtagctgggattacaggcgagtgccaacatgactggctaatttttgtatcttttgttggccaggctggtctcgaactcctgacctcaggtgaacctcccacctcggcctcccaaagtgctgggattacaggtgtgagccacagcgccaggcctgtagtaaaaaatatcaacaaccactgctaaaggatcagggctttttgccttttatttcttgggcatcgttttcctctccgtgacacctcttaattaaggatatgtagagtggtgttttgaggaaggctcagggaggagagagttgccaggctgcaggyactgctgactcagctggaagcaactttcctgtttaaccatcttggaatgcagctgctcctctttgagctgttgctctagggactgcctggccatttgggatggagggactctcccactgcattctggagtgccgctcttcttccctgcctcctgaaaagctccaggctctcttcccagtcccccgactcccatgttaccagatttcttcccctctgaattcttcccactctctctcagcgccccaggctgagctcggcaccaacaccgccctccatcctgtgtcctcagtgccctccctaactcacagcgcttcacaccaacaggtcaggccggctccggcgtcaaacccaagccacaagtctactctaccctcctcaacagtggctgccaagggggcgagcatgcggcctgcttcacagagctgcggaggaactttgtgaacattcgcccagccaagttgaagaacctaatcttgctggtgaagcactggtaccaccaggtgaagccacttggaagggtttctccagacatgtgactgtttgctttgtgctttcatagtcgtgaaactgttgtcttacatttagtggccattcatgttctctctctgggaattgtctgtttatgtcccttgtgcattattttctcttgggttagctgtcttgttactgatttgttgaagctctttatatattgtggatactgatccttatttagttaatataatgcattcttccaatagtcttccagtctgtgtcttgggcttttgctttgtttaaaggttatttgtaggacaaaatatctacagtttaatgtactcagatatatcctttgaaaaatgagttattctttgtgtgtcttaagaagtctttccctatcctgccaggtgcagtggctcatggctggaatcccagcactttgagtggccgaggcaggtggatcacttgaggtcaggagttcaagaccagcctggccaacatggtgaaaccctgtctctactaaaaatacaaaatgtagccgggygtggtggtacacacctgtaattccagttactcgggaggctgaggcaggagaatctcttgaacccaggaggcagaggttgcagtaagccaagattgcaccactgcactccagcctgggtgacagagccagactccatctcaaggaaaaaaaaaaaaaaaaaagaggtctttccctgtcctgactttgtaaaatgactctttcatatttcctgccatcatattgtttcctattgtatttctgttcatattcagggctttggcctgtctggtatggtatgaggtatatgcggagttggtacacttccctccctagcctcagggatgctcccttgctctgttcatgtttgttgccagactcttatgcactggggaaagtgtgcccagcctatgcctggagatgggggaacaggctcccccaaaatcttgcagcacatggaccagtcatcataarcaggtctctcaaggaagagattctggattccagttctggctcagccatcttcttgctgtgtgaccctggacaagttcctagccttctctgggcctctgtttcctccacttgcacataaagaaatatatgcatcggcaaatcttactcaggttctttccatgtaagattctccaggggcagaaaatgctaatagcctggtacttcctaaaagggcaaactgctgggtatggtggctcacgcctgtggtcctctccacgcaggaggctgaggcgtgaagatcacttgagcccaggagttcaaggctgcagtgacctaagattgagccactgcacttcagcctgggcaacagagtaagactctgtctataaatwaattaattaattaatacaactatggagccagcctggttgggcgttagaaattctatcttgatctgggtggtgggtacacatgtgcacccacgcatgtttgtcaccccagagagagggggtgagcggagggagtgtggagatgctgggtgcttctagccaggggggtcactttctggcatgctgaagcatcccctctggagttacccagaggcctgggattcttgccttggcatggagtaatccctccctggtacgtggagatcccaagtatatggtgcacaaatagaaatcatgcattttgggatgggggatagacggctggagtgaggagggaaggacagagttctggcccgctgccccaccccactccaggggtgaaagggcgacaacttggtgtccttctccaatcagccacgcaactgggaccccagatctgcttcacctttatttgaggatagatagcaatttcagactacccttggcttctctctgactgctccctgcctccttgggacttgaaacttacacccctccctcccaccactcccccatcatatgagccaaccacttggctgaagctaccagtgagggctggtgagaaatgccacttgttcttggaacaggcttggaacacagcatcttgcctcaggctcggcctggaaggtccccagtctggttatgcagagagctggctctctttcctccccttcttccttctgagtcccctgccgatgccctctcacaggtgtgcctacaggggttgtggaaggagacgctgcccccggtctatgccctggaattgctgaccatcttcgcctgggagcagggctgtaagaaggatgctttcagcctagccgaaggcctccgaactgtcctgggcctgatccaacagcatcagcacctgtgtgttttctggactgtcaactatggcttcgaggaccctgcagttgggcagttcttgcagcggcagcttaagagacccaggtacttcctaatagcccaccatctgctctcctgtcccggggccagggggagataattgacaaggacaaaaccggttacatctactgagtgcttgggtatagaggccaaagcaaaatgctacatgtacatgttttaattcactggactcagcccagatgcacattagaattacctgggggagttttaaaaaatataccagtgcctggccccacawgttttatgcgtgaatgttttgctgatgtatagcagaaagtgcatgttctgatgactgtgtgaagaccgcatactttgaaaccaccacccagatcatggtagaatatttccagcaccccactggtcccctctcagtcagtaaccttccaaaataaccccacttacacttttataattacagttgtgccttttcttaaatcttatttaaatggaatcatgccacatgtacttttgtgtctggcttctygttctgttctcaagattaagtctttgagatttagctatatagttgtggatcattcttttttgttgctgtatagtattccattgtgtgaatttatcaaaatatgttgtctattctactgatgatggacayttgagttctttcaacttggaactattacaaatagggccatcataaacattcttggacatgtttttttggtgcatatgcatatctgttggaaatatacctaggaatgaaattgctgaattgtagggtgtaactcaagagcccttgagagtggatcctggtatcttgtgattccaacgtgcagccagggttgacaatgataagcaggcaatgttgttttcctcattttgcggataaggaaatcgaggctcagagagggtaaatcatttgccccaggtcacacagctggaaagtagcagagatgcgattggaaccaggtccgtttcactccagagccctcttgctaaccagaaccttcttgtctctctgaaattgcaggcctgtgatcctggacccagctgaccccacatgggacctggggaatggggcagcctggcactgggatttgctagcccaggaggcagcatcctgctatgaccacccatgctttctgagggggatgggggacccagtgcagtcttggaaggggccggtaagtgagggggycccaggacccttgggttttgcactttgtttatgtgtccagtgtttcctgagcatctactatgtgccatatggtgtggaacaggctttaaaaagcaggggtggccaggtgtggtggctcacgcctgtaatctcaacacattgggaggccgaggtgggcagattacctgaggtcagaggtcaggagttcgagaccagtctggacaatatggtgaaaccttgtctctactaaaaatacgaaaattagccaggcatggtggtgggtgcgtgtaatctcagctactcgagaggctgaggcaggagaattgcttgaactagggaggcggaggktgcaatgagctgagatcactccattgcactccagcctgggtgacagagtaagactccgtcccaaaaaaaaaaaaaaaaaaaaatgcacagggcatcaggcatgtaaaacagtcttatcaccaagctcaagctgaaactgcccgggggaaggagtcctttgtttttctgcagctatggtctggttaccagacctttctgcccatcacaagggyacccattttgcagtttatccctccagaaaggcacctttttcaactctgcccaaagatggccatgtgcgttagccatggccctcccacttcccctctctgagcctcagtcaccctgactgtacaaagggcgggagctggggagagaaggcattgggttgaygcagaaaccactgcgcctggctgaggcagctccttcaatgaccttccagggccttccacgtgctggatgctcaggtttgggccaccccatccagctagaccctaaccagaagacccctgaaaacagcaagagcctcaatgctgtgtacccaagagcagggagsaaacctccctcatgcccagctcctggccccactggggcagccagcatcgtcccctctgtgccgggaatggccttggacctgtctcagatccccaccaaggagctggaccgcttcatccaggaccacctgaagccgagcccccagttccaggagcaggtgaaaaaggccatygacatcatcttgcgctgcctccatgagaactgtgttcacaaggcctcaagagtcagtaaagtgagttgggccagtggagacacaggggggaccctatcgagggatcagcgtggggaagggaaggagttacagcaatggagctgaggttgggctggggaactggacggcccaggaaggatgatttgctggcttaaataaaatatatttaagtgccagcttagattttcttttttttaatgatacagtttttaaaacactattacaagaatcagatcacttccctcctcagctcaaaattctccatggtttcacagggcgcagaggcctcaagtcctacaggatgggccctggtctccctctggccttgacttactccacactggcctcctggctgctctgagcttaccaggtccacagaacaattcaaggcctctgtagtggctgttttctcttcctagaagaaaatgagaattctcttccccaaccatttggctctctctctctcgctctctctgtctctcctcttcaagtttcttgatctgatgtcctcgtccactgaggcctgaccacacgatttaaaattgcagtcttgcccgggcacggtggctcacgcctgtaatcctggaactttgggaggccaaggtgggcagatcacctgaggtcaggagttcaagaccaccctggccaacatggtgaaaccctgtctctactgaaaatacaaaaattagctgggcatggtgacgggcccctgtaatcccagctatgcaggaggctgaggcaggaaaatcgcttgaacccgggaggcggaggttgcagtgagctgagaccatgccactgcactccagcctgggcgacaagagtgaaactccgtctcaaaaataaaaataaataaaaataaaattgcagtcttgcactaccagccccctttctgttctgcacagcacttagcattttctcaggacctattgtttattgatggtcccttccttccctcccccagccagcatgtaagttccagaagaacagaaattttgtatcctctcttcttctttctttcctgcaacaaacatttagtgagcacttacatgtatcggatatgtgtgatatcccgtgtgaaggagggagggagggagggaattgatggaaacagggcaacagaggacaattgcaggccctattagggcttgggacctcaatttgcaactgctggcccagatgtgcagtcagtagatgctgcagatagtaggctaaaatgtttggtcgctgcccctacttaatcccacctccattatctgttgctgcagtttggtctgacttagctcagtcttcatggatcagagggcaggtgcaggcagatacaacttgactctctgtcacaattctaagaggtcacaggacccatgcagtcgacctttgtcatagtccccagacctgacatcagcaagagggcaggttccaggctgtagatggggcgcaggtgatgggatcgtagtccgactcccaggctcctagagggtccctgatctgagctgttcttccctccacaggggggctcatttggccggggcacagacctaagggatggctgtgatgttgaactcatcatcttcctcaactgcttcacggactacaaggaccaggggccccgccgcgcagagatccttgatgagatgcgagcgcagctagaatcctggtggcaggaccaggtgcccagcctgagccttcagtttcctgagcagaatgtgcctgaggctctgcagttccagctggtgtccacagccctgaagagctggacggatgttagcctgctgcctgccttcgatgctgtgggtgagggcgcccagcctgtcccttggagagtgatagggacctcaggcgcccatctaacaggggcacctgccatcctctttgtgatcctaattctcctacttgaccaagcattgaaaactactttgagatactgaaagtaatcatcaccatcaaatcttacaactatttagtgctttaactttacaaatattttaattatgaaatgtttcaagcatacagaaaactacagaygtcacacacccatgtagcccaattcagatttaacaaatgttaacagtaggcatatctgcttggtatttttttaaagaaatttctcatgttataattttcttccttattttaaagggtttactttatggttcatttttttttaactttcggaggtgaatcttagcttagtaattatcagttttagtcaatgcaattaaagctacccatttccctttcagtatcacattagctacagggcaaatcttttgtttgacatgcataatttttattatcattccggtctaaatatttagtacttttaattatgacattattgtttgttctttcatccatgaatatttggaagtagctttccaaatgaatgttttggagatttgtttgctttcggcatttacttattatgttttttaaaactgtagtcagaaaacatactttatgtgatatcaattctttggaatttgttggcatttcttagattgcccatggttgaaaagaatgcatgctttccatccaggcatggtggatcacacctgtaatcccagcattttggaaggccaatgcgggcaggtcacttgaggtcaggagttcgagtccagcctggccacagtgaaaccccatctccactaaaaatacaaaaaaaaaaaaaaaaaaaaatagcctggcatggtggcacgcacctgtaatcccagctactcgggagactgaggcaggaaaatctcttgaacctgggaggcagaggttgcagtgagctgagattgcaccactgcactccagcctgagagacagagtgagactctatctcatgctttccattgctgaatgcagacttctatataggtcctttagatctagcttatgacttcttgctcggataattttttgtttggtctctcaatttctgagtaaaatatcttaaaatctcctgctctgaatggatatttatcccttgttccttgcaattctgtaaattttgtttttaatattttgaggctatgttattgggaacatataagtgcataatattatattttattggattgttcttttattattaagtaataatcttcatttctgaaagttatctttgtcttaaagccttttgtctgacattaatagggctttagtcctcctttgtcagcattttcctgacgtaccctctctactctttatttactagcatgtgttattaaattgtacccattacaggcagcacaaagctaaaagacaaaaatgaaagaagcaacaatgatataatgatcttcaagggtttgataatatcttggaactaaacttccagacactaataataggggagattatttcttttgttttttttttacaatctatrcaaattaaaccctattaatataattaacaaattttttcaccattgctacttgatttcctgttcttccttctggattcattttccttcttacagaaatacatcttttagtactttttcagaaagggtttatgagtgacaaatttttctcagactttgtctaaaaccatttctgtttcacctccatgcttgaatgggatgcttgacacttgttttccttagttctgctgtcttcttacctgttgttgctgatgagaagtctctgtcagttattgattttttgttgttaatgatctgttttctgtttgcatgcatgaaytttgtttgttcattttcttttgatttccctttcagtggcttttaagactttctcttggttcatagtatycttcagtttctctttgatgtatctgtrtatagaattctttttttctatgatttttttattatactttaagttctagggtacatgtgcacaacatgcaggtttgttacatatgtatacatgtgccatgttggtgtgctgcacccattaactcgtcatttacattaggtatatcttctaatgctatccctccccactccccccaccccacgacaggccctggtgtgtgatgttccccaccccgtgtccaagtgttctcattgttcagttcccacctatgagtgagaacatgtggtgtttggttttctgctcctgtgttcgtttgctcagaatgatggtttccaacttcatccatgtccctacaaaggacatgaactcatccttttttatggctgcatagtattccatagtgtatatgtgccacattttcttaatccagtctgtcattgatggacatttgggttggttccaagtctttgctcttgtgaatagtgccacaataaacatatgtgtgcatgtgtctttctagcagcatgatttataatcctttgggtatatacccggtaatgggatggctgggtcaaatggtatttctagttctagatccttgaggaatcrccacactgtcttccacaatggctgaactagtttacagtcccaccaacagtgtaaaagtgttcctatttctccacatcctctccagcacctgttgtttcctgactttttaatgatcgccattctaactggtgtgagatggtatctcattgtggttttgatttgcatttctctgatggccagtgatgatgagcattttttcatgtgtctgttggctgcataaatgtcttcttttgagaagtgtctgttcatatcctttacccactttttgatggggttgtttgatttttttcttataaatttgtttaagttctttgtagattctggatattagccctttgtcagatgagtagattgtaaaaattttctcccattctgtaggttgcttgttcactctgatggtagtttcttttgctgtgcagaaactctttagtttaattagatcccatttgtcagttttggcttctgttgccattgcttttggtgttttagtcatgaagtccttgcccatgcctatgtcctgaatggtattgcctaggttttcttctagggtttttatggttttaggtctaagatgtaagtctttaatccatcttgaattaattttgtataaggtgtaaggaaaggatacagtttcagctttctagatatggctagccagttttcccagcactatttattaaatagggaatcctttccccattkcttgtttgtctgtttgtttgtttgttgttgttgttgttgttgttgtttgagatggagtctcgctctgttgcctaggctggagtgcagtgacgcgatctcggctcactgcaagctccrcctcccaggttcacaccattctcctgcctcagcttccctagtagctgggactacaggtgcccgccaccacatctggctaawttttttgtattttttagtagagacagacagggtttcaccatgttagccaggatggtcttgatctcccgacctcgtgatccacccacctcggcctcccaaagtgctgggattacaggcgtgagccactgcgcctggccccatttcttgtttttgtcaggtttgtcaaagatcagatggttgtagacatgyggtgttatttctgagggctctgttctattccattggtctatatctctgttttggtacagtaccatgctgttttggttactgtagtatagtttgaagtcaggtagcgtgatgcctccagctttgttcttttggcttaggattgtcttggcaatgcaggctcttttttggtttcatatgaactttaaagtagttttttccaattctgtgaagaaagtcattggtagcttgttggggatggcattgaatctataaattaccttgggcaatatggccattttcacaatattgattyttcctatccatgagcatggaatgttcttccatttgtttgtgtcctgttttatttcactgagcagtggtttgtagttctccttgaagaagtccttcacatccattgtaagttggattcctgggtatttcattctctttgaagcaattgtgaatgggagttcactcatgatttggctctctgtttgtttgttattggtgtgtaggaatgcttgtgatttttgcacagtgattttgtatcctgagactttgctgaagttgcttatcagcttaagaacattttgggctgagacgatggggttttctaaatatacaatcatgtcatttgcaaacagggacaatttgacttcctcgtttcctaattgaataccctttatttctttctcctgccttattgccctggccagaacttccaacactatgttgaataggagtggtgagagagggcatccctgtcttgtgccagtttccaaagggaatgcttccagtttttgcccattcagtacgatattggctgtgggtttgtcataaataactcattatwttgagatgcctcccatcaatacctagtttattgagagtttttagcatgaagggctgttgaattttctcaaaggcctttttggcatctattgaaataatcatgtggtttttgtctttggttctgcttttatgatggattacgtttattgatttgtgtatgttgaaccagccttgcatcccaaggatgaagccaacttgatcagggtggataagctttttgatgtgctgctggattcagtttgccagtattttattgaggatttttgcatagatgttttattgaggattttcgcatagatgttcatcagggatattggtctttttttgttgtgtctctgccaggctttggtatcaggatgatgctggcctcataaaatgagttatggaggattccctctttttctattgattggaaaagtttcagaaggaatggtaacagctcctctttgtacctctggtagaattcggctgtgaatccatctggtcctggactttttttggttggtaggctattaattattgcctcaatttcagagtctgttattggtctattcagggattcaacttcttcctggtttagtcttgggagcgygtctgtgtccgggaatttatccattttatctagattttctagtttatttgtgtagaggtgtttatagtattctctgatggtagtttgtatttctgtgtaatcggtggtgatatcccctttatcattttttattgtgtctattcgatccttctctcttttcttctttactagtcttgctagcagtctatcaattttgttcatcttttcaaaaaaccagctctcggattcattgattttttgaagggttttttgtgtctctgtctccttcaattctgctctgatcttagttatttcctgccttctgctagcttttgaatgtgtttgctcttgcttctctagttcttttcattgtgatgttagggtgtcaattttagatctttcttgctttctcctgtggtcatttaatgctataaatttccctctacacactgctttaaatgtgtcccagagattctggtatgttgtgtctttgttctcattggtttcaaagaacatctttatttctgccttcatttagttatgtaccaagtagtcattcaggagcaggttgttcagtttccatgtagttgagtggttttgagtgagtttcttaatcctgagttctagtttgattgcactgtggtctgagagacagcttgttataatttctgttcttttacatttgctgaggagtgcttttcttccaaccatgtggtcaattttggaataagtgtaatgtggtgctgagaagaatgtatattctgttgatttggggtggacagttctgtagatgtctattaggtccgcttggtgcagagctgagttcaattcttggatatccttgttaactttctgtctcattgatctgtttaatgttgacagtggggtgttacagtctcccattattattgtgtgggagtctaagtatctttgtaggtctctaaggacttgctttatgaatctgggtgttcctgtattgggcgcatatatatttaggacagttagctcttcttgttgaattgatccctttaccattatgtaatggccttctttgtctcttttgatctttgttggtttaaagtcccttttatcagagactaggattgcaacccttgcttttttttgttttccatttgcttggtagatcttcctccatccctttattttcagtctatgtgtgtctctgcatgtgagctgggtctcctgaatacagcacactgatgggtcttgactctatccaatttgccagtctgtgtcttttaattggagcatttagtccatttacatttaacgttaatattgttatgtgtaaatttgatcatgtcattatgatgttggctggttattttgctcgttagttgatgcagtttcttcctagcatcgatggtctttacaattaggcatgtttttgcagtggctggtaccgattgttcctttccatgtttagtgcttccttcaggagctcttgtaaggcaggcctggtggtgacaaaatctctcagcatttgcttgtctgtaaaggattgtatttctccttcacttatgaagcttaggttgactggatatgaaattctgggttgaaaattcttttctttaagaacgttgaatattggcccccactctcttctggcttgtagagtttctgccgagagatctgctgttagtctgatgggcttccctttgtgggtaactcgagctttctctctggctgcccttaacattttttccttcatttcaactttggtgaatctgacaattatgtgtcttggagttggtcttctcgaggagtatctttgtggtgttctcygtatttcctgaattttaatgttggcctgccttgctaggttgggaaagttctcctggataatatcctgcagagtgttttccaacttggttccattctccctgtcactttccggtacaccaatcagacatagatttgatcttttcatatagtcccatctttcttggaggctttgttcatttctttttactcttttttctctaaacttctcttctcacttcatttcattcatttgatcttcaatcactgataccctttcttccacttgatagaatcggccactgaagcttgtgcatgcatcacgtagttcttgtgccatgattttcagctccatcaggtcatttaaggtcttytctatgctgttcattctagttagccattcgtttaatcttttctcaaggtttttagcttctttgtgataggtttgaacatcctcctttagctcggagaagtttgttattaccaattgtctgaagccttcttctctcaactcatcaaagtcattctcyatccagctttgttccattgcttgcgaggagctgcgttcctttggaggagaagaggcgctctgatttttagaattttcagcttttctgctctggttgccccccatctttgtggctttatctacctttggtctttgatgatggtgacgtacagatgggattttggtgtggatgtcctttctgtttgttagttttccttctaacagtcaggaccctcagctgcaggtctgttggagtttgctggaggtccactccagaccctgtttgcctggatatcaccagtggaggctgcagaacagcaaatattgcagaactgcaaatattgctgcytgatccttcctttggaagcttcgtctcagaggggcacccagccatatgaggtgtcagtcggcccctacggggaagtgcctcccagttaggctactcgggggtcagggacccacttgaggaggcagtctgtccgttctcagatctcaaactccatgctgggagaaccactactctcttcaaagctgtcagacagggacgtttaagtctgcagaagtttctgctgccttttgttcagctatgccctgcctccagagatggagtctacagaggcaggcaggcctccttgagctgcagtgggctccacccagttcgagcttcccagccactttgtttacctactcaagcctcagcaatggtggatgcccctcccctagcctcgcttctgccttgcagttcaatctcagactgctgtgctaacagtgaatgaggctccgtgggcgtgtgaccctccgtgccaggtgcaggatataatctcctggtgtgccgtttgctaagaccattggaaaagcacagtattagggtgggagtgtctcgattttccaggtaccatctgtcatggcttcctttggataggaaagggaattccccgaccccttgcacttcccaggtgaggcgacgccctgccctgcttyggctcatggtccgtgggytgtacccactgtccaacaagccacagtgagaggagtgagaggaacccagtacctcagttggaaatgcagaaatcacccatcttctgtgtcactcacgctgggagctgtagactggagctgttcctattcagccatcttggaacctcctctctggatttctttttaatttgtcctctttgaaatgtgctgtccctcctgaatctgagagctcaattcttcctttagttttagggagaggtcttccaatagctcttcaaatactgcctctcccctattttgtctattctctacttctggaactcctgttagatggtttcttatctcatcctccatggcttttcatctctctcattgttcccatctctttgtctatcagggctgtctgtttttcagtttcttggacctgtcttctggtttataaactctattcaaataatgtctactctgctgcttatccttaattttttaaaatttcagtgactttttyacctctaaaagttatgtttctctctttcttaaatcaatcagttatttgttcataggcttcrattctttcactgtggtttcagtttctttgatgtcttcaataatttccaacatgcttattttagtgtctcagattgtcctattaactcaaattcttgaggtgctaattttcctatttgttgtgtcacctgactctccctcatggtcaatcatttcctcatatagtttgtaattttttattgtgaactcatctttggggtttgtggagattttgttgtctttgcttttcctgtggaagttccttgtgccctgggttggagaaatattacccttgggaccaagttttcacttcatttctacctggactccaagagtttcactaattcccaggctagattatgcattaatttaacagtctgggatttcctcaccatgcagatactgtaaatttggacttcacatccacatctagcacaggatcggggtcccagtttctcacaggggattttmttttttcccccacccagagccctagcagcaagcttccttgaagcccctctctgccagtggacaaccttttgcagtcacttttcatgaagaaggcatttattttagaggccagccttatgaaagtgaaggacaagactcaattgtagcttcctytctgtgtcttgtttttctttttctggaagataacgttaataatagcaataattactgcttattgagcayaygatgtattctacatactgttctaagcacttcacatgtagatttcaattgattcttacartagccttagaaggataggtgctatttatgatctcccttttacagatgaggaaactagacccgaagaggtaaaaatcacacagcttggatttgaacccaggcttatctgtctccaaagctcactcctttaaccactatgtgacacagcttttctggctcaagattatccatctttcagctttcagggaaaatttaaaaaacaaaaaataaatagaagattatccactgtgcagttactggatggattagcaaaaaatattgaaaagcatccagtacagaattgatactgaaaaaatgatagctctgattgttattcaatgttatagtgtattattgattgcaatgttaggtgattaatgttagaatattcataaaggctggtgaatggatgggttggtaaatgctgctgtcttcaattggagttgcacactcagggtgtttcaaacttctacagggcagctcagttctggcaccaaaccaaatccccaggtctactcraggctcctcaccagtggctgccaggagggcgagcataaggcctgcttcrcagagctgcggaggaacttcatgaacattcgccctgtcaagctgaagaacctgattctgctggtgaagcactggtaccgccaggtgagttgcccctggctcctcccaggaagccaccactgtcatggcaaccaccccagccaatcagttcctcctctacacccacatctcccctcctttgcttcttattggtcatccagagcagaaggacyggcctcctccatcctccatttcctgcccagatctggaagccactgttagaaaaaaatctcttctccatcaagtctaaagtcttcatttcttgtacctggggttcactttagcccatccacttctctcttttgacactgcaaatgttttctctgtttttcccccacctccaagccgttgcttatgatattacccccaccacatgtctatttttagaaaagaaaactcccctttctggaagcctagagctggcaatgaccaccatatggtaagggcctgtccaagacagaaaaaccagagcacttgaacagaaaagatctgaacagaaaagctgatgactccttatgggcttctggatcaagctgtgcctgaaagcagatctactccaaggcttttgggttacatcagccaatacattctttcatagccttttttttttttgagaaagtgtctccctttgtcatccaggctggagtgctgtggcacaattacagctcgctgcagcctcgaccttctgggctcaagtagtcctcctgcctcagcccccgtagtagctaagactacaggcatgcactactacacctggctgatttttgtactttttgtagagacaggagtcttaccatgttgcccaggttagtctagaacttctgggctcaagtaatccacccaccttggcctcccaaaatgctagaattacaggcacaagccaccatgcsccagccttgttgcctcttttgagttgcactaaattctgaacatccttcggagctcccttactaaatacttctctgaattctgacttgtattcatgcatccctatattcaacaaacatctatcgagcacctgctatttctaacttgtgatggacactgggataccaagatggatacattgcagcccctattcctgtacaaccaccccatgttatgtgattaatgttaaaatattcctaaaggctgctgatggatggattcgtcaatgcttccgtcttcaattagagttacacactcaagatgtttcaaatttccaatttccttgaggggagacactaggcaaaagccacgtctgagctctcagtctcactgtatgaccttagacaagtcactaccctcctctgaacctcagtttacccacctgtaaaatgagaagcatcagcaagtttctattctttctgcgcttctattttctatattcccttcctgccccaagtgcttatggccacactcagctcacatccactaatcactcatctttggttggccttgtgtgacacaggttgcggctcagaacaaaggaaaaggaccagcccctgcctctctgcccccagcctatgccctggagctcctcaccatctttgcctgggagcagggctgcaggcaggattgtttcaacatggcccaaggcttccggacggtgctggggctcgtgcaacagcatcagcagctctgtgtctactggacggtcaactatagcactgaggacccagccatgagaatgcaccttcttggccagcttcgaaaacccaggtgaagacccgcttccctttgcctggcttcattatcctmcccctccccactgtcaccctggagtcagtcatccaggaggagtccaaggtagggtttggggtggcaatcccactcctcwctctgcttccctctggactctttgctgaggaagtgtggacataaggagtcccaaaagaaaccagggccagttttattagcatgataaaatagtatttctcagttgaaggggccacccaatagctttccaaccaaggcagccaattgagatcgcttctgcacttgggcaagactgagccaaccctgaggtcctgacactctttccagccctcacgccccttttcagcccttccacccgcctcctctttcactgactcccaccttccccacccaccttcctgctgtgcccccagacccctggtcctggaccccgctgatcccacctggaacgtgggccacggtagctgggagctgttggcccaggaagcagcagcrctggggatgcagkcctgctttctgagtagagacgggacatctgtgcagccctgggatgtgatggtaagatggagggtcctggggggcagggggccctgcaccctgccttctagtcaggttcccttaacctgccggtgcacccatccccagctgctaggagtgttggtggctgacaactcatagccaccccttctctggagacttgcctttcatgaaatgcacagattgctacgtcccagccagtgcctgagtgacacagggttacaaaaagcctaactctgtctccaggcggaaccgattctgtgatgcaactcacgttccagcgctccctgtggaatcaggcaaacacttgtctccggctgagcacccagctttgctgagcctcttctctgccctctgctgctgtccttgttccacttctcctccaagcactgccccaattaatcatatgcacaagaattcctgccatggaccctgcttctaggaaaactgagacataagccacttgcagctcccaaaaggatatgattttatcacatttactattttgcagcagggtctcataaccagcatttaatactcaggacaatccattgagacccggacttcattattgcactcatttaaacatggggaaactgagactgtgtattgatgctggaaccaaaattcaatctcaggtccttctgatgctacctcagaacctacccaccagctgagaaggaaagagggacatgggagacagtgggagtcttgtcctcagaggacatcaaggrgcagggcttgggtgagcactgggagtcccgtctcaagctggccccacctggattctctctgcagccagccctcctttaccaaaccccagctggggaccttgacaagttcatcagtgaatttctccagcccaaccgccagttcctggcccaggtgaacaaggccgttgataccatctgttcatttttgaaggaaaactgcttccggaattctcccatcaaagtgatcaaggtggtcaaggtgagtcctcagagagctgtaggcaagcagtgtcctgcaagctggtgatctctcccagcccagggccaggcttgacccacttctgccctcgtagcaaacagcaaaaagccaggcatagagaaagagctggaaagtggtcatgggaggatggcagagagagggcccagatatgtccaacaagtctcttttggttgctagtgacacctaactcaaaagacacaacaaaggaatgtattgactgatgtaactggaaagtcctgggtagggctgcttaccggcatagctagatccaggagcccaggcagcatcatcaggactcagtttttctctccagttctcggttctgctttttaatgtcttggataggcccttaacatatggtggtctttggcagctctaagcttccagaaaggggaacttgttttttcttaaaattcaaataaaagtcttggaattgagtctcattggcctggcttgggtaacctaccaacccccaaactagttactggggctagggagacattatgctctggatggccaagactgggtcacatggtgaagtggcccccgcctagtcctcatgggctgagtgtggggtaggagtggtccctccaaagaacaccaggatgctgatcccaggtggaaaggacgctgggggtgtacaaaaggtcacactgtccacggcmctggatacagcctcagtccacagttggagagacaagtgagacccagatcagctcagaaagagtgttagcataaagccagccagtgaacagtgccagggatgctggtttgctgtgtgaccataggcatgtaccttcccctctctgatcctcacgttcctgatttctaacacttgaggagagtggcttggatcactggctctcaactctggctcccctggcttgaccttggaattacagttttttaaaaatatgctgatgcccaagccccaacccaggaaaacttaaatcacagtcttgtggggtgggagccagccattagtcgttggtaaaagccttccaggtgcagacaggcttgggagctgcaggcccaaaaaaccaaccaacaaacaaaacacttctcaaatcctctccagtcacaaaacatgatggaatgagaaattttgcatttgttgaagggtttaaacttacctcttgcacgcttctttttcttacaatcttaaatacagtctttcttaccatattaaagatctaacacagagaggttagatgacttgtccaaggtcacacagtaggttttctaactcacagtccagaaccracaggctaagccatgcttcaagggttgagccacctgccatgtcctctccagggtggctcttcagccaaaggcacagctctgcgaggccgctcagatgccgacctcgtggtgttcctcagctgcttcagccagttcactgagcagggcaacaagcgggccgagatcatctccgagatccgagcccagytggaggcatgtcaacaggagcggcagttcgaggtcaagtttgaagtctccaaatgggagaatccccgcgtgctgagcttctcactgacatcccagacgatgctggaccagagtgtggactttgatgtgctgccagcctttgacgccctaggtgaggtgccctggcgtagacctgagagggggaaatacagaggcagggccgccatgggcagttgtagaggttgcacagtacacaaccaggccacatctgttcgcatcattgcaggcattgtagttgtgtatgttcatcacaactttcctgcaaagtatctraagaagagggcccctttttctaatttgcgcaggcactctgtgggctaacagtggcctcaagctgggttccagtctgagcaattccaccaacatgctggatgaccttgaacaagggacttccccgtcctgagccccagtgtctttatctcacatctgacagtaaggacactgatgtttcttgcacattcccagctttgaatggtttgtgtgccacccacctcctccacctgctgcagatccattcattcagttcattcaatacatgcatctactctgtgcccagtgctcttccaggcaccaaaaataaagccttgaacaaaatagacacaactctcttcatatcttttcaactctcagtttgattagcagttttcagagtgagaaattcccttgtatccgaatttatttggtttctgagtttgagggagcaggtggccaagggagggattcatgcagaatttttttttaagagacagggtcttactttatcacctggcctggagtgcagtggcaccatcatgactcaatgcagcctcaaactcctgggctcaagtgatcctccagccccagcgtcctgagaaactgggactacaggtgcacaccaccacacctggctaatttatagaattttttgtagagatggggatatgactatgttgcccaggctgatctgaaactcctggccacatatgatcctcctgcagtggccttcgagagtgctgggattacagacgtaagccactgcacccagcccagaaatttatctgaatctactcagttcttcagttcagagagcaagaatttggatattaaggaatgcctttaagtgcaatgtaaccagaatggtgatgtcaactccatacacagctctgttacctgcaggaggatgtaagactgaggcctgccctccctcggttagacagaaagataagtaagtattagagaggtgttaaagacaggctagctcccagctgagactttttccaagataggtaagcagatggtttgaaagggagcagaaaagggaggatgactgtcaccagggatttaatgtggatcaggccacatctgtgttccacctaaaaacaccctgtggcctcccagtggatcccagaccacccttaggaaaacacccaagaggtaggagatctcagaagtcctttctaagttggccccactgggacancatgggagccggagtgatggtaaccatctccccatctccaggccagctggtctctggctccaggcccagctctcaagtctacgtcgacctcatccacagctacagcaatgcgggcgagtactccacctgcttcacagagctacaacrggacttcatcatctctcgccctaccaagctgaagagcctgatccggctggtgaagcactggtaccagcaggttcggcacatggataggccaccttcctaagttgccctgggatctgcctctggagcactttcctgggaggaagsagggcccagccctggccaagatcctgggttggtggagcagagcagaaagagtgctatatctcagctgtgggaccttagttttcttatctgtaagatgggggtgataaaactatgtcacaggatgtgatgggataatgcatggcaaggcatctggcacatgtaggtgctcaataaaagttttggggttgctttgccaagtccagaataatcccttctgtacctcatcagtgccaatatgaaccaacatatctttcttctcgttctccagtgtaccaagatctccaaggggagaggctccctacccccacagcaygggctggaactcctgactgtgtatgcctgggagcagggcgggaaggactcccagttcaacatggctgagggcttccgcacggtcctggagctggtcacccagtaccgccagctctgtatctactggaccatcaactacaacgccaaggacaagactgttggagacttcctgaaacagcagcttcagaagcccaggttcaggtctacccccaatgttccagaatttcaaacctgggatcactcactctccccactttctagattgcagagcagagatgggaaaacactcttcctagaacggattccttcctagaagttatatttgtagtacctgagggacaaacggtcaattttctggtcacccaggaatagggttgccagataaaacgcaagaccccaagttaaatttgagtttcagataaacaatgaataacttcttagtataagtatgctcgatgccatatttgagacataattacgcttaaaaatttattcactgtttatctgaaagtcaaatttaactgggcatcctggttttttgttgttgttgttgtttgtttgtttgtttttgtcacccaggctggagtgcaatggcgcgatcttggctcactgcaaccctccgcctcccgggttcaagcaattcttctgcctcagcctcctgagtagctgggaccacaggcgcatgccaccaggtccagctaatttttgtatttttagttgagacaggggtttcaccatgttggccaggctgatctcaaactcctggcctcaagtgatctgcctgcctaggcctcccaaagtgctgggattacaggcatgagccactgtgcccagccttgtatttgtatttgttaaatctgaccaccctacctgtgaacccacccaggtgccataagcatgtttcattctttgggattttgcctacctctgaaatgggtacagagataatagagatgcttttgcaaactcaagatgcatctccagtcagtggggagtggctacttagaatgatgtgttgaaaaagcttctaaggttgtgatttgactcagctggaaagagtaggctaaccagctagtagtgtccaaaggttgagcatcccaaatgcaaamattcaaaatctgaaaatggcccagaatttgaagctttttgaccaccaaaaaawatgctcaaggaaaatgcttattggagcattttggattttcaaattagggattcttaactggtaagtaaggcaaaggtccaaaatctgaaaaaatttgaagtccaaaacacttctggtcccaagcattttagataagaaatactcaacctgtatcatggatgcaggaggggagagttgtggaaccagtgttgtgattgattaacaatgcctcccctgaataaggaaggggtaagcggtagcaccgtgrttgattagtaatgtttgcctgaatgcagaatggcaaagtggccatgtgtgtcttattttctatacctkccctgtagtgtataggagcactgaggaatctctgagccctggctctagcccctgcaaagtgttagataaaaggggaaaatagtccaaccagtgccacaggtggacacctagatgttgccaggaataagactgtccctgggtgggaattgcaggcctatcatcctggatccggctgacccgacaggcaacctgggccacaatgcccgctgggacctgctggccaaggaagctgcagcctgcacatctgccctgtgctgcatgggacggaatggcatccccatccagccatggccagtgaaggtgagagatctgtggtgcyaaaggaagtaccctttaggggtaaggggggagcatggtcaggggagggacatgattcccactaaaggggcagggcccagtgatggccccaggtatgcccctgtgcttccattttcccatccggctgtgtggtctcagcttctgcagaaagaatggggttaccaacatctcttataatacttccccaggctgctgtgtgaagttgagaaaatcagcggtcctactggatgaagagaagatggacaccagccctcagcatgaggaaattcagggtcccctaccagatgagagasattgtgtacatgtgtgtgtgagcacatgtgtgcrtgtgtgtgcacacgtgtgcatgtgtgtgttttagtgaatctgctctcccagctcacacactcccctgcctcccatggcttacacactrggatccagactccatggtttgacaccagcctgcgtttgcagcttctctgtcacttccatgactctatcctcataccaccactgctgcttcccacccagctgagaatgccccctcctccctgactcctctctgcccatgcaaattagctcacatctttcctcctgctgcaatccatcccttcctcccattggcctctccttgccaaatctaaatastttatatagggatggcagagagttcccatctcatctgtcagccacagtcatttggtactggctacctggagccttatcttctgaagggttttaaagaatggccaattagctgagaagaattatctaatcaattagtgatgtctgccatggatgcagtagaggaaagtggtggtacaagtgccatgattgattagcaatgtctgcactggatacggaaaaaagaaggtgcttgcaggtttacagtgtatatgtgggctattgaagagccctctgagctcggttgctagcaggagagcatgcccatattggcttactttgtctgccacagacacagacagagggagttgggacatgcatgctatggggaccctcttgttggacacctaattggatgcctcttcatgagaggcctccttttcttcaccttttatgctgcactcctcccctagtttacacatcttgatgctgtggctcagtttgccttcctgaatttttattgggtccctgttttctctcctaacatgctgagattctgcatccccacagcctaaactgagccagtggccaaacaaccgtgctcagcctgtttctctctgccctctagagcaaggcccaccaggtccatccaggaggctctcctgacctcaagkccaacaacagtgtccrcactagtcaaggttcagcccagaaaacagaaagcactctaggaatcttaggcagaaagggattttatctaaatcactggaaaggctggaggagcagaaggcagaggccaccactggactattsgtttcaatattagaccactgtagccgaatcagaggccagagagcagccactgctactgctaatgccaccactacccctgccatcactgccccacatggacaaaactggagtcgagacctaggttagattcctgcaaccacaaacatccatcagggatggccagctgccagagctgcggraagacggatcccacctccctttcttagcagaatctaaattacagccagacctctggctgcagaggagtctgagacatgtatgaytgaatgggtgccaagtgccagggggcggagtccccagcagatgcatcctggccatctgttgcgtggatgagggagtgggtctatctcagaggaaggaacaggaaacaaagaaaggaagccactgaacatcccttctctgctccacaggagtgycttagacagcctgactctccacaaaccactgttaaaacttacctgctaggaatgctagattgaatgggatgggaagagccttccctcattattgtcattcttggagagaggtgagcaaccaagggaagctcctctgattcacctagaacctgttctctgccgtctttggctcagcctacagagactagagtaggtgaagggacagaggacagggcttctaatacctgtgccatattgacagcctccatccctgtcccccatcttggtgctgaaccaacgctaagggcaccttcttagactcacctcatcgatactgcctggtaatccaaagctagaactctcaggaccccaaactccacctcttggattggccctggctgctgccacacacatatccaagagctcagggccagttctggtgggcagcagagacctgctctgccaagttgtccagcagcagagtggccctggcctgggcatcacaagccagtgatgctcctgggaagaccaggtggcaggtcgcagttgggtaccttccattcccaccacacagactctgggcctccccgcaaaatggctccagaattagagtaattatgagatggtgggaaccagagcaactcaggtgcatgatacaaggagaggttgtcatctgggtagggcagagaggagggcttgctcatctgaacaggggtgtatttcattccaggccctcagtctttggcaatggccaccctggtgttggcatattggccccactgtaacttttgggggcttcccggtctagccacaccctcggatggaaagacttgactgcataaagatgtcagttctccctgagttgattgataggcttaatggtcaccctaaaaacamccacatatgcttttcgatggaaccagataagttgacgctaaagttcttatggaaaaatacacacgcaatagctaggaaaacacagggaaagaagagttctgagcagggcctagtcttagccaatattaaaacatactatgaagcctctgatacttaaacagcatggcgctggtacgtaaatagaccaatgcagttaggtggctctttccaagactctggggaaaaaagtagtaaaaagctaaatgcaatcaatcagcaattgaaagctaagtgagagagccagagggcctccttggtggtaaaagagggttgcatttcttgcagccagaaggcagagaaagtgaagaccaagtccagaactgaatcctaagaaatgcaggactgcaaagaaattggtgtgtgtgtgtgtgtgtgtgtgtttaatttttaaaaagtttttattgagatacaagtcaataccataaagctctcacccttctaaagtgtacaattcagtggtgtgagtatattcataagatttatacttggtgtctattcataagacttatatccagcatattcataactagagccatatcacagatgcattcatcataataattccagacattttcatcaccctaaaaggaaaccctgaaacccattagcagtcattccccattcctccaacccattmtctccctaatccctagaaaccaccaatctgctgtgtatttcatctattgccaacatttcatataaatggcatcatacaatatgtggccttttgtgtctggcttctttaacttaacatgttttcaagattcattcatgttatagtatatgttgaggtttcattcctttttatttccgaaagacatttccactgcataaattgactacattttgtttatccattcttccattgataggtatttggatattctccacttttttgctattttgctgcattttttgctattatgactaatagctgctatggacactcttgtatgagattttgtgcagacatatgttttcatttttcttacgtataaaaggcgatccacaattgatgaccccatcataagtcaaggagcatctgtgtgctgtattaatcagagttctccagaaaaaccaaaccattagaatagaggaagagatatataaagagatttattatgagggtttgacttgtgtgattatggagtctgagaagttttgtgatccaccgtctgcaagctggagactcaggaaatccagtggttgtagtttcagaccaattcagaaggctgagaaccaggagattgctggaataagtcccaatccaagtatgaaagcccaagaaccaggagcatcaatattcgagtgcagacgacagatgcctcagctcatgcagggagagaaaatttgctgttcctctttttgttctattcaggcctccagtggattggaagatgcacactcaccctggtgagggctgtcttctctactcagtctacagattgaaatactaatctcttccagaaacatgctcacaggcacatccagaaataacattttaccagccatctgggcgtcccttaaccccgcccagcagacacataaaattaaccctcatgtatacctaggagtggaattgctggatcacgtgataactctatgtttagccatttgagaactgccagactgttttccacagtggctgcaccatttatacacacccacccctggcagtgaatgaaagttccagtttctctgtatccttgccaacactcattgtccatcatgttgattatagccatcctagtgggtagatgagaaagtgatgatatgctgtcaaaattatcaggtctgctcaatgtggtcaggaccctacatggtaaaaaagaatagggccctgacacatagaatgggaacatacaggttgatgccactgagaatctttttttttttttttttttttgagacagtgtcttgctctgtcgcccaggctggagtacagtggcacaatcttggctcactgcaccctccacttcctgggttcaagtggttctcctgcctcagcctcccgagtagctgggactacaggcacatgccaccacgcctgactaatttttgtgttattagtagagatggggtttcaccatgttggccaggctggtcttgaactcctcacctcaagttatctgcccacctcagcctcccaaagtgctgggattacaggcaagggccaccaccccggtcccactgagaatcttgaatcctcagattcctctgactcctagagctgtaaaagtgacctatccatccctccctgttaagagctaaccctcctcccttgcttggaaaccctatagaggcatccacaagacgtttgtccctgtgcccacctcctctcctgcccacaagggttgtaactaggcttaaattccagcataaacaagccagggatgtgacgggcctcataggggaggaaagggcctatatcccaaagtagctggagggccaagccagcatgaccagcagaagtcgggtgagtttgtgcaggagtcaaccttgagggtgctcgatcagggggctgcagtgtgaggtcagataggaaagggtttattgattcggaagtcctttgggagttcagggctgcacacccaggcaaggactccaggagaaggtgtaaacttgctgccaggagggctcctagaagacgggaaaaagtaggaggccatgctaagtgagatccaaatgccagaattgccaggggagacggtggcagatgcgatgaaaggtcagggaagtggcaatgcttgggaaggctgcataaggcccagggagccagaggcgacgatcttccatggaaaggccaagattcccctttaccaagtccacgaggaatggaccaggaagagaacaccagccagcatcacagagaagctcagaaagcctcctctgcaggagatgccatcacaggatggtgggtgaggccccttgggagctaggctcactgatagcaaaagggatggtggaaccctggagtaagagaggccaggagatggcacccattaggggacacagtgctcaccatgagtggtagggcccaggattggccaggaggggctggcctgcagaacatggagatgacccttaaatcttggtgttcatagggacagactagatgggccacaagcaggcagctactcaacttacgccatcaaaatacctcaagaatgaacgccgaggaaacttcccccagtaaaaacatcaccattgctttcctagtgggcttcccaggaaacacgtctgtcacatacgtcagctaaatgtcatgtgtgagcctagatgttggcgggggtgcggatgctataaagaagagtattggaatcgttggtaaatttttcaatataagaatgtatttatggctggatgcagtggcttacacctataattctaccactttgggaggccgaggcaggcagatcacttgagcccaggagttcgagatcagcctgggcaacatggtgagaccctacctgtacaaaaaaatacaaaaattagtcagacatggtggtgtgtgcctgtggtcccagctactcaggaagctgaggcagaagaatcgcttgagcctgagaggttgaggctacagtgagccgagattgtgccactgcactccagcctgggtgacagtgagactctgtctgtctcaaaatatatatttatacaatatttatataataaacgtatatttattatatatgttatataaattatatattatataaattatacaaaattatatttattatatatgttatgagatgatagcattgtatcaatgataaaagtctgaattggaccattgttctgtgcttctgtaacacaatattcttgctcttaggagatataggttgaagcatttaggagtaaagggacataaatcatgcaacatgcattcaaatggttcaggaataaaaatactcatgaagggctgggcgtggtggctcaggtctgtaatcccagcactttgggtggctgaggtgggaagatcgcttgaggccaggagttcgagcccagcctgggcaacatggtgacatcatgacccccatttctaccaaaaaattttaaaaatttagccaggcatggtggtgcatgcctatagtcccagctactcaggaggctgaagtaggaagattgcttgagcttgggagggtgaggctacagtgagctataatcacgccactgcactccagcctgggtgacagagtgagactctgtctcaaaaacaaaacaaaacaaaaacctcctaaaatgtataaatagcaagaaaatgaggggcaaatgtggtaaaaaatataatggctaaaaagtctaaggaagttctttgtgtgcatcttgtaaattttctcagcatttcaaattacttcaaaataaagtgtttttttaaataacaaataaagcacaggctttggagtcaggcagtgtgttagtgtgagaacctagcctgacaacttcctagctgtgtgatcacgggcaaatgtttccacctttgtgagcctccatgttctcatctgaaaaaggaaccttaggactacgcctgcccagcctgcctacctctcggtgttgcagtaaaagttggataagggcaggaaaggcccttaatgagcatgtgcattaatcgaggtttttccagaactaacagggtatttatatttattttgaggtatttattttaaggaattggctcatgtgattgtggaggctggcaaatccaaaatcggcagggtagactggcaggtgggagacccaggaaggagttgctgctgcaagtggaggccaaggcactgcagccgaattccctcttccttgggggagctcagtctttagtctattaaggccttcaactgattgaatcaggcccaccaccttacagatgataatccactttactcaaaaaaaaagtctaccaatgtaaatgttaatcttatctttaaaaaataccttcacaaaaagatctaggataatktttgaccaaatatctgggtacctgggctcagccaacttgacacataaaattaaccatcccagtatggaagggccctggtcccccactacatcttggagatttttgccttctctgtgaattattattgctgggccaaggcagctggctgggagtcctctgcgagttttgttttcaaagctctgggcacaggagttgcatgtctgtctcctttctggctcacacacttggggtgtgttttcttgcccttgcgaggctggacaagtgcctcatacggtccctcggctgtccacaagtgtgctgagaaactggacacacagaggttcccacccgctgaccacacgggggcctgtgtttacccagaagcagaccaaaacctgagtccagctaggtccctgctttgctgtgtgtccctgagcaagtcagttccctctctgggtctctttttcctctctgccgctttccctgaatgtgagttccctggccactgagaacagggggaaagggacagagcctcaaaagatgacctgtgcgcccctgcttctaagcactttgcaggtattatttaatcatcaagctaatcctacgagagagytgccattttcccccagcttacagatgggggaattgaggcgcgaagagggcaggcgatgtgctcaaggacagacatctagcaggtatgaagccctcacaatggggttctagaggctgtttagttaacctcaagttttggggagcccctgaagggctggtcaccacgctgccggggacagggaaagcctctgagcttgagtcagttttggtttccctgctggggtgcaggagtcagtaaaccttgctgcaaggggcggggaagagcatttgagcttaagttagttttggtttccctgccccggatgcaggagttggtaaactcactgcaaggggcagggcagagcctctgagcttaagttagttttgtttccctgtcccggatacaagagttggtaagctcgctgcagtgggtggagagaggcctctagacttcagtttcagtttcctggctctgggcagcagcaagaattcctctgcctcccatcctaccattcactgtcttgccggcagccagctgagagcaatgggaaatggggagtcycagctgtcctcggtgcctgctcagaagctgggttggtttatccaggaatacctgaagccctacgaagaatgtcagacactgatcgacgagatggtgaacaccatctgtgacgtcctgcaggaacccgaacagttccccctggtgcagggagtggccatagtgagtccagggctgaggttgggtctctgggaggcaggagattccacggcggcagcaaggccgagctactgggtgctgggtgcctattatgtgcgaggcccacacttgggtgggatgtggtgtaggagtctcaggctctggagcaggcgcttgctccagagctgtgtgacactgggcaggctacttaacctctctgtgcctcagtctctgactctgtaaaatggggagaggcataatacccacttcagagtatcgtaaggcttgagcacatcatgttcttagcaaaagactggcagtgctcagtgaattcactgtgattactcactgcgattttcttctatcctctccacagtacagaggagtaaacttagggaggctagagaactttgttcaaactacccaggttgccttgtggtttctccgcagcaagaaggagtggcttttatcagttagaaatatttggttttgtg

SEQ ID NO: 95980 - DNA, 27853 bp, Homo sapiens
  misc_feature (1)...(27853): n = A,T,C or G
acatctcaaaagaccaatctaaggttctataatagcaatgtttctataggagtaattggggaagtcacaaatcttgtgacctctggtcatatgactctctctctttttttttttttttttgagacagagtctcaccctgttgcccaggctagagtacagtggtgcgatcacagatcaccacagcctcgaactcctgagctcaagggatcctcctgcctcagcctcctgagtatctgggactacagctgtgccaccacacccagctcatgtttttttctgttagtagagatggggtctcagtatggtgcccaggctggctttgaactcctgggctcaaggaatcctcccacctcagcctcccaaagtcctaaagttatagtcgtgagccaccactctcagccctcacatgactgttaaacagtaagggattacagagattgcacttagattgtagcagaattcaagcccctttcataatctcaatttcatgatcttttattagttttacaaaagtgatttcagtccctgagcaaggagggggttagctttgttttttttgttcttttttttttttttgggacagagtcttactctgttgcccaggctggagtgcagtggcatgatcatggctcactgtagccttcaccttgtgggctcaagtgagcctcccaccttagcctccttaagagttgggactacaggtgtgcatcatgcctggctaatttttattttttgtagagacagggtctcactatgttgcccaggctggtcttgaactcctggcccaagcgatccttccacctcagcctcccaaagtgctgggattacaggtgtgaaccaccgtgactgactttgcttcaaagttaaactataaattaaattaaattctcatggtgggccaggcatggtggctcacacctgtaatctcagcattttgggaggccaaggtgggaggattgcttgaggccaggagttcgagaccagcctgggcaacatagggagactctgtctctaaaaaataaaaataaaaatgaaattggtgggcacgcacctgtagtcccagctactctggaggctgaggtgggaggattgtttgagcccaggagattgaggctgcagtgagctgtgatcttgccactgcactccagcctgggtgacagagtgagaccctgtctcaaagaaaaaagaattcctcccatggttggcttggcctatacctgggaatgaggatggccagcccatgaggctagaagcaggctggagtccgcagccagtgaggctagaagcaggctggagtccgcagccagtgaggctagaagcaggctggagtccgccgggctgaacttctcactgtcatattctttgcaaaggcagtttcggcctctgtgaattctttcagctcagacgctgtggctgtgaatttctatctgttgggacaagagcatccaggttggatgtggggtccctggaagattggtcccatggccyatttgctgggcaagctggagcaagttacttaacctttctgtgcttcagcttctcccttgatcactgattcctttccttttcaagggcaagaggacagagggaaagttcctctgtataaaggtctcaaaggtaaacacttacaaggggtcaatcaaggggcggttaggtgttggggctgcagtagggagaggttaggacagcgagacacatagagccatgtccctttacagaggacagtgtgccccagctccagccagggggaatgtgacctcccagtgtgagaccctctctggtctccagtgctccagtgatttgtcatcttggccagggttgatgagtctgagaacttaggtaagatgctctgttgtattgggtgttgggagacctgcacccgaattccggcacagttattactcactagctggggctgcctgagcctcagctcttttgccatttaggggaactaagccttcggccttgggaagcatatgacgaagagtccagggttaaatctgcaaattgggaaaggaaaggctaatctcaggcgtcagaggcttcgtccctcttctccacgcaattcccttgccctgggaacaggaaggtcagccaggggtgaggatggtgtaatgaagcttaatgaataacccaggggactggccggggtgggtgttttgcggcccaaggtgtcagggacaggggctggctgacgaacatggctctggtggggacaggtcagtgacctggcccacctctccagcctcatctgctctccaatgcagccacgtggcttccccagcccatcctctttgtcacccaagccaggagctctggagcctcgtccctctgggtctgagccctgactctgctactgctgtgtgaccttgggaaagcgacttggcctctctggccctatttccacaatgtagggtttattataatacttacttttccaggtagttgttagcattctgtaatataatgacatcatggtactttgaacgcttacgtgccacctttgcaacttttgccatattgtcccatcacctcttttatattagcaatacaaaacaatagcagctgggcgccgtggctcatgcctataatcccaccactctgggaggccaaggcaggcagatcacttgaggtcaggagtttgagagcagcctggccaacatggtgaaaccctgtctctactaaaaatacaaaaatcagccaggcgtggtggtgcaagcctgtaatcccagctacttaggaggctgaggcaggagaatcccttgaacccgtgaggcagagtttgcagtgagccaagatcgcgccattgcactccagcctgggcgacagagtgaatggtgagactctgtctcaaaaaacaaaacaaaataaagcaaaagcaacagcagcgaacacagagcactaactactgtcctaatattttcctgcattaatgcatttgatcctcacatccactgtactagggaagtagtgttttatccccatcttacatttgagggaacaaggcacagagaggttaagtgacttacaaaaggtcacagggtcacacagtgagaaagtggcagaacaagtatttgtatcagagcctggctgcaggtctgtgttttaactactaggcatgctgcttgttcatgccagaaactactactactattattgctactaataatttatatacaaatatatatattatatacaaatatatatatatttatatacaaatatatataatatacaaatatatatttatatacatatacatatttatatacaaatatatatatttatatacatatatatttgtatacaaacatgtatatttgtatacaaatatatatattatatacaagtatatatatttatataaatatatattatatacaaatatatatatttataaacatatatatacacacacacatatatatatttatatatgttttttaagacggaatttcgctcttgttgcccaggctggagtgcaatagcacgacctcggctcactgcaaactccacttccccggttcaagtgattctcctgtctcagcctcccgagtagctgagattacaggcgcccaccaccatgtccagctagctttttgtatttttagtagtgatggggtttcactacattggccacgctcaaactcctgacctcaggtgatccagctgcctcggcatcccaaagtgctgggattacaggcatgagccaccatgcctggccaattaatatattttttaaagaggctccatttttaaactttaatacctaccttagcttcttcctaagccatcatatccatgaaactatgggtctgatattttatatgtacatacacatacatatgtatacacatatatatatacctacatacatacacacatctttcctaatgcacacagaaatagattgccaactattaaaaaacctttgggggctgggcgcagtggctgttgcctgtaatccgagcattttgggaggctaaggtaggaggattgcttgaggtcaggagttcaagatcagcctgggcagcacagtgagacctcgtttgtaaaacaaacaaacaaacaaacaaacaaacaaataaacagtgtgggttacgctggacagcatgcacgtgttggtgtacagtagacatgcactaaatgcagctagtctgcttcttgtcaaagtctgagctgtgtgctgagtctctgcctacttcaagaagccctccctgatcttgccccatccccagctaccctatggggactttctgccctctgtcatcttaggaggtgttattgttgctaccgaattgggtgtcttcctctcccctccatgctgggggccacttcaaggcacaaactggattttatcacctctgtgtccccagtacccagtccaggacaaggcacccaacaaggatggatgtgtgtctaaagcgaggatgggtagaaacttgccagagtccacattaaggatcacggccaagcagctccatctaaccccaagtggctgggagttaatcatcaaacctggggagatcagaaacagcccaagaaggacacacaacatctgtgatgccaggtcttcctgttcccactttccacatagggaaactgaggcccagagatgggcacgagctgctcaggttcacccagtgagatggtgcagagacaagacatgaatttgaccatgtcattccccccacctaaagccttctgtggctccctagtgcccctgggtaaggtccaaactctggattggtacaggcatccctgtggactctgatctctgcccacatctccagcctcaaccccacttgcttccccacccctgccttctccctcccagccccactggatactaccctgaccctggaatatatcatgtttttcatttccagacctttgcactccctgtgcctgactcctggctccactcagacttcccctcctccaggaagcctccccagccccccagggccaggcggggtgcctgctctgggttccacagccctgcctcaccctgccagctgctaacatctgatagcactaataagtgctctctaatggccctctctaagggctttgtgaaggcagaggacatgctattttgtttgaggccaaagttccagggattggcacatagtaggtgtccaataaacatttaatgaatgaatgaatggtcagtcattcatctgagtagcaaataattgcttgggttctcatgctgcgtgtaaaatatccgagacggagaggtgcttcagacaaaaatatacctttcccatgtcacaaataataattataataattgtttccttggccaggtgcagtggctcacgcctgtaatcccagcactttgggaggcagaggcaagcagatcacctgaggacaggagttcgagactggcctggccaacatggtcaaaccctgtccctactaaaaatacaaaaattagctggcgtggtggtgggtgcctgtaaacctggctacttgggaggctgaagtgggagaatcgcttgaatccaggaggcggaggtaacagtgagccgagatcgcaccattgcactccagcctgggggacaagaatgaaactgtgtctcaaaaaaaaaaagttcccttgtccttgttttcccatcccagacctaagctgaccccaacagtggttcagcatccgggacaatcactagacctaaaatgagaagacatggagatgcctgcatcccggaagagatggcccagggccaggggtaaaggctgtctctgccccttgctgtctgggaagctttggccaaataagttcccttttctgagtttcagtttgctcatctgtcaaatgagacagggtggtgcatgagtcataggcagtgcccgggaaagcggtgagggttgctctcatcccctctcctcctccgtcttcacccggaggcttagggtctggagctttctctttaacaaaggaggagggaccaaggttgccggaagctgcctgaagctggacagagccggttcctggaaagagctggttccctggcaggctggagggcaggagctggggccacgctggtctgggatagttgggcagggaggtaaggggtctggggccagctggggcccctggggctcagtgtgtgtgtgaatgagaggctgatgagaggctgcaggagtttgggaggctttgggcaaagtccaagctgagcaggtgggagtgagagggcctgagcgtgktctaggccctcctgggaatgtcgattgaattcagggtgccctgcagaagaaagtgttgtgctggggaccctgaagggcgagagtgggttctgcctgccagaggggcagggttgggcattctgccagccaaggggccagcccgaggtgtcccagccctggcaccagggatttggctgtggagtgccaccaaggtggcctctggggaaaggcttyggggacaagtgaggtggacagcactggtggtccttacctcaactcatagatgtgacaggtaaggcccagtgacaaaagtgacttggccaaggttggcatgactgggacctgagcctgagccccctgctttcccctgggttattccacagcagggagacccaggtcccccatttcagccctggtggctgccatacgggacaagagstgtgtgtccctgggccaagacagctcagtcccagacctcaggtgcctgatggggtctggggttgataaggctgttggcaacttggggctttttcatttaactgatgcctgctgtcctcttgtgagtcagtataaccaagagggctggggaagcctggaaactgagccaggagcatttggttccaaaggacaattggcaataaatattaaatgcatgcagctttcataatagtaacgataacactagtatattagagaaagtatagcatcgcggttaatagcacagatgccaaagacactgcctggtgtgaattctggctatgctgtttctaactgtgtgaacttggataagttacttaatctctctggacctcaggttcactgtttataaaatggagtcaatggtgagttaatgactcatctgttgtgagccaacaggtggctcacacctgttatcctagtgttttgagaggcagagacaagagatttacctgaggccaggagttcaagaccagcctggacaactcagcaaaactgcatctctataaaaattaaaatatcagccggatacagtggtgcatgtctacagttccagctactcaggaagctgaggtgggaggattgcttgagcccgggacttcaaggttacagtgagccatgatcgtgccactgcactccagcccaggcaacagagtgagaccttgtctctaaaacaaacaccaaaaaaacaagaaagcggaaggattatggagtagggggagttcatcctgacaatcccaggatccccaggggaaaaatctggggatttcaccaaaaaggaagagagacccaattccaagtggacagacacccaacatgggtgcccttaccatgcaggctcattgaatcctcacaatagtcctgccatgtacacgctcttcttgcagtttgttgtgtggttggttggttctcatttttcgggtctaatttttwattttttattattttttttgagacagagtttccctcttactctctaggctggagtgcaatggcgcgatctcggctcacygcaacctcgcctcaccgcaacctcgcctctcaggttcaagcaattctcctgcctcagcctcccgagtagctgggattacaggcatgcgccaccatgcccggctaattttgtatttttagtagagacggggtttctccatgttggccagactggtcttgaactcttgacctcaggtgatccgcctgcctctgcctcacaaagtgctgggattacaggcatgagccaccgcgccctgtctcagttcttagttttaatggtcacttcctctaagaggtctttcctgacctccatacccaaagtaggtccccttgttcttctctttaggactccctatatgcgtgtttccctcttagaagttttcaacatttctgattattttgtttgtctatgcagttatttgttaagtgcccatctcatcaggctataattcagctccaaggttgatgtctatcttgtccacagtggtatcccctgttgctaggtcagggcctgcatcttgtaggtgccctgtaaacatgctaaagtaagggtaagcaggtcaccatgctcaaagcatgacacaaggtatcagtgagataacgtctccagaggactcagctgatgactggcacataatagggactcaacaaatgacagatgttattctctctctctctctttttttttttttaaagacagtctcacwctgttgcccaggctggagaacagtggtgagatcttggctcactgcaatctccacctcccaggttcaagcaattctcccacctcagcctcccaagtagctgggactacaggtgtgcaccaccacacccggctaatttttgtatttttagtagagacggggtttcaccatgttggccacgctggtcttgaactcctgacctcaagggatccacccgcctcagcctcccaaagtgctgggattataggcatgagccactgcacctggccaatgttattcttattaacttacaccacaacctgtgagttggggactgtttttatccccattttagagaaggggaaacaggcacagagagrttgtgacacttgyttgggtcacacagccaggaagtcggagctggtttctaacttttgcttctggtcgaccccaaagcctgtgctcttggggtccagggttgagctgaggcctaggctggggtatgcggcatttggggatcagtgatgacccatgggcttctttcccctgatgcccgaagctgagaggtgccctgggtgggactgggaagaggtggctcargctgtgccctgcccgagggggccctgaggattctcaaggctattctgacaagggcgtggggtcaaactcagggccaagagaccctgatctctctgatcttggaaccccagccatgacttaagggtggacaagaaggttaggtttgtgagtgggcaggggaagttgcagcgccccccctagcggccaataatggaatggtggggaccggcccagtgcttttctgcctgggacaagaggagctggctgtattttttcctttttttttctctactatttttcctccctctcatttcctccatctcttcttttcgtccttacccactggtccattcacacacagctcctcggcttcaaacctctcaawgggctgagcgcggtggctcacggatgtagtcccagcacttcgggaggccgaggtgggcrgatcacttgagctcaggagtttgagaccagccaacatggtgaaaccccgtctctacaaaaaatacaaaaaattaatcaggcgtggtgacgtgtgcctgtggtcccagttactcgggaggctgaggcaggagaatcgcttgaacccgggaggcagagggtgcagtgagcagagattgcaccactgcactccagcctgggcaagagcgagactccctttcaaaacaccacgaccaccaccaacaccaccaccacctccaccaccacctcccaatggctttccattgcaggtagaatttgaataacaaccaaactcctctccgtgggcgggaaccccctgctggcacccttgtccacatctccgccctcaccccctaccctcacctcctgccscaaacyccttctgtctgcatccgcggcaccccaaagtgcatttctccctcgaggtggtcctggctgctgttctctgtaggaacttttcctcttggctctcttcctgtcatccatttcaaagttcccctttcaagaacgtacagatggaggcagagttaaaagacccctcagccaatcaaaatgcacggatctgatttgcatcctgattcaaaccgtgaaaaaccccaaaccacaaccaaccacagaatcagccactgatcatatttaatgggatgatttgaaatgtgaacaattaacagatatttgatgatatgaaaaaattatatttttagatgtgatcatagtattgtgattacatttttaaaaaaattagcctcagtgaggtataatttacataaaataaaattagcccactttaagtatagaattcaatgtgtttgaacaaatgtatgtacagtcatgaaaccatatggttacatataaaaaaggagttcttaggccagatgcagtgactcgcgcctgtaatcccagcagtttgggaggctggggcaggaggatcccttgagcctaggagtttgagaccagcctgggcaacatagtgagaccctatctctacaaaaaagtacaaaaattagccagacgtggtgatgtgygcctgtagtcccagctactcaggaggctgaggtgggaggactgcttgagcctgagaggtcgaggctgcagagagctgtgattacagtactgcactccagcctgggtgacagagtgagactctgtctcaaaaacacaagttctttacctccagagagacatgctgaaatatttacaggtgaaataatataaaagaataatagtaattaaggggtaaataatgacacaggaagggggagtgggcaccgataggggagcgagttagaccatgagttgattgctgaagctgaagggtttttgtttgtttgtttgtttttgagacggagtctcgatctgtcacccaggctggagtgcagtggcacaaccttggctcactgcaacctccgcctcccaggttcaagtgattctcctgcctcagccttctgagtagctggaattacaagtgtgtgtaccatcatgcctggctaatttttgtatttttagtagagacagggttttaccttgttggccaggctggtctcgaactcctgacctcaagtgatctgcctgccttggcctcccaaaatgctgggattacaggcgtgagccgctgtgcccctgccagctgaaggtctttatacagttctcaatacttttgctatgtttacattttccataacaaacgtttttacaaagttttcctcctgagagatgtctttcatgattgcttttgctaaaataacaccccataccctctgcaagtcactcctatttgaaattctgtgacttttcctagtgggaggttttttatgactcgtgggtccccaaacctggaaatgcctggcacatagtaggtgctgaataagtattttttgactgaggaatgaattctcccactctctcattcatttctcaccatatattggccactttctacatccccagcacagccmcacttatggaatgaaaggaccccaggccaaacttctttgaccagatggggaaactgaggcccagagagtcacagatacttgatgggggtctcacagctcagcagctggatgaagtgaaggrcacctaagccaagggctttctccaccttcccctccctgtcctggttaagggaactcttgatggggactgcctgggtggtgactttgtgtcctcctgcaggctgtctacctggtctccagaatggacggccctgtggcagagcatgccaagcaggagccctttcacgtggtcacacctctgttggagagctgggcgctgtcccaggtggcgggcatgcctgtcttcctcaagtgtgagaatgtgcagcccagcggctccttcaagattcggggcattgggcatttctgccaggaggtgagggtgtgtgggaaggaggggagaagtgaggttgtgcaggagggagggaagagtgaggggtgtgggctggsgacrggttcgggcaggaggggaaacatgaactcgtgcagatgggaggggaaaggtaagggcagggctgtgggcaggatgaggggtaaaggcgtattgggagtgggatgsggagactctaacgccattccacataggccttcatgacacctgcttgggttagccgctaaccccattccttctcttcccagatggccaagaagggatgcagacacctggtgtgctcctcaggtgaccccacctttttttgtttcatgggcagaggttgggggaggaggaataggctggagcggcagtacacatccagggttggtctcctcttaaaggcccagcctcatcaaggtcattgatgagatgactactgtgtacatcccatcctagccttctcccatagttcaggactcatgrtggtagcaagtgccagaaacccaattcatataggtttaagctacaggctctaagaatggaaaattcttgggataagtggctttcaggcacagggggatccaggagctctcctctctgtctctccttctctggactttgctttcctgcatattagctttatttttaggtgggcctcatggtagcaagatggccaccaggaattccagccttgcatcctaccagcctcccaaccctagggaaaagggagcaccccttctcgatgcctcgcctcaatcctggaattgttttttttttttggccccgcttgggtggcgtcttcatccttgaaccaatcatgggttgggggattaggttctgattggctcaacctarattatgtgtccccctcttgrgtggaggaaggagtcaatggggcatatgaatgttggggacgagtgactctgaagggatatggagggggaggggaaggcatatcaaaggccaatcagctctgcccactgcccctttcctcctttctgcacagggggtaatgcgggcatygctgctgcctatgctgctaggaagctgggcattcctgccaccatygtgctccccgagagcacctccctgcaggtggtgcagaggctgcagggggagggggccgaggttcagctgactggaaaggtaagggctctgggaaggggagaaccatctgggtgggctgctctccttcacctcaccccacccctaagacatcctgtctccttttcctttcgatgagctgtggctgggacccagtcctctctcaggatagctgagctgaggggggaatgaggtgggatgggtgttgagggctgggatctcccaactttcctctgcccaccctgagaagtacccctcatgtgtgaaccaagacaaatgggaagctgacgatgaacaggagactgtctgtctccttatatcctcaccagcacctggtattatctacttttaacatttttgctgttagataagacaagaagtatcaagatgatggcagcattagttctcattctgagaccaccccartagaaatggtatccactgagaaagatatcaccggttccctttgttaccaaagaaatagagacacagatacaaaatctgtctttccttctgtgaagaaggaaaaaatcattcaaataatggaaaacagatttttaaacctctcgaaattaaaactaaaagccaaactatggtacgttaaagctggtcccaaatacttcctgtatatagtttctkccctttcttctgtccttccttccctccctctcttcttctttccttccttcattatttccctccttccctcttccctccctccctccctccttccctccctccttcctttcttcattctttctctccttccttccttcttttctccttccttccttccatttattcatccatctaaccatccttccacacatcaccctttctctctcctctctcccttctttccatccatccatccatccatccacccatccatccatccatcagatattgattgagcacatattcagtacctgctatgttagacattctagaaacacagagatagtaagacatggtctttacactcataaatttgagattattatgaggagacacacaggtaaccagatgatggtaacaaagtgtgaaaagtgttgccacgggggaagcacagggcaccaaggaagtcagagagaaggtgtgttgttttaatcagctattgttgcttggtaatgctgcataacaaacagcccccaaatagcagcagcttataagaaacatttgtttccgatgctttgggtctgtgggagggttagggtggttctgcttyggaatgtggggaaggattaaggtctgcagatgtcccctgtgtcttccccagccagtggccactgggggcacgttcttctcaagggcaatggcaagaggggtgagaagaaacgcatgacggctcttaagacctcagcccagaactgttacactgtcagttctgccatatgctgttggccagagcaagtcacacagctgagaccaacatcaatggggaggggacatgtgctccacccactctagtgagaagaacagcaaagccacatggcaaaaataaaataaataaataaatagataaaaaacctgggcactgtggtgtgcacctgtagtctcagctactcaggaggctgagttgggaggatcacttgagcccaggagtttgaggccagcctgggcaacatagtaagagcatgtctctaaamatagtaactattaagccacatggcaaggtgtaggtgtatgattctaacagagggaggcagtggagaattgggcagtggtcaaaccaatgggctgtgccttagatttggggaaaggatccaggacaggctcccaacaagggtccccagggttgggtattgaaggagaaatctgagtccccacagtggagaaaagggagggaatgatctgattgtgaacagaggaaaagctgtgggtgaaggtgtggcgtggatgagcacggtgcattcaggctgagcccagcgtcagggagggatggtgaaaggtgaggctgaagaggggcagagttgctccatcaggcagggtggcttgtaggtgaagctaatgtgtttccacctgagagcactagggaagcatgaaaggagtttgagcaggggagggacctggttggattttcactctgcctgctctggggcaatgcaggagaggagccagagaggaggctgcttggggccctacaggtgagagatgtcaagcactacacggttttgaatctatttttttctttagttttaatttcagattcagggatacatgtgcaggtttgttacatgggtatatttcatgatggagaggtttgggcttctaatgattctattgtccaagtagtgarcatagtaccaacaggtagttgttttttttttttttgagacagagtcttattctgtcgcccaggctggagtgcagtggcatgatcttggctcactgcaacctccgcctcccaagttcaagcaattctcctgccttggcctcccaagtagctgggattacaggcacccaccaccacacccagctaatttttttttttttttttgagacgagtctcgctctgttgcccaggctggagtgcagtggtacaatctcggctcactgcaaggtctgcctcccgggttcrcaccgttctcctgcctcagcctcccgagtagctgggactacaggccagctactacagccaccacgcctggctatttttttttttttttttgtatttttagtagagacaggatttcaccatgttagccaggatggtctcgaactcctgacctcgtgatccacctgacttggcctcccaaagtgctgggattacaggcgtaaactgctgcgcccagcctaatttttgtatttttagtagagacagggtttcaccatgttggccaggctggtctcgaactcctgacctcaggtaatcttcctgtctcagcctcccaaaatgctaggattacaggtgtgaaccactgtgcctggctgacaggtttgtttgtttgcttctttctttctttctttctttctttctttctttctttctttctttctttctttctttctttctctctcttctttctgtctctctgtctctctctctctctgtctctgtctctctctttctttcttttttttgagacagtcttgctctgttgccaagctggagcgcagtggcgccatcttggctcactgcaacctccactgtccgggttcaagcgattccgctgcctcagcctcctgagtagctgggattacaggtgcacgccaccacacccggctatttttttgtattttagtagagacggggtttcaccatgttggccaggatggtctggatctcctgacctcaggatctgcctgcctcggcctctcaaagtgctgggattacaggcgtgagccactgcgcccagctgacaggtatttttcaacctctgccactctctctctctccccacttttggagtccccagtgtctctcgttcccatctttgtgcccatgtttatacccagtgtttaactcccagttgtaagtgagaatatgcagtatttggttttctgttcctaagttaattatcttagaataattgcctccagctgcatccatgttgctgcaaaggacatgatctttttttgtggctgcgtagtgttccatgatgtatatgcaccacattttctgtatccaatccaccattgatgggcacctgggttgattccatgtctttgctattgtgagtactgctgtgatgaacacacaaatgcagatctttttggtaaaatggtttattttcctttgggtagatactcagtaatgggattgctgggtcaaatggtaattctatttttagttctttgagaaatctccaaactgcttcctattggagctgaactcatttgcattcacaccaacagtgtattttttgtttcagtaactcaggggaatgagactcttctcttcagccagatgggaaattccttgcagtcagagaccatttcttggcttctctcctgctgaagagtccccatacctagaactgggcacagagtgggcactgcagagtccctgaggatgagcaggggctagttctgccccccttgtgaccctccatccctcccttgggagaggaggccattgtctaycatttagtttctgtatctggttcctgctgagatcggctggcatggggtccctctgaaatgctgtcttagtttggattctcccaaaagcggtccctgaaatgaggactggggtgcatgtggtttatttgggaggtgattgcaggaagcattggtagggagtgtagaaatgagtcagggaagggaagaaagcctgtcaatggtgtgtgaatgagcaggggacctggatctctgccacagaggccaagccagtgagaagagaaaactcacccctgctgtggttgccttgggtccatcatggtcagggccggccctatgtgccatctctctggctgcttgaactcaactagcaggccatcagctgggccattgctggtttccacggacacactctatggtgaccaagttgctatctggtgtttgactttagggggcttctcccctactggttggctagaagtgggcaccatgtggctgaccttggagctgacccgctcccagcctccctggctggcctggcctggttttcatagtgtggcagtaggacaggtcgcttgggtattgtggaaagcacatggcatctgtttgtccgcctggaagtgcttgtccaattctcaggaggcctctgggcccacaccaggtatggtctcatctgcagggctgtccccagactactagatcctggggccaccaaggagatcctgggcctctgctccggcctccatagcagtcccactcccggctgttctgagggcccttggtttctctgtaggtctgggacgaggccaatctgagggcgcaagagttggccaagagggacggctgggagaatgtccccccgtttgaccaccccctaatatggtaaggctgacgcccctctccccaggagtccagagctgggagaccttcactgagtcagggtcctcccattgggcagaaggagaaactgaggcccagaggggagaagaggcttcaaagccaggcagacatgggttcagatcccacttctgcccccttgtgaattgtgggactttgtgcaaagcaccccagatcctgtgcctcagtttctatgtgtgtaaaatggaagtgatagtaccaagtctcctttactgaatatgtgctttgggaccaggcaccaggctaatggctcctcctgcactgttctatttaccctccccaaagccctagaggtgggtgctattatccccatttcataggtgaggaaactgaggcacatcgaggtcaaacaacttgccccggatcacacagctaagtacrtggcagatacaaagggctgcagtcaggctggtcccaagtgatacacttgtcccctcttaaccacacattgccattgcctctttgcaaagttggggagggggctaaattgggataatgtccaagaaagggcctgggaggttgatggagatgggaagggatgagcaaacaaatacataataaagaaaatgaatgaggccaggcgcggtggctcacgcctgtaatcccagcactttgggaggccgaggcgggtggatcacctgaggtcaggagttcgaggccaacctggccaacatggcaaaaccctatctctactaaaaatacaaaaattagctgggcgtggtggtgcgcacctttagtcccagctactcgggaggctgaggcaggagaatcgcttgaatccaggaagtggaggttgtagtgaaccgagatcgtgccactgcactccagcctgggtgacagagtgagactctatccaaaaaaataaaaataaagagaatgaatgaagctgagtgaagtaactgttgcaggacttcctctcccctcaccgtggatgggatggggatggtngggaggggtttatgtatatgagggggcagagaacccacccctggtaaattcccccaccacaggagccatctgggctggggtcctccctcactctgcttctccctctcaccccccctccccaggaaaggccacgccagcctggtgcaggagctgaaagcagtgctgaggaccccaccaggtgccctggtgctggcagttgggggtgggggtctcctggccggggtggtggctggcctgctggaggtgggctggcagcatgtacccatcattgccatggagacccatggggcacactgcttcaatgcggccatcacagccggcaagctggtcacacttccagacatcaccaggtgggtaagggctggggacatttgtaggggctggagggtgggtgtgccactgtcctagggccttccagtcccagccggtggagacgggggcacccaaaaggctgtccttggtcctgggactccaaccacagtaaagtggacctgagttagaaggcagtgctgaaaaaggagatgaggaatatgattcatgtaaacctaatcagttcttaaaacaagctttcattgacttatcattacaaaagcaatccatgtgtgttgcaaataagtttgaaaatgtaggccaggcaccatggctcatgcttgtaatcccagcattttgggaggctgaagcaggtggatcacttgaggtcaggagtttgagaccggcctggccaacatatagtgaaaccctgtctctactaaaaaaatacaaaaattacctgggcatggtagygcacgcctgtagtcctagctacttgggaggctgaaacggaaggtttgcttgagcccaggagtttgaggctattgtgtgctatgatcgtccctgtgaatagccatcgtgctccagcctgggaaacttagcaagaccctgtcctcccccaaaccccccaaaagccaataaattttaaaaagaacatgatcactgaatttaggacccaccctaatccagtatgatttcaccttaatttaactaattacatctgcaaagactctatttccgagtaagatcacattttgaggttcttggtggatgagcatttttttttttttgagatggaatctcactctgtttcccaggctagagtgcaatggcgcgatctcagctcactgcaacctctacctgctgggttcaagtgattctcctgccttagcctcccaagtagttgggattacaggcatgcaccaccacacccggataattttgtatttttagtagagacggggtttcaccatgttggtcaggctggtcttgaactccccgacctcaggtgatctgcccaccttggcctcccaaagtgctgggattacaggcgtgagccactgcgcccggcaaggacacactatttttgagcacctcctctgtgacttataatgctgagctccaaccagcccatggcaggatgggagggggtggctggggctggggagagacctgwttcaccagctcttccctgagcccctggtctccctgccccaccctgctctatcctgcagtgtggccaagagcctgggtgccaagacggtggccgctcgggccctggagtgcatgcaggtgtgcaagattcactctgaagtggtggaggacaccgaggctgtgagcgctgtgcagcagctcctgggtgagtgatccctgtcctccacctgggctcagagacccacgaagtccctgcatcctctagcaagagtgtgttctgtcttatctgtatcctcagcaccaggcacyggctaggtgtgcagttactgtgcactaagtgcacrtcgagtagatggaagggggtgaggataaagaaggagtgtatcttgctgtctctagcccccagactttcatacatgctgctcctctctctggctggccctgctccctattggtttgatgtgactgagggctatcagccatcatagcacctccttcaggaagcctcccttgatcactcaccccacgctgcctgggttgtggacctccaatgcaccactccctgtgttcataacctcctggttcttatccctctacatcactgatgtgagccccatgagggctggtgtgtcttagtccctgacgtgtccctagggccttcctggcatagggcatggcaggtagtaggcactcaatagatgtttgttgattgaagggatgaatatatgagtgagtggaaaggtgggtaatggatagatggacagtggatggatggacggatggatggataatgaagtgacggattgatgaatggtatagaaatgaatgaatggacagacacattgattaatgaacatgttgatggatggacagacagtcaaatgatggatagaggaatggatggatggctatgaatgggtggatggatggatatgttgatggatgggtacactgatggatggacagatagatagtctaatgatggatagaggaatggatggatggatagagagataaaaggtggatggtggaaggataggaggccaggctgatggatggggagagcgtgagacaagtgatggattgccagcagagcagatgaatggctgactggctggagagatggctgcaaggatctgccgtgcccagggcctgctgagcaccgagtggttcttcttccctttccttcctctctccatcccccgatcctggcagatgatgagcgtatgctggtggagcctgcctgtggggcagccttagcagccatctactcaggcctcctgcggaggctccaggccgagggctgcctgcccccttccctgacttcagttgtggtaatygtgtgtggaggcaacaacatcaacagccgagagctgcaggctttgaaaacccacctgggccaggtctgaggggtcccatcctggccccaaagacccctgagaggcccatggacagtcctgtgtctggatgaggaggactcagtgctggcagatggcagtggaagctgccctgtgcaactgtgctggctgcctcctgaaggaagccctcctggactgcttcttttggctctccgacaactccggccaataaacactttctgaattgagtttgcgaatgctatggatcctatctttccatgtcagtgagctcacaggagacacaccacaatcctgttgccacttctgtaataaagtgactccaagccccatcttaggcaacaaagccaagacttgaaaacctcagtctctaaaggaatccaaccattatgagatcttaaatgggcttcctttacctggaggaccagcccaggttgaccaggtcaggaaggagagggagatgttctatcacttctcaggcctaggcaggagaggaaaataacaccagtcttcatgcagtgcttgttatataccagaaactttgctaagaactttctactcattgtcttctttaacattcacaaaggtactaggaagtaaaaaccattattaccatccccattttacagatgcagaaactgaggctcgggaagtttacataacttgcccaagaccacataactaggatatgtgatcacttgtctcactctgtttccatccatcaacctgaccacccatccgtccacccatctatcttttatctctctatccatccatccattcctctatccattattagactgtgtgtctgtccatccatcagtgtatcaatccatccattcatccatccataatccatccatgcattcattcacaagccatccactcatccatccatcaattcctctatcattattagactgtctgtctatccatccacatatccatctattcatctataatccatccatccatccacatatccatccattcatctataattcatccttccatccatccgtccatccatccattcctctatccatcattagactgactgtccatccatcagtgtgtccatccatccacatatccatccattcatctataatccatccacccatccattcattcatccatccatttctctatccatcaatagactgtctgtctctccatccatcagtgtatccatccatccacatatccatccattcatctataatccgttcatccatctataatccattaattcatcaatcctctgtcattagactgtccattcatcagtgtatcaatccatcaatatatccatccatccatccatctataatccatccatccattcatacattgatacattcatccctctagccatcgttagaccctctgtctgtccatctatcagtgtatccgtcaattgacatatccatctatccagattccctgattttcagggtcactctgtattgcttggatctgaactctctgtgtcggggtggagggtggcggaatattgaggaaagggtaggaaagggtaggtgggtctggacacacctgtgggtcacgagaagaggcaggttctgtgcctgggattgggaacctccgacttctgggaagtctctcttagaagtgggatggaaagttgcactcctttgagccacaggggggcagcaaagtgtctcctatggggaaggctggctccgggcaggagagaccctctccttgggtcctcctggatgctgcctcttgtggggccctcactccagctgggcatgctgaggtccacacggttgtggcatgcaggaaccttttccaacccctcacagctctgctgggaagcaaagctcagagagtgcagggtccgtgcagcatcacaggccctggcagaacctggatcctggcccccagcgacgtcctctctcctgactcatgtgggctgtgtgaccttgggctagtgccgtcccctttccaggcctcaggcagcacctcgtgctgtaggaggcccacttgccacttctcacctcttttcctttgctcaggctcttcccttcgccagatgcctcctccttttccttctttgttttttagggacagggccttgctctgttacccaggctgaagtgcagcggcatgatcataactcactgcagccacgaactcctgggctcaagcgatccttctgcctcagccgcccgagtaggtgggaccacagtcatgtgccaccatgcccggctaatttgaaatcattttttgtagagatgtggtcttgctctgttgcccaggctggtcttgaactcctgggctcaagccgtcttcctttcttggcctcccaaagtgctgtgattacaggcaccatgcccaacccctccttttctgaagagcaagatttgagagtgaccgtgacctccctctgtgcccctgctgctttggtgtcattttctctttaactccagacatagctctcgctagccagggaccaccaccgccacctctgccacccaccagctccagaaaccctcaggagccagccccattttcttggagtcatgctttgtgaattccccgaatagaggagacattaagagcaccagagctagatgcagccagacctgagcctggaatccgctcctgcttagcagcctgggcaccttgagcaaacgatgctccttctcagtgcctcagtgtcctcatctgtaacatgggtggttggaggattgttactgtggacacgacatatctagtctttcaataattgtccattcttactgtctcctgagcattcttccccaaacaatgaggggaactagaatttattcatatattgagcacctataatatgctatggtcttcagcagctatttcatttaataacccacgcggtagatactattattatccccatttttgcaaacgaggaacctggggcatggagcagttgagccacttagcctgggtcacccagcagtatgggagccccgatatgtggaaatctgaggctcatatatctaaccactccggctcgtacacctcctttcctttgcttaagctctgtcccctgcctgccgtgcctgctacgcttccgaatcctatacattcttcacagcccagtgtgagtgcagcctcctctctgaagcctccctggattggttcagccagtgatgatagtcccccaacccacgctcctccaggtgagtcgcagagcccacctcagctccaggtgttctgtctcccagccaggcctccccacccacggtctcgtgctgttggctcccctcctgggagacttgtcagctgctgtttgcttctctcttggtctcaacgagttggagataagaagccgagggggctgttgaccctgtccagataacacatgtcaattaactcagtttagcccttcctggttgacacccaaggaatgccgagagcagggatgaggctcagggagagagccaggagacaggggagtgtttgaagctgaggccatgctgctatgacttatagcagggatgggttccaaaggcagaggctattccaattctgcctctgccttcttggcctctcagctggggaaatggggagcagggacctctctgtgtttgtctaggctgcataaaaaacactgcaaactgggccatcaggtgtgtgtgcctgcctgagatatgaccagcctcccaccctagctggggtccctctcctgaggctgggggcctctttggctccctgtggcttctagcagctgaggctccctgtgtcccctccccaggatgaccctaacacctccacctccaggggcctcacctccatctagtccttctttctagttttaaagccaggtgacagggaggcttggaatcttgcctttcattctgaggtgctctcaccccagagctgggcccacacagggcagggacatgaggagggggatccagggtcaggcctggtcctccccaaccccatcctcagccttggcaggascccagttcagggcagagtaaattccccagcacctgctgaggatggtctgactctcatgtagggaaatgatggctcagactgacttcgtgtcttagtccatttgggctgctataacaaaatgccataaatggggtggcttataaacaattgaaatgtattggtcacagttctggaggctggaaagtccaagaccaaggtactggtcttggtgtctggtgaggatttggtgtctggtgagaacctgtgccctcatcaacagccatcttctcacattgccctcccatggtggaaggatctctctcagacctctcttatttttttacttttatctattttctagatgaagtctcactctgttgcccagtctggagtgcagtggtgcgagctcagctcattgcaacctcctcctcctgggttcaagtgattctcttgcctcagcctcctgaatagctaggattacaggctcaggccaccatgcctggctaatttttgtatttttggtagagatgcggttttgccatgttggccaggctggtctcgaactcctggcctcaagtgatcttcctacctcagcctcccaaagtgctgggattacaggtgtgaaccactgtgcctggcctcagacatctcttataaggcactgatggtttcataaaggtcctctccccatgacctaatcacctcccaaagcccccagctcctaaaaccatgggggtcagggtttcaactgtgaattttggaggaacatagacatttagaccacagcactttgtatcctaagtcagctctgtggttgtgtgtgcacccgtgtagttgtgtacctgcatgcatgtgtgtttgtgtccatgagtgcatgaatatttgtgtgtttatgagggaatagacacagtaattgagggctgcttgatttccccctcaatgtggtgcttcacattgttgcatttgggacttgtgatgtaatcactagccagacatcaaacttggatgtctacagtgaagcagcctgggggctagacattaaggagtgatggggactgaggccaaatggagggcttatgctctgtctaaagaacttagccactactcagctccagccaattgcaggcccaacataacacatctcccaatttcattagtgttcactcaaaatcaaagccgtttgggaaatgctgtttgttccatttgctcatgtattcatataaaggctctgacaagtcctgcaggaaagtcactgaatctgggggaggagcatgtgaccccaacctgagccaatcagagcattacattttccatgctcatggtgattggttcaagggtgggcccccggagccaagctgtccaatcagagtagccctcggaagtttagctgggaatagggaggcactcctagctgttcatttctgcaagccaataaatgtccctttctgcacaagcctggacctcctctcatttgagacttaaaggatcccgacggatggggtacacacttcgtacatgtctgctgaattgaattgatttgctttgagctgcctggatttgaatcttatctcagcttggccctcagcaaaatgagggcaatcttctctttggatccactttttatttttgctcccaggaagctgggagttcatgccgtttgcccttacaggaagagcaaagtaaaactcaatgtcatattgctaaggagttgggtggcagtattttacgaagatagggagattttaaaaatcagattgggtaaaagtctcttttggaagtgactggtgtaaataatggttagggctggggtaacccagagacacctccaacatttaaaattcaagcctgttaggaagacagtttcctaattttcttatttttttcttccttttaccttttttttttttctttgcgacaaatctcactgtcacccaggctggagtgcagtgacatgacctcggctcactgcaaccgccacctcccaggttcaagcaattctcctgcctcagcctcccgagtagctgagattacaagagcacactaccacgtccaactaatttttctatttttggtagagatggagttttacccagggtggccagggtggttttgaactcctggcctcaaagtgatccacctggcttggcctcccaaagtgctgggattacagaccttagccaccgcgtccagcagtttcctaattttccatccatcttaggggcttggaaagttactctgagttggagcctcctgcctgagcttcctggaggcctg

SEQ ID NO: 95981 - DNA, 219851 bp, Homo sapiens
  misc_feature (1)...(219851): n = A,T,C or G
acctttacttttgctagtttaatgaagttgctattcatttccatcttgtcaattgagaagtgtctaaaaaaaatttcgcagccatattatatatttccagcttgtttattattatatatttacatttaatcatacacatactgcaaggttcataggtttcctctcctcttcatctttaatgttccttcggatttcattcaaatacatttggtttttgattaacgttctttcctaatttttttcctgaagggaaattgggtaaaatatttctatgaaccttagcacaaagatatttcttctgatagactggtttgtttggattccccggttgcaatacttctttttttttatttttagataacttttagttgctttttgagacagagtctcgctctgtcacccaggctggagggtggcacagtctcagttcactgcaacctccaccaagagatcctcgtgcctcagccacgtgagtagctgggattacaggcacctgccaccgcacccggagcacgcccggctgatttttggatttttagtagagatggggttttgccatgttgcccaggctggtctcgaacacctgagctcaagtgatccacctgccttggcctcccaaagtgctgggattacaggctgcaatacttctttcttgttagtaggtatcattccagtgttttctagtctctagaactactgatgagatgttttacctttatgaatggtaaattctttaccattagaagcttttaataatattttcttcattgctagataaatttactaggtatacatacttttatgtcttttttatcaatcttgtctggacttcagtgagccctttgagtctatgaatccagatcttttgcaattctttttctttattactatttgttttgttctccctctggaactattattgtctgctagatcttttgaatctaccctcctaatctcttatcattttcattactggtcttttaattcttgttttatgagttgtgatatttaatttgataatttcattcattattcaatacttcagttctgggtaatactactataaaaactaaacaaaatgcagagacagctacttgaggactctgaaaagtaaacagccacagacaatcccatgacagaaatggctatggctacgcatagtggcctgcagaagccagaactctgaggaagggaaattgttttctctgttcatcagagtcccgatcccaagagggtaggggcaatccctgttgtttattgcctctcttctcacttctgagcccagacttgggcctaaacttggaagcgtatggcagaacagggtaactgaaccctaaagtttctggctagatggccaaaacagggagtcccagagaactgggaagcatccaggagatcacagagaagaaggagctcaggaaagtgatcccataaagttgtttataaactccagaactcatccctgagtgaggcatgcatagatctaaccctgagtcgtatacaaaggattttgaaaattgagctaatcactcaggtcacagtctgaccattgaatggcatacacctggggaagatctgaagagactttgaaaactgagctaacattaaaactacagtccataagtaggtaggttcttgtagcctgaacctaatcttgctaattaaatgttaaaacaaaaatatcaacattcttcataggatcaaaacaagacccagagtattcaaaatgtccaggatgcaaatccaaaatttccctgcatataaagaaccatgaaaatttcaacttgcatgggaaaagacaaacaaaacaagccaaagctgagatgacacaagtgttgagattatctgataaagacttcaaggcaaccattgtaaaatgcttgaacttgagcaacactggcatggtggcccgagcctgtaatcccagtgactcttgtgaagctgaggcagggggactgcttcagcctaggagttcaggaccagcctgggcaaaacagtgaggcctcatctctaaaaataaaaaaaaagcttgagtaagccattgtgcacacacttgaaacagatgttaaaacagaaagtctcagcaaagaaatagaagacataaataaaagccaaatggaaattttagttttcaatataaaattattttaacttaatgtattcactaacagattggagatggcagaggaaaaaatctgtgaacttgaagatagatccattaaaattatacaatctaacaatatagaggaaaaaagatcgaagggaaaaagaacaaagccttagggatcagaggaacaattataaaaggactaacatttttgtcattggaggtctagaaggagaagagaaagagtgtagtgttgaaaaaacattggaaaaaatggctggaaagttcccaagtttatggaaagatataagtctacaagttcaagaagcagaatgaaccctaactaggataaatccaaagagatctgcaaccagacacatcataattaaactgctgaaaactaaagacgaagtcttcaaagcaaccagagaaaaatgataaattacctataggaaaacaatgatttgaatggctgcagattccttttcagaaaccattagacctactctaaaaaaattgataaactatattcttcagagacaagaaaaagatataagaaggaaatttgaggcatcaggaataaagagacagcaacagaaataactatctggttaaatataatggctacttttttccttaaaatatgattgatggttggaaaaaattataatgtctgatagagtatataatgtatgtaagtataaaatataagacaacaatatatatatggtgcaggggaaagggtgataaggtttctatatgccaaatgaagcagtaaaacaatgaaatgatccgaagtagacaacgaaaagtaagtattttataattcctagagcagccactaaagaattatacaaaaagatatagtcaaaaccatagtatataaaatagaatactaaataatgttcaaatagtcaaatgaaagcaggaaaggggaaacataaatatggagcagctagcactctcacctattagtggtgggactggaaaatgcttttggaaaactgtcagtttcttaaaaagtaaaggatttatctagtagctccactgttatgcattaacttcagagaaataaaagcatatgttcatacaatgactcatacatgaattttcagagcagctgtaaatgtattagtcctgaactggaaacaactcagatgtccatcgacaagtgactagttaaactgtggtatatctgcacagtgggatactccacagcaaaaaaaaggaattgatacatgcaataacatggagaaatttcaaaataatgtaattatgctgagtgaaagaagccagacaaaaaagattccatttatataaaatactagatatgcaaactaatctatagtgacctaaagcagattagtagtttctagagaaggaagagggtaaagcagagaaagaagggagacagggattataaatgaccgtcaaaaattttttagggttatggatgttctcttgattatggtaatggtttcaaaagtaaatatatgtcaaaattcatcaaattgtatgttctcatttaatgtgcagggtattgcatgtcaattatacctcaataaagttgtaaaatgtttttttagagggtgtaaactgtgaacactgcatatcagtgttcatgcttttgctcttacatgatgacaaggaagaacagtagacatctcctatgaataaaatggaactatataattgtttaagcaaaaacatcacttaatgatggaaatatttttaaaaaaattttaggctgtgtggtagctcgcacatataatcccggcactttaggaggcaaaggcaggaggatcacttcagcccaggagttcaagaccagaatgggaaacatagggagaccccatctctacgaaaaatttaaaaattagctaggtgtgtgggcacatgtctgtggtcccagctacttaggaggatgagatgggaggatcatttgagcctggaaagtcgaggctgcagtgagctgtaactgcaccactgcattccagcctgggtgacagagcaagaccctgcctcaaaaaaaaaatatttttttaatttttaaatactttatttgtcttaaacgtataagcaatcctcacttggcacagtctgatatgaatttcagttaccacagtttattaaccgtgagaaatagcataaaagtttgctactagcttttcagttcacaaatcattacataaataacatatgaatcaaaattgaccaatttgcaattttacttctttcaaagtctatgggtgattggtcactgtgcatctgttattcagttcacacacaggctgcaaagcatggaggtttgttattaatatttctgtgcccttgagataaacccacatggaattttacagattaaaagaggaaattggccaaaagaatgaaagtgcactaaagaagagtgataatactagaagtgaaacttgcattaaacataaatggagcaaatgaaaaaaaagctgcctgtgggaacatgctgattgtggcaacaatgacactgccgccatttgagacattctagatatgcagactgaggaaatcagtgaaggtgaacttatagacataaatgaggaaaagtgattgtgatgaaaggctgatgatgtgtcagaggaagtgacagtggcaaaaaaaacacattaaaggaactctcagagatatttcacaacattgaaaacgtaatggataaaatgttggaaactaatatttaaatttctccagaacgcagaactcataagcaactgtgttctccaagtaaatatcttcacaggttcctcaattaatgtgggcaaaattaaaagtacaacttgcttcttccctttggaaaaccctctctcagagtatattaccaacattcaacttcttatacaaggcatagatctgggaatcattattcattcttctctttttgtcattcacgtatccactcaatttccatggcctgttgattctatttctcagacgttgttcaaatctctccactatctttattctacttggcaactctgtggcccaggcttccaacaactctctcccggacaagtgtaatcacaacagttacctaacttggctcccactcttgttctcagttgcaacccattctccaagcagaaaacaaaatgcaatagctgttaccttattctcatcttcacacctctactcaagtacacaaggctcttcctcatctagtttctgtctacttcatctcttgtcaatggtccctaccccaattctccgctctagtcattctgaactttgttcaattcctggcctgtgtcctctgcctttaataggctgcctggcacactgtaggaattcactaaatatgcagactgaatgaatgaacgagtccgtggagggcagttattctttggagtaacttaagagagaaggaatacagtacaacgaagtattcttatttaggtttatagtgtcttcacctgagcccgcgggggaaccccccccacccccggggaacccccccccacccccgccgccccccgcctgcaagttgttaccagtaaataaaagggatcctattttagcaagccacacagcattagagggcaaataatagtttggtggcaggagagcgatgagacgggaaagtgtggggcaaagcttacagtcattggtccagattctaactggcctgttagccaaaaagtaaggttttctttacctccgtgttgactctgctctccgaaggcgaagagggtcctccaaacccgtttggcgtgcggacaaaaaccccagcatatcgtgtcctcacaccggctggmgcactggacgtcgccatgacagagctcaggggcgggactggaacagcagagtctcccattggtcagtcggtgatatatccggccaatggtgagcgccgttactagaaggsctccaggatggaggccgrcctgayttctccgcctcggtgggctgggtcggcggctggagcattacccctactgcgggtcccgctgctggcagcgctggaaactgggtggacggcatgggttggtctcaggatttgttccgcgccttgtggagatcgctgtcaagggaagtgaargagcacgtgggcacggaccaattcgggaacaaatactactacatcccgcagtacaagaactggagaggtgaggtggcggcgtgggcagcgattgcgtgstcagtgattgcgaggtcagtaaaggarggaaaagtgagagcccctagtcaactaacgcatcatgcgacacttagggtgtcaccggagagaatttcccgagttcgttctcccctgtcgaccccttcactctggcatcggagccctacccggcccggctctgggcgccttggcccggcctcgtgcgtccgcggtccctactacccagcgccttcccccggcgtgccccgggctgcttgcgctgttaaggcgcaccaccactttcctcccagccacgcctgtagaggagcctcagttttagccctggactggcgacggaggcagggaaaagtccacggaaatctttcaccaaaggggctagaagggccaggggaggggtttttcgtacgctgttccccgccttgtgacccagagctgagtggtgtaattgaagaggagtatcttcagcgcctcggctgtcttctttcttggtgtttacccttttcggtggcaccctggctccggcgctggccccatgcgccttccttactaccaagacttgtcagaagtaggtccatatccccacaaggctcgctgattcctttctckggagttgacattccaagaccccgttgagctcaatttaaraaacgtggcaataatcatggtgttactgtgtaggattcgtgccaagtagttgagcgggttgtttggggagtaaggaggcgktgctgtccattgaaatcacactgtgtagccgccgtcgtaacctcttctgtgttgttccatcgccgcatgcagaaaatgtcaggttttgggcgaagaggcgtgggttagaatctcagctttgacacctgatagctcgggaatcacggaaaaagtacttgtcctctccaagtctcawcatcctcacttgaaagttagagataatataagatcagcaatgttgagaagcactaagacctttccaagattatgtgccattcatttcccacacatataaaatgtattctgtgatttatcactcaattaatttatttttgcctggcctttttctgtaacttattttaatatttagacttgtttccctaatgagctcctctgtcaggcagggaatatgtctcacaaaaaaagaaaaaagcctgcaaagaacatagcatggtgttaagtatttcttgacaggttgcaagcagagagatgtttcttttccataagttgtcagtaaaattaaaaatatgcaaactgtcagactgagtttttttaaattgaaatataatttacatacagtaacattcaccctttatggtgtacagttttattgtttttgacaaatgagtagagtaacctcactggattcaagtaatagaataattccatcaccatcagaatttcctccaactccttagtagttcattcccacaccctttggcaactactgatgtgttttatgggcctatagttttgtcttttctagaatatcatataaatggaattatacaggatttagacttttgagtctggcttgcttcacatagcataatgtagctgagattcatccatgtgtcagtagttgttcctttttattgctcagtagtattccattgtatgggtttgccagtttatctgttcacaagctgaaggacattaggatgtttccagtttctgtgattgtgacaaaagctctacaaacattcccatacaggatttgtgtgaacgtaagttttcatatctcttgggtaaatatctagtagtgggattactaagttgtgtgatcaatgtgtgtttaactttatgagaaactaccaaactgtttttcaaagtggctgtaccattttgtattcctgccagcaatgcattaaaattctagttgtttccacaccctcaccagcacttagtattatctgatttttgggtgtgtttttatttttattttagccattttgataggtatatagtggtatctcattgtgattttaagtttcattttcctaatgcctgaggatgttgacagtcttttcatgtgcttatttactatctacagatcttcggtgaagtattgttcaaaccttttgcccattaaaaaatccatttatggctgggtccggtggctcatgcctgtaatcccaccactttgggaggccgaggtgggtggatcacctgagatcaggagttccagaccagcctggccaacatggtgaaaccccatctctactaaaaatacaaaaattagctgggcatggtggcacgcgcctgtaatcccagctagtcrggaggctaaggcaggaaaatcacttgaacctgggaggcggatgttgcagtgagccgagatcacaccactgcactccagcctgggtgacagagtgagactccacctcaaaaaaaaaaaaaaaaacaagcccaaaaaacaacaaacaaatatatttataccagtttttgtatcattcatttatatagagatacaataccattaaagtttcaaattaacagtcatgtctattctacaataacatgaatattttatttttacatattctcactaatttgtatattttcttacataattgtaattgcattttgagagttttattgaagtataattgacaaaaaaaattgcccatgcttaaaatgtataatttggtaagttttgacatatgtatatatctgtgaaaccatcaacacagtcaagaaaattaacatattcaatatccacaacaatttgttgtgctcctttctagtcttgccttatgcttctgcttccatggataggcactcatctgatttctgacactatacattagtttgtattttttataatttttatttagttatttttatttgtttattttgagatggagtctcgccctgtcgcccaggctggagtgcagtggcgctatctcggcttactgcaacctctgcctcccaggttcaagtgattctcctgcgtcagcctcccaagtaactgagatgtgtgccaccctgcccagttaactttttgtatctttagtagagacggggtttcaccatgttggttaggctggtcttgaactcctggctttgtgatctgcctgcctcggcctcccaaagtgctgggattacagatgtgagacagtgcgcctggctagaattttatttaagtggaagcatacagcacatattctgcttttttttttttttgttttttaggttcttcactcagcataattattttgagattcatccatgtttttgtgtttatcagtagtttatttctttttaatgctgagtaatattccattgtatgtatataccataatttgtttatccattcacctgttcatagatatttgggttgtttctagttaggggttattacaaataaattatgaacattcatgtgtaagtctttgtatggacttatgtttttatttctcttgatgtaatatttagaaatggaatggctgagtcaacttgttaggtgtatgtttaacttcttaagaaactgcctaagtggtggtaccgttttaccttcccaccaggagtgtatgagatttccagttgtcctatatccttatcaacacttggtatggtcagtctttttaattttagctcttctagtaggtgtgttgtggtatctcattttttttctttagttttctgtttgctattagttggtttttttagattctatttttaaaatacagtaaaattaacttttaaaattggtgtatagttctataaatttgaacacatgtgattsatgtaaccaacaccaaaatcaggatacagaacagttccgtcaccctgaataactccctcatgctacctttttgtagttacaatctctcctcatccctaacctcagcaaccactgatttgttctctgccattatacttttttccatttgagactgtcccacatgtatacttataccatatgtaaccttttgracctggcttcttctattcagcataatgcctttgagattcattacgtatatcagtagtttgctcctttttactgctgattagtattccatgttaatggatgtaccagtttgttcatttactcattaaagggcatttgagtttagttacttgcagtttttggtgattatgaatacagctgcaagaaacattcacatatgggtttcgtgtgaacataagttttcattttccatgagtacatacctaagagtgtgagtgcttggccatagcagctccagcttactctgtaaaacggaaataacagtacctacttagcctcacaaagtatttttgctactcaagagagacaaattggataacgtagcatttaagagaatgggatttaatgtcraaatcagtttgacttaattcacagagaccttttacttggtcatttttaaaaatttatcactgatttgtagttttcagcatagagatcatgatatgttttgttaaatttattataaagtatattatattgtattgttattataaatgatgctttaaaaaacgtaatttctaattctttgttactattatattgaagtacaatagatttttccatgttgagcatgtatcttgcaacctgttttactcacctactagttcttgaatgaagccttttgcagatcctttggacattctctgtaggtaattatatcaactgtggatagagacagttttgtttttatcctttctaacttatttgcattctatttccttctcttgcctggctgcactagatgagcctccagtataatgttgaataagagtggtgagcataggtatctttttcttgttccatatcttagaagaaaaacatttaatctttcattttttttttccccaaaggtggaatttcgctctcgttgcccaggctggagtgcaatagcgtgatcttggctcattgcaacctccacctcctggtttcaagcgatttttctgcctcagcctcctgagtatctgggattacaggcatgtgccactatgcctggctaattttttatttttaggagagatggggttcgccatgttggacaggctggtctcgaactcctgacctcagatgatctgcccaccttggcctcctaaagtgctgggattacaggcatgagccaccacgcctggccactactctttcattgttaagtgtggtgttagctataattttttagataccttttattaaattaacaaagttccctgtctgtacctcgtttgctgagcrctttctcttatgaatcgatgttgaattttgtcaattttgtcacatgcttgcttgctgggttttttttttttttttggttctgttggaatgatcatgtggtgaatttatactgattgacttttaaaaattaatagactttattttttagagcaattttaggtttacagaaaaattgaatggaaactactcagatattcctgctcccccaatgcagtttctcccattgttaatatcttgcattaatgtgtcctcacttcctcccttcctgctaccaaacccctagcaaccactgatctttttactgtctctgtagttttgccttttccagaatgtcatgtagttgctgtcatatagtatgtgatcttttcagactggcttctttcacttagtaatatgcacttaagtttcctccatgtttttttgtggcataatagctcctttctttttatttatttatttatttttgagacagagtctcactctgtcgcccaggctggagtgcagtagtgcgatattggctcggtgcaacctctgcctctcaggttcaagtgattctcctgcctcagcctctcgagtagctgggattacaggtgcccaccaccatgcccagctaatttttgtaattttagtaagagacagggtttcgccatattggccaggatggttttgaactccttacctcagatgatctgcctgcctcagcgtcccaaagtgctgggattacaggagtaaaccagatgcctggccatctactttctttttattgctaaataatattctgttgtatggttagaaccactgtttattcgtttgcatattgaaggacatcttggttgcttccaagttttggcgattatgaataaagctgctataaatattcctgtgcagttttttgagtggacataagcttttaactcatttggcattgattgattgttgaatgtcttgaatattgcatttgtcaggtaaactccacttggtcatgatgcattatcctttttatatattattggattgatgtgctttcattttattgaagaattttgttttctgttcttcaggatcttaatttcttccttttaatgtgttttctaggtttgtttttaggttaatgctggccttataaagtgagttaaattttgtttccttcttttgaattttctggaagcgtttgtgaagaatttgtattacttatttcttacatgttggatataaattgcctgtgaagccatctggtcctggagttttccttgttggaaggctggaattaaaaattcaaagataataaatttttaacctacaaatttaatatctttggcaggtataagactactcaggctatctattttgtcttaggtgagttttggtagtttttatcttttgagtagtttgccctttttatctagtatgttgaatttacagtcataaagttgtaatacctcttcattatctttttaatgtttgtacaatttgtagtgatatcctctctttcctgaattgataatttgtggctattgttttcttggcctatctgatgagtggtttgttaattttattgatcattttagagaattagctttgagtttcactgatttttctctgtaagttttttccattggtttcagaacttatcgctttctcttatatcgtcatcgttttcttctgctttcaattggttttatatgttcttctagtttcttaaggtggccactgagatcataatttgatctgtttattttttaatatacatttttaatgttaaaatttcttgtaggcactgttttggccacatttcacaaatttttatcttaaaattttcatgtaacgaatatattttcttatttattttttcctatatgacctatgtatttatttagaagtatgttctttacaaatatttggagattttctagatggagattttcattgacttctagtttaattctattatattcagagaacatattttatatgatttcagttattttaaatgtattgtaaattgttttatggcctagagtatggtgcaatttggtaaatcttctgtttgtgcttgagaaaaatgtattatctattttgctatttggggttgaatgttctgtaaatgtcagttagcccaagctggttgatagagttgttcaarctttgtatattcacactgattttttttgtacttattctatcaattattgaaaaaagtatgttacagtctctgaatacaagwttacatttgtcttttactctttccagttctatcagtttttgcttcatgtattttcaatacctattgttaggtccttacacatttataattgaaarataataatacaaattacccaaaataaaacacagagagaaaaaagaccagaaaaaaaagagcaattagcaagctgtgggatacccccaagtggcctaatatatgtaattggataccatgaggggtaaaggtcattttgcaggtcaaaaatatttgaagaaataatggccaaaaatattccaaatttgatgaaaactataaacccacagaccccaaatcatcaacaaattccaaaaacaaaaagtgtagaaaaccacaccaaggcatattattatcaaattgctcaaagccattgataaagagaaaatctttatagagctagagaaaaagatacattacttacagaggaagaaagacgaaaatgagttcagggttttttttaaaacaaacaatataagctggaagacagtggaacaatatctttaaagtaccaaaagagaaagtctgccaacctataattttgtacacaacaaaaataccttgttaaaacaaaggcaaatgaaggttttttcagacatactgtacctgaaagaattcattacacagagaccataattccctttcctcttccctctactggatatcttattccctggattctgggcctttcaccacagttttgtagcatatatgcttcagtagcctcctgagaagaggttcaaggcggataaagtttttgagtctttgaatgtctgaaaagatttttattctgtcctcatttggttgatgtatttgttgggtgtagtttctactgcagtcatagtgagtaaatgtctagagaaaagcaagcagtaaattctatacgagcttaaaaggagtagcctatgaattgaggaagagtatatgcataatgtaggctttggtaaatgtttttaatgtaacctaatgctatggtttactgtatttatgaatatatattttaaaatgcatgattacattgaataacagtgttttggctttaatagtaaagctttttttcaaatttagtcggtataaaattatttgagatagtcacacatactttgtatgtgccctattgacaacaaccaaaggaatttctcctttccatgcaaatgaggaacacatagacacagatgtaaatgttctaaatcattatttctagtgatataagttaggattgttttactggaagattgtggtgctttttgagtgttggctgtgtattttagacaaagtagctggtaactaggactagttccagctttacaggtcaccatgatacccatatccatgtctctggtcccaagtcattagctgtaagatagccaaagacctatgatgtggctaggtgtgagaattctgccccatataggcattctgtataggttggtaacagaccaaacatggtcaaatttttttctgttgaaatttgaactcatagatatatagagagaggaaaatatgagaataattagggatcagtagatgtccatttctaagaagttagggtggcaagcatgttgaaaggttcctattagagcacaataggtattgttgtgtcctaaatcacattccagttgtctctattttgcaaatgttgagtttttcgtctttcttcctgtatctttacagtattccctggttacctgagataacttgagcgtaactgttctttgaaatctgagactagctaacatatatactatgtactagattttagaaaattttaggtatctgaaaatacaactttttcctttcatgtgttaattttgtctcttagaaattcttcctgttaaatatcaaggaactcatgacctcaagtgatctgcccgcctcagcctcccaaagtgctaggattacaggcatgagccaccgtgctctgctgtccttttttttttttttaaatagtagccatcctaacaagtataaggtgatagcttattgtggttttaacttgatttccttgttggctagtgatattgagaaccttttcatatacttgttggctattttgtatgttttctttggagaaatgcctgttagttcctttgcccattttaaaatcaatttatttggttttttgctattaagtcatagaagtcactgatacattttggtttttaatcatttatgagatatggtttgcaaatatttgtcctattccataggttgcctttgtatcctttgctttgcagaagtattttggtttgacgtaatcagacttatctatttttgcttttgttgttttgtgcttttggtgtcatatccaagaaatcattgccaaagccaatgtcaagaagctttttccctgttttcttctaagagttttgtagtttaaggacttacattgaaatctttaattcatattgagttgatttttatatacagtgtgagataagcgtccaatttcattcctctgcatgtggatatctagttttcccaataccatttatttgaagagattatcttttcttcactgtgtgttcttggcataattgtcaaaactcacttgtcctcatktgtgggtttattactaggttctgtcttctgttccaatagtttatatgtctggttttatactggtaccatactgttttgattactgtagcttttaaacgtattttgaaatcagacagtgtgatgcgtccagatttgttcttcctgcttaaaattgttttggctactcagtgtcttcttgtaattccatatgaattttaggattgttgtttctatttctggaaaaaaaaagtcattggagttttgttagagattgtgttgaatctgtagattgctttgggtagtatgagcactttaacaatattaattcttccagtccatgaacatatcagatgtcattgcatttattcctgtctgcttgaaagcatttctttcatccatgttttatagttttcagtgaataagtctttcacttccttagtttgttgctaaatattttactttattgatgttattgtaagtaggttgttttcttaatttccttttcagataatttgttgatagtacctagacatgcaatagatttttgtatgttgactttgtttttttttttttgagatagagtctcgctctgtcactcaggctggagggcactggcgygatctcagctcactgcaacctctgcccctggggcctaagtgatcctmctaagtactgggactacagatatgtgccaccatgcccagctaatttttgtattttttgtagagatgagatttcaccatgttgcccaggctggttttaaactcctgggctcaagtgatccacctgcctcggcctcccaaagtgttgggattataggcatgagccaccatgcctggcctctatgttgactttgtatcctgcaactttgctgaattcattcattagtctgaacagctttttttgtgtgtggaatctttggggatttctatatgtaaggtcatcatctgtggcttcttccgctctaatttggatgccatttatttgtttttcttgcctagttgctcttgctagaacttctgtttttgaataggagtggtgagagtaggcatccttgtctcattcctaaccttagaggaaaagctgtctgtttttcactcttgaatataatattaactgtggatttgtcatatatggccttcattatgttgaggtgcatcccttctatacctgacactaagaatttttatcttaaaaaggactgaattttgttaaatgcgtttcctgcatctattgagatggtcatacagtttttgtccttcattttgttgatttggtatatcacattgatttgtrtatgttatctcarttttttgaagtgttacttatacgtttataaaagttgtgagccaagaaaaatttgtgctgaggtttttatgaaaacatttactgccaaactatattttctatactttctgtatttctgtgtgagtatatttagacacacgtatatttggattatcagtgtgccaaacattatttataatatcatctcctgaattttatattttattttttttagttaaaaagaaaatactgccttttgaatatgaagttctcaaacacttttgagaaaccagatcaaaagaggtattaaccaaactttttgagaaaccggatcaaaagaggtattaaccaattttaaagttgataatttaaaattgaggtttgctaatcagaaatagaattttgcttataactgaagggtgttttataccttttgtgcttcctttttaagaatattagttggattttaccttttgttctaacttgagaatcactgttttatttatttttaattattgaattaaaatatagtagagagaatgagaaagcaaacctccacatacctgaagcttactttttacagttatacttgtggttaaatataattttcttcctaacccccagttatctttcctattttattttgaagcaggtaacaaacatcttgtcaatttacctataaacatttcagtatgtatcttttaaacacaagcactcctgtttttaaatgtaacaataacaccatcatcatatatagaaataaatcccttaatatcatcagatatccagccattcacattttcttggttatcgtataatgttataatgttcttgtttattggctgatctgtttacttttttttttttaacagtttatgtctctatagattctccctttatctttttaaaagctgttcttctgattcctgattaccctccttagatgtcttttgcagcatagccctcaatttacttgaaattagctgtctgcacccagacagaccccagtgaatattacaggccagtagctcctcattgtgctctggtagaattactttggtagaactgtattcaatacagagttccttcactttcagcccctgctagtgggaatctgaagactgtcagtatcaggtgaaagttgtagttgcctgtgagaaatagggaaggggctcattgggacactgaccatgtgttattgtttgggtttgttcttttggtgttttctttttgctgttttttgaaaaacctgtattttgtgtataacctgtattagtgataaccaggactccctgtagtagcactagtggcatttttgaattttttggacttgactgttaacatttgccacttgctcttagccttgctyctccaattttggggttttctcagaacctatttttggaaaactatattgattctttctaagcaagtctgttcacttgtgctaattcacaggccagtcagcactgctaagtttgcttttcatctcatcctgtgtcatttgttaattttctcatgtgacagatagttattgactactgctctaagcaaaacatctgttttatgtatttcagaacttttggccttagtgtctgaccttttaatggtacctttgttttctagcatagctgtatctcctctcatatattctttaataaattcaattgggttttgggagataaaggaagtaaacatgaatcataggctattttaatctgaagttttcatatttaatttgtaacaaattgaaaacacatttttttcattcattttgttctcagctacttataatcttccaatctttttagtgatacttaaagtaatgataactattatttattaggtgctaactctgattacttaacatttttataacaaccatgtaaccagggattattatcctcattttaaatatgaagtgattgttatgtttctgaatacttaaatgtactttatatgcatgtgcctggatataaagtagatgctgaaaaagcagctattcagtgaattcagatgtttacggacccagaggcataaagacaaaaacaaaacaaaatataagaaaaccacagaaaatggtttttctgttaactagttttacaaaatcttgagacagatgcttaagatatacttttctttttattatggtaaattggccaaattattcttcagggactaaaatattctcattagaaataggagtatcttttcataatgtcacgacgcctctagtgtggttcaggtttggatttggtttagtcagtgtcctaaatatagtttcattgccagcctcaaacttgttaagatacccagtcataaggatgaatatatcaaaacctatgttatccactattatatgtaattgtaatcctgcattgttttaaattatctcacctcatcatatttgtatttaggatttaaaatatactaaaaattataatgaattagtatgcagttaagtagttattaaggatcaaaacaaatgaaatggtcagaattataagtcaagtctcttgtttttagtagctmttggaagatcatgatatatagctcttttcaatgtgatattttctctttaacatttgggaaattatgaagacatttcagatttttccagtagatggcagaattgttttaaacattttagattcactgttaaattttttttgaattgatttgaaggagtaatcatttctctaaaataactggatgtattttttcttccaaataagccctgcactactgttttataaactaacttttaagataaagatttttaaatgataatatggatcattcctaatcagtaatgcacaatgatagaagtggcaattatattttgaagaatggataaaaaaattttaaatcaaacatttagttttttcaatagtaagtaacattctttctttagttatcagagatccagaggtcacatgatgtaatcatcaccatgggcatcatcagattgatagaatatcctaaaatattttgattttagctaaaacatgccttcggtttagtgatatctataaaaagttgaacttactttaaaatactttgttgactataaaatagtaatttaaaagtttttatacaggttgtctcagagttgtttgaaggttggatttttaattttctgatcttcattttgaaatttcatgtcttatgttttcttctgagactatttcaaatacttactgaattcccttagttcgtgtgtatatgtgttcatgtacttaaatatttaattgtattttgttgaggggaaacaaaaacccttctcccttacttatacaaatagtaccacatctgtgtcacactttcaaacagaaaaacaggaggatgaaatgtgttcacagtcgtacctgtcagttctttatgctttatgcttatgaagttaaggaaccttaatcttgaattctagttttccctgccatagaaatatgaaacattttaacagaaatggaactaataatggatgagtgactaagctgggttatgtttctaagtgaggttgaaaatatttcatgtaagagaaaaagagttatttgtctccttttgttttgagggttttgtaattkctttatattaagaatagtagtgtcaataataacaataatgagaattagtatttcttaaatactgtgtataggcactatgcctagcatttgttgtgactcgctgtatttgttgaagaatataataaatgagggaaaataatatgtctagtgttgatttgtcaatatcacgtagctatgaaactcaatttgcattctttttgtgtaaaacccagtttctctgcatcagtgtaaatcacatgaaactattacttttcatactccctcacttttcaaagtactactcagttcagcagttcctttctgctgctgtttgaagactttgtaagtgtgacttactctgcaagagttgtaaaagtgagttgacaaggttgcttttgagatttttcaattgaattgggtttggtagagatagtatcttcagaactatatgtcagacttcactgtttgattgtttgaataaatttccattcttataaaatgaaytggaaatgtacctgattttttttaaaattaggtttgttatttttacacttaaaaggctgtttttttgcttttatctttatttccgtttaggtgactggtgcctccatcttgtggtccaactcacaaattgcatcctttgctagagattgtgtttacactttttttcccctcagctgaataaatgacagaaaattattttctgttttatttattaaaaatataactccgattaagcatacattaccttcaaagaggacagaaagtgctcaaaagggaccacctaaagcaacctgttcaaggatgaagtcttgtaaaataaattattattgttgatggtagtggtgatggatgatggtggtggtagtggtggtggtggtggtgaatgagagagaggatgaagttcgatttgctctttatgttgaaaaatgaaacttaaagtcttcagcaaaatttactgtataacttggtcaggcatggtggttcacgcctgtaatcctagcactttgggaggccaaggcgggtgcatcacctgaggtcaggagttcaagatcagccaggccaacatggtgaaaccctatctctattaaaaatacaaaaattaggccgggcacggtggctcacgcctgtaatcccagcactttgggaggccaaggcgggtgggtcacgaggtcaggagatcgagaccatcctggctaacacagtgaaaccctgtctctactaaaaatacaaaaaattagccgggcatggtggcgggtgcctgtagtcccagctactccggaggctgaggcaggagaatggcgtgaacacgggaggcggaacttgcagtgagccgagattgtgccactgcactccagcctgggcgacagagcaagactctgtctcaaaaaaaaaaaaaaaaaaaaattagccagacatggtggcaaatgcctgtaattccagctactcaggaggctgagacaggagaatcgcttgaacccaggaggcagaggttgcagtgagccgagattgtgccaccacactctagcctgggcaacagaaggagactctgtctcaaaaaaaaaaaaaaaaaatttactatgtaattgcaaccttagctaattattagaattaagaatgaatcagtatctgtggtcctacttaggaagctttggtagcaggatcgcttgagctcaggagtttgaggttacagttaactatgattgcatcactgcactccagcctgagtgacacagcaagactctttctctaaaaaaaaaaaaatcttaaaaaagaatgaattaagtactattttttcctccagctttattgaagttcaatttataaatacaaattgtatatatttatattgttgagtatgcttgaacaccataaatatatgtatacattgatatatacttcgtgattaccacaatcaagcttaggcaacatatctttcacctcacatagttatcttggttttttttttttgtagtgaacaagtactgatttttttaacataggttttctgacaaaactatgatagcacaatatgacattcttcttttcacatttgtctccatggaattaacaaaagtgactttttttgcaaaagttgaaagcatcatcaagttttctaaagatttttattactcagtgattaatactgtattcactgtcctttaaacacctttcatgttccaattcttattggtctaactaccttggccacgttttcaattagaaagtaataattttctcatgaagctatattattttcatagacttcatgaaactttatctttttgagatttgcaattttactttgcattcaccttgtgctacattcataaacattagaaaattgcgtggtggctcacgcctgtaatcccaacactttgggaggccgaggtgggcagatcacgaggtcaggagatcgagaccatcctggctaacacggtgaaaccccatctctactaaaaaatacaaaaaattagccaggcctggtggcacgcgcctgtagtcccagcyactttggagtctgaggcaggagaattgcttgaacccgggaggcggaggttgcagtgagccaagatcacaccgctgcactccagccaagtgacagagtgagactgcatcttaaaaaaaaaaaaatggagagactgacttataaacaaagagattgtcatttatttatttatttatttatttttgagacagagtcctgctctatagcccaggctggagtgcagtggcgcgatctcggctcactgcaacctgcgccttccaggttcaagtcattctcctgcctcagcttcccgagtagttggaactacaggcacgtgccaccatgcctggctaatttttgtatttttagtagaggcagggtttcaccatgttggtgaagctgggctcaaactcctgacctcgtgatccacctgccctggcctcccaaagtgctgrgattacaggtgtgagccactgcacccagccaagattgccttttaaagatgaggtagagattctaatattgagtagatatctaaatgtcccctgatataagttacatagtgaagatttttatttaccttgaaactattgttttcctacacgtactaggaacttcagttactctgttaatgagtacacagtcagtgaggaattcttggatgtaaataagtctgcaacttgccttcccctcactggcaagatttttgaaaagggagtcaacctactgacttcatctctcatctagaattcatctttccataagtgttgtacattgtactgcatttcccatttggattataggcgattgcttgtatagctaggtccctgactctgtgttcttctggacattttctagattgtagcaggtattcagcaaaacttgttcatccatctgactgatatttattgtataccttgtaggccaggcacagttctaggcatttgagatactatattaataagcagaatactgaaaaatccgtggctttactgagcttacattgaagctgaaggaatcagatggttttaaaaactgtcatagttgttacagtgtggtaagtgtcaagagaaaagaaaaactaggttagagttgagatcagaagtgttggctgtagagagtgggttgaaatcttaaatgtgatggttagggtagattcattgagaaggtgatatttgaacaaagacttgaagggagtgaggaagttagctaagtgaatatctggagtaagagcacaccaatcagagggaatagcagtatacattttgctttcactgtgaataaaatggagaattattccagggtttttagcaaaggagttacataatctaatttatgattttaaaaggattgctgaatttttttttaattgagaatagactgtagcaggcagagattgaagcagggagatcatttaagaggcttttttgatgttgtttttgttttaactcttcaacaattttagacttacagaaaagttgcaagaataatacaaagaattctcacatactttccccaaatcaaccaaatgttactgttataccacatttggttcatctttccaatttttaagatttattttttaaattaacaaataagatgtatatatttatgatgtatagcataatgttttgatatatgtatatattgtggaatggctaactcaagctaattaacatatgtattacctcataatttttttttgtggtgagaacacttaaaatctctcttagcacttacaaagtgtacaacactttttttttttttttggagaccgagtctcactctgttgccccggctggaatacagtggtgctatcttggctcaccgcaacctctgcgtcccaggttcaagcgattctcctgcttcagcctcctaagtacctgggattgcaggcgtgcaccaccatgcctggctaacttttatattctttggtagagacagggtttcaccatgttggtcaggctggtcttgaactcctgacctcaagtgatctgcctgccttggcctaccaaagygctgggattacaggtgtgaactaccgcgcccggccacataacgttgattaccattaccatgttgtacaatggaactcttgaacttactccgtcctgtcaaagaatgttcatatcctttgaccaacatttccccaatacctaccacccaccagactctggtaactcctcctgttcctgcccttttttgacccaggtgccttaccattttcagatgaccttcatcaactaaatcctttgtcacgtattttctgtccgttcctcatgttatggttgttgctatgtctgagaatagtttaatgcagtactaggaagaggttcccaaacctggccaattgtcagaatttccccaaacacactaacataattagaatctccccaggtttttccgatttttcaactaggtctaggaaccactaacatgacagatacagaagacagaaaaattgtactgacctgagcccatacctaaagtaaatgatttcaaatctgacttgacatagctgagaacataattttcctccgactttattaaggtataattgacaaarattgtatatatttacagtgtacaatgtgatgttttcatatatgtatacattgtgaaatgattaaatcaagctgatgaacatatctacacctcacaggcttatttttttgtggtgagaacacttaagatctaccttagcaattttcaagtatataatacattactattaaatatagtcaccatgctgtacaatagatctctttaacttattcatcctgtttaagtcaaactttgtactctttgaccagcgtctccccatttccccaccccagcccctggcaaccaccattctaccctttgtttctatgagttcagctttataaagattccacatataagtgaaatcatgtggtatatttgtctttttgtgcctgtcttatttcacttagcgtagtatcttccaggttcattcatgttgtcataaatggcagatttccctctttttaaatgtttaatagagttccattgtgtatatataccacattttccttatctgttcatctgtcaatagacacttaagttaattccctatcttgattattctaaataatattacagtgaacatgggagtgcagatatctctttggcatactgatttcatttcctgtggatatatacccagtagtgggattgctagatcatatggtagttctatttttagttttttgagaaatctccatactgtttttccataatggctatactaatttacattcccaccaagagtgtgcaaggttttccttttctctacattgtcgacaacacttgttaccttttgtctttttgatactagccattygaataggtgcgaaggtatgtcttgttgtggttttaatttgcgttttcctgatgatgattgatgttgaatattttcttcacatgcctgatggccatttatatgtcttcttttgagaaatgtcttcttagatcttttgcccaattatgaatcagttattrgttttttttcctgttgaattgtttaagttccttgtatattttggatattaaccctttatcaggtgtacagtttgcagatactttctttcattccaaaggttgtgtctttactctgttgattattttgttgtgcagaagctttttaattagaggtaatcccacttgtttatttttgcttttcttgcctgtgtgtttggtgtcatatccaagaaattattgccaaggccaaaaagcattcccctctgttttcttctagttttacagtacaagtcctgtgttttaagtctttaatctatttcaagttgatttttgaatatagtgtgagatgagggtctaatttcattcttttgcatgtggatatccagttttccaaacattatttattgaagagactttcctcttcccatctgtgttcttggcatctttgtaaaaaatctattgatggtaaatgcatggctttatttctggacatcctattctgtcccagtggtctttgcgctaataccatgttgtttagctactttagccttatagtagattttgaaatcaagtagtgtggtgcctcagccttgttccttctgctcaagattgctttggctatttagagtctttggtggcttcactgaaattttaggattgtttttcactatttctgtaaaaagtgttattggaattttgatagggattgcagtgaatctgtagattgcatagggtagtatgaatatttagccaatattaattcttccaatgcatgaaacagagtatgtttccattcagttgtgtacactgcagtttcttttgtcagtgttttataatcttcagtgtatggatttttcacctccttggcgaaatttattcctaaatattgtattaatattattttgtagctatagtaaatggaattgatttttttattcttttattggatagtttatcagtgtatagaaacactgattttttgtgtcttgatttttgtaccctgcaacttcactaaatgtattagtaacagttttttagtggcatttttagaattttttaagaatataacatcttgttgtctgttaacagatacagtgtaacatcttcctttctgattcagatgtcttttatttatttttcttgcttaattgctcttgctagtatttctggtactatgttgaatacaagtggtgagaggtgagcatccttgtcttgattcggatcttagaggaagagctttcaactttttactgttgagtatgttaactatatgtttatcatatatggcctttattgcattgagatatattccttttatacctaatttgttggaagttttttttttatcatgaaagagtgttgaattttgttgaattccttttctacatctattgagatgatcatatggtttttgtccttcattctgttattatagtttatcacatttattggtgtacattggcaaaccattcttgctttccagggataaatctcacttgatcatggtgaatgatctttttaatgtacccttgaattaggtttgccaatattttgttgagagattttatatctatgcttatcaggaatattggcatataattttcttttcttgtaatgtccctttctggccttggtatctagtaatgctggcattatgaaatgagcttggatgtttcccttctcttcagttgttttggaagagtttgagaaggattggtattaggtcttctttaaatgtttggtagaattcagcagtaaagccatcaggttatgggcttttctttaatgagagactttattactgatccagtctccttacttgttactggtctgttcagattttatatttcttcatgattaagttctgttaattgtatgtttctagaaatttatatatttattctaggttatacaatttgttgggaaataagtgttcatagtagtcttttatgatcctttgtgtttctttctgtagtatccgttgttgcttcccctttcatttctgatattatttgtatattctctcttttttcttagtctatctaaaggtttgaccatttttaaaaaatcttttagaaaaccaatttcttagtttcactgatcatatctattgggtttctagtctccatttcctttttatctgctctgatattttttatttcttttcttctattaactttgagctaagtttagtttgttcttttctacttcctgaggcatagtgttagattgtatatttgagatttttttaatgtaagtgttcattgccttaaattttcgtcatagaactacttttgttacacgctataagttttggtatgttatgtttccatttttgttttttgaaaaatttttttatttaaaaatatttttagttttkaatttttgtgggtacatagtaaatgyatatatktataggttacatgagatattttgatatagctgtgcaataaataataatcaaatcaggggtattcatcacctcaagcattcatctgtactgtgaacaattcaattacactcttctagttattttaaaatgtaaaattaatttatttttgacaattgtcaccctgttgtgctatcaaataccaagtcttattcattctttctattttttttgtaccacttaaccatctccacttccccaccacccctctactaccctccctagcctctggtaaccatccttttctgctctctatcttcatgaattcagttgttttaatttttagcttccacaaataagtgagaacatgtgaaatttgtctttctgtgctgggcttattccactttgcataatgacctctgggcccattcatattgttgcaaatgacaggattgcattcttttttgtggctgaatggtactccactgtgtatgtgtaccacattttctttattcatttgtctgttaacggacatttaggttgcttccaaatcttcattattgtgaatagtactacagtaaacatgggagtggagatatctctttgatatactgttttcctgtcttttgggtatgtacctggtaggggattgccagatggtatgttagctcaatttttagctttctgaggaamctccaaactgttatccacagtgattgtactaatttacatttctaccaagagtatacaagggttcttttttctccacatcgttgccaacatttgttactgcctgccttttgtatataagccattttaaccagagtgagatgatatctcattatagttttgatttgcatttctctgatgatgaacgatgttgtgcaccttttcatatacctgtttgcaatttgtatgtcttcttttgaaaatgtgtattcagatgttttgcccatttttatattggattatcaggtttttttttaccatagagttgaaaacaatatagagctccttctatattctggttattaatcccttgtcagatgggtagtgtgcaaatatttttcacccattctgtggattgtctcttcattttgttgattgttttctttgctgtggagaagctttttaacttaatgtgatcccatttatccatttttgctttggttgcctgcacctgtagggtattactcaagaaatctttccaagaccaatgtcctggaaagtttccctactgttttctttcagtagtttcatagcttgaggttgtagatttaagtctttagtccattttgatttgatttttgtatatattgagagataggggtctaatttcatttttctgcatatggatatccagtttttccagcaccatttattgaagagaatgtcatttccccactgtgtgttcttggcacttttgttgaaaatgagttcactgtaggtgtatggatttatttatgggttctctattctgttccactgacctatgtatctgttgttakgccagtaccatgccattttggttattatatctctgtagtataatttgaaatcaagtaacatgattcctccagttttgttcatcttgcttagaatagctttggctattcagggtattttatggttctatatacattttaggattgtttttctgatttctgtgaagaatgtcattggtattttgatagggattgcattaaatctgtagattgctttggatagtatggacagtttaacagaattgattcttcccatctatgaacatggaatatcattctatttttttgcatgtgtgtcctcttcaatttgtttcatcagtgttttatagttttcattgtagacatctttcacttttttggttaaggtaatttttaggtattttagttgtacttattaatgggatttcttgatttctcttgaagattgtttgctactgatttttgtatgttgattctgtatctcacaacttaatttatttatcaatttcaatagttttttagtggagtatttaggttattccaaatataagatcatatcctctgcaaacaagaataatttgacgtcttccttttcaatttggatgccctttctttctcttgcctgattgctttagctaggacttccagtacgtgttaaataacagtggtgacagtgggcatccttgttgtattccagatcttagaggaaaggcttttagtttttctccattctctccattattgagatgtaaagttcaatatgtagsctgttaaactcttcatcattgattatgttatttggttgtttatatccttatatatatatttttgtctacataatttgtctcatattaaggaggattattttaaagttttctttttttactgtatttttatctgtgttctaccaatatcatttgtgtttgcttcattgagtggtggttctgttatttattgaatagttatttataatttatctttattgtgaactgtggctgaaaattttgggtcatgcttaatgctctctaattctattttaatatttgaatcacaacctctatttcttttttcgtttttttttttaaattgtactttaagttctagggtacatgtgcacaatgtgcaggtttgttacatatgtatacatgtgccatgttggtgtgctgcacccattaacttgtcatttacattagatatatcttttttctttctttctttttttttttttcttttttgagacagagtctggctctttcgcccaggctggagtgcagtggctgatctcagctcactgcaagctccgcctcccgggttcacgccattctcctgcctcagcctctcgagtagctgggactgcaggcacccgccaccgtgcccggctaatttttttgtatttttagtagagacagggtttcaccgtgttagccaggatggtctcgatctcctgacctcgtgatccgcccgcctcggcctcccaaagtgctgggattacaggcgtgagccaccgcgcccggcatatcccctaatgctatccctcccccctcccccaaccccatgacaggccccggtgtgtggtgttccccaccctgtgtccaagtgttctcattgttcagttcccacctatgagtgagaacatgcggtgtttggttttctgtccttgtgttagtttgctgacaatgatggtttccagcttcatccatgtccctacaaaggacatgaactcatccttttttatggctgcatagtattccatggtgtgtatgtgccacattttcttaatccagtctatcattgatggacatttggcacaacctctatttcttaatatttggctgatacaactttgcccattctttttgcccccctccctttttttttttttttttttctgagacggagtcatgctctgtcacccaggctggagtgcagtggtgtgatctaagctcactgcaaccgccacctcccgagttcaagcaattctcctgcctcagcctcctgagtagctaggattacaggcatacgccaccgagcctggctaatttttgtatttttagtagagatggggtttcaccatgttggtcaggctggtttcaaactcctgacctcgtgatctgcctgcctcggcctcccaaagtgctgagattacaggcatgagccactgtgcctggcccatttttttttttttttaattcttagcatttgatatggtttggctctgtgtccccactcaaatctcacctttagttgtaatctctaaatccccacttgtcaagggcgggatcaagtggagatagttgaatcacgggggtggtttccccaatcctgctcttgtggtgatgagtgagttctcatgagatctgacagttttgtaagggacttccccctcttcactcaccactcattctctctcttgccaccctgtgaagaggtgccttctgccatgattatatcttttctgaggcctcccaggtatgcggaactgtgagtcaattcaacctcttttctttataaattacccagtcttgggtattccttcatagcagtgtgagaacagactaatacagcatttttaaatcacttgttttaggtgtgtttcttgtgtacaggttatattagagtcttgatttgtcagccaagtttttaatctctttttttaaagtagaaaaactaagcacattctcatttactgatattgtattctgttttttttttttttggttttcttttttttttttgctatgttttaaaatttctcatggtatataggaaggtttgtagttttgtatttacctctgtatttctaccttttttaatgcccgtatttcttggtttcttattctattactatctcatttgttagtttctaatgatatcctttaattctcacccattttttttaccataaccaaagagcttataccccttttctttctccttttaactttgtctcctaatgtttagttgcatttttgacttcttttaaaatatatttaatacatagtatataacatataattaggttgtcttgcactctgatccttgcctttgttttagacttagatctctaattaaaggtattgaatgctcaccattagtctttttgctaaagttgccccagttaacacttggttggatgcagcttactttttggtagattcctcaagaagtgttcctgagtatagagttccctgagttcattcatgtctgtagtcttgaatcttcatgcttggatgtaacatccttgtctcatactttttttcttgagttttttgtttgcttgcttgtttgtttgtttaggaagcttactgttgccttgctttctatgttgttgttgagacatttgccaacataattttttccttttcacaaagggaaaaaaatataacacaaagatgttatattcaatcacaaagattcaaggctacaaacatgcgtgaactgagggaaattctatactcagaagcacttcttgatgaatctaccagaaagtgagctttgcgaaccaagggatgcctggggaaactttagcaaaaggagtaacgtaagttatgcagtagttttgtttggaggccttgagtatttttgtttttggagtcttataattttagtagaatatgtcttggagttgatctttctaggtgwtaaatcacatgcattcttaagttctttattaagtcctctggtttttcaagatcctttttaatactttttacaaaaggatgaactttttcttcccggaggttattttattgagacaaggtctcactctgtcaccctagttggagtagagtggcatgatcctggctcactgcaacctttgcctcccaggctcagtgattctcccacctcagcctcctgagtagctgtgactacaggcacatgccattttgcctgtctaatttttgatattttgggtagagacagggtgtgatggttaatattgagtgttgacttgattgaaggatgcaaggtattgttcttcagtatgtctgtgaggacataagccaaaggagattaacatttgagtcagtggactgggagggacagacccactctcagtccaggtgggcaccatctaatcagctgccagtgctgctagattaaagcaggcagaagaaagtggaatgagcagacttgctgagtcttccaggcttcatctttctcctatgccggacgcttcctgccctcaaacattagactccaagttcttaagcttttggattcttggacttacaccagtggtttgccaggggcttttgggcctttgccacagactgaaggctacactgtcagtttttctgcttttaaagttttgggactcgactggcttccttgctcctcagcttacagttggcttattgtgggactttaccctgtgattgtgtgagtcagtactctttaacaaactttcttttatatatacctccatcctattagttctgttcctctagaggaccctgacaaattcacagggtttcaccattttggccaggctgctctcaaactcctgagctcaggtaatccaccctcctcgcatcccaaagtgctgggattacaggcatgagccactgccctctgccctgatggtaattttagatcaatcttaagcctgctgctagctccttctctcttctgggaattttctcagtttttcttggaatgtccttgtttttcatgaatgattgtgacaagagccagtaggatagcttactgagatttgtgtttgtttgtttgtttatttgtttatttatttatttattttgagacagggtctcactgtgttgcccaggctagagtgcagtggtgtgatcttggctcattgcaacttcctcctcccgggttcaagcatttctcctgcctcagcctcccaagtaactgagattacaggtgcacaccaccacatccagcttattttttagtagagacgaggtttcacyatgttggccaggctggtcttgaactcttgacctcaagtgatctatctgccttggcctcccaaagtgctgggattataggtgtaagtcaccatgcccagcctttttttctatttgcagataatttgaagtttattttccaattatgttgagggcatgagttttatttgttctttttggttttgtgtatgtatgtataatttatttttttaaggatattgtgttacgacactccaatttatttggccgtcattacctaggcttgctgttattttgaagtctcaagtgagcgaaagaaaggatttaagaatgattctaaggatttttacctaagtaattggaaggatagaattgtatcagctgaaatggggaaggctgcaggagcaactagatataaaggtaagatcagatattcagtctcgggttgtgtttaagatttctgtttgatatctaaacagagagattcagaaggtcagttggataaatgagcctggaatttaggagagacatctgatttggaaggaaaatttgtgagttattaacaatagatggtatttaaaagcatggaactagatgagatctcctacagtcagtatagacaacagaaccagaccaaacacagaacactggtgtcttctgcattaattggtttgggatatgagaaggaatcagcaaggggtgactgatcagctgctgatttcttggtcaatcagtagctgactccttggtcaaaaaagaatgagccataaagtagaaggaaaactaygaaagtcaggtgccctggaagccaaataattttttttttaacaagaagggagggagaatgttactgatgctactgatagttcaagtacgatatgccgttagaattaagaattggatttagcaacatgtaggtcattgataacattgacaggagcagtttgtggaattaaattataatcagcgttgcaatacttttaaattagtcttgtcaatttggtgcccttggcatatgagcaggatgaagatgatccaagtagcttggcctctggccttcacttgttttaaaagaactgctaatctttgttctaattttgtatactgggtttccatgtaatattttctttgggattggtagttataagggtctactataaagtaaataaatacactaacagtttcaaaaataataaagaactttttaaagaacacattactagatgtaaatttttaaaaaaatttaatgggaattttttgttttaatacgtctctaattctagtatcaaatgaagtagactttgattagaatgtatgtgcttttttttttttcttagcttctcttaatgmgtaagcttaaagcttttttaggctttatgtatgccctcagactcattcatttctttaaatttctcagactcttctaagctaatattcacatattatagtctttctgtcctccgcacttatgttgatccttaacatatagctgatattttgtcagtgttttttaaattgaaggaaatggaccccaagggggtagactttggcttactttgtctcatttcttttcttgcagtgcttctgctggcctgtctcttaagcagtagaataataaaaagtagtttctttgaggatataaaagcccttgagatagtttcactttaagcttaaaagattttcttgtcattttacctctaaaatttgattttcatgtttctttttagtatrtattttctgaaccctcctcttgtgcattttaaatgaacctatatttggtaactgttcccagcaatgcctttttctttttcataaggaacctgatacgttattctatgcctatgtggtatttagggaggcagatggtataatagaaggagaaatgagcagtacatcaaaaccagggccagcttctgccacttgcattcatctttttagtaaataattattgaatatctatcttctgtgtgctaggtatttactagaagtttgtgcttgtgttttaattaatagactttattttcttagaaatgccattttcacaaattactttctcttagatactaagatctagtctgtaataaagtattaagtactaaatgagcaatattaaaaattaatataatattaaaatataggtgttataaaaattgaaaacactggtggagtgtggtggctcacagctataatcccaacactttgggaagccgagccaagaggattacttgaggccaggagattgagaccagtctggaaaacagagtgagaccctatctctacaaaaaatacaaaacattagctgggcagagtggcatacatctgcagtcctggctactctggaggctggggtgttgggattgtttgagcccaggagttcgagattacaatgagctatgattgtgccattgcagtccagcctgggttatggagctgtctccaaaaaaaaaagaaaaaattgaaacaaacgacttttccttggttgttggagattggtatatattgtcatggaagatcaaaagtaaaattatgagcagagaggaggcagagcaaaatggctgaatagaagccaccaggccaggtgtggtggctcacaccagtaatcagcactttggaaggccgaggtgagcagatcacctgaggccaggagttaaaagatcagactggtcaatatggtgaaaccccgtttctactaaaaatacaaaaattagccaggcatggtggcacacgcctgtaatcccagctactggggagtcagaggcaggagaatcgcttgaacctgggaggtggaggttgcagtgagccaagatcgtgacactgcactccagtctgggctacagaacaagactctgtctcaaaaaaaaaaaaaaaagaaaagaagccaccagcagtcatccagtcacctccttctgggaacaccagattgaacaactatgcacatgaaaaagcacctttatgagaaccagaagcagagatgagtgatcatagtacytagttttaaaatcataataaggaaagaggtactgaagagagtaggaaagactcgtcccccattccctggtagcagctgtgggccactgagatcatatctgtgtgcttggggaagggagagtgcmgggattatcagacattgcgttagaactcagtgccctgtcacagtggaatgcaacacagggtggaactcagctggtgcccattgagggagcattaagaccagccctagtcagaagtgaatcgtctatctcagcagtgggaacctgagttgtggcaagccttwctctggggtccttgataaacttgacagacagttgtattagtctgttctcacactgctataaagaaatacctgagactgggtaatttatggagaaaagaggtttaactggctcacggttctgcaggctgtacaggaagcatagtggcttctacttctggggaggcctcaggaaacttacaaccatggcggaaggcaaatgggaaacagaaacatcttacatgtccagagcaggagcaagcagttgrgggaggtgccatacacttgtaaacaagcaaatctcatgagaactcactattgcgatgatagcaccaagggggatggcgttaaaccatgagaaactgcttccattatgtaaccaccttccaccaggtcccatctccaacattggggattacaattcaacatcatatttgagtgaggacacagacccaaatcatatcagcagtctaggacacaaggactacaattcctggcctagttttggtgctgtactatgctgggctcggagatggtggacttgcggtgcctatgacctagtgagacaccagctgggatgcccaagtgagtgcctgtgtcacccctcctttaaccctagggagtgcagctcgcaattctaagaaaacctctttctccctgcttgaagaaaggagaagggagcgtaaacacgactttgttcttccaacttggataccaactcagccacagtagatagaggaccaggcagagttctgagacctccatttcaggttttagctcctggatgacatttctagacacatcctaggccagaaggaaatccagttttgaagggaaatacctggtccctgcaggatttattacttgctgacaaaagtgccttgggccctgaataatcagcagtagtagctaagcagtactcactgctggcttcagataagattcagagctattctggcttcaggtgtgacccagcacattccagctgtggtggctacgggtaatgactttttctacttgaaaggagagaggagactaaggggattttgttttgcagcttgtgtaacagctcagccacagcagggtagagcactaagtgggctcatggggcccccacttttaggccctggctcctgggtggcatttctggatctgccctgggccagagggaagcccagcatcctaaaaggagagagactcaggactggcagtattcagcataagctggccgaaaagcccttgggccttgagtgaacaatggtggtagccagaccatactcccttcagggttcgggcagtggtggccatagggtgagacttctctacttgaggaaaagggagagaagactgggaagaactttgtcttgtggctcaggtgccggctcagccacagtggaatagagcagcaggtagattcctaaggtccctaattcccaaccctggctcctgaatggcatctctggacctgcccaaggccaggagcaacttgctcccctgaagcaaacaggacataagcctggctggatttgtcacctgctgattgtagagcccttggacttgagagaacatagatggggtagccaggcattggtcactgtagtccttagtgagacctcgtgtgtgctggctttcaatctaatccaaagcaatacaactagtggtgaccacagggatgcttgttttacctctcccccagctccaggcagctctgcacacagagactctgttaagggaagaggacgaaaatgtctgccagggaatccagggaattctgsatattacccaagaccaccaacgtgtacctcaataagccagcaagcactacagcattactgggcttggggtacttcctaatgcagatattaccgcaatgaccaaagaccaaagatcataacaccctttgaatacttggaaagccttcccaagaatgatgagtacaaacaagtctagactgtgaagactacaataaatgcttaattcttcaatgcccaggcagcagcgaatatccataagcatgaaaaccatccaggaatacatgatctcaccaaacaaactaaataaagcaccagtgaccagtactggagaggcagagatatgtaacctttcagagaattcaaaataactgtattgagaaaacccaaagacatgatgtaatcctattcctattccagagaaggaattcagtattctatgagataattttaacaaagaratacaaataattaaaaagatcaagcagggcaggtgcagtagctcatgcctataatcccagcactttgggaggctaagacaggtggattgcttgaggtcagaagttcgagaccatcctgggcaacatggtaaaaccctgtctctactaaaaatacaaaaaattagctgggtgcagtggcacatgcccatagtcccagctactcagaaggctgaggtgggtggatcacttgagtctgggagacagatgttgcagtgagctgagattgcaccactgcactcaaaatattttttgaaaagcagaaattctggagttgacaaatgcagttgacacactgaacaatgcatcagagtctattaacagcaaaaatgatcaagcagaagaattagtgagcttgaagatgggctatttaaaaatatacggtcaaaggagacaaaagaaatgagaataaagaagaatgaagtatgtttacaagatctagaatgtagcctcataagggcaaatctgagactctgaactcaaaaaggagataaagagagagatggggtagaaagtttattcaaagaggtaatagagaacttcccaaagcttagagaaagttatcagtatttaagtacaataaggttatacaacaactaagcaggtttaacccaaataagactacctgaagacatttaataatcaaactcccaaaggtcaaggataaagaaaggatcctaaaagcagcaagagaaaagaaacaaataacatacaatggagctcaatacatctggcagccaacttttcagtaaaaaccttacaggtcaggagacagtggcatgacrtatttaacatgctgaaagaaaaaatacatatattagaatagtatatctggcaaaaatgtccttcaaacataaaggagaaatactttcccaggcaaaatacctgagggacttcattgatctcagacctgttgtatgaraaatgctaaagggagtttttaagtgtgaaagaaaaggacattaatgaacaataagaaatcatctgaagatacagaacttactggtaataatatgtacacaggaaaacaaagaatactgtcacacwgaagttayggtgtgtaaactacttatatcttaagtagaaagacaaaaagatgaactgatcaagaataataactaaaacaattttttaagacatagtacaataagatataaatagaaacaacacaaagttaaaaagtggggagacagtgtaaagtttttattagcagagctatattaaccaaaacagcatcatagtggcataaaaatagacacacagaccaatgaacacaatagagaatccagaagtaaatctgtacatccacagtgaactcattttcagcagagatgccaagaacatacagtgaggaaaagacagtctctttaataaatggtgctgggaaaactggatatccatatgtagaaaaatgaaactggacccgtctctcaccatatacaaaaatgaaataaaaatagactgaagacttaaatataagaattcagactgtaagtactaaaggacatctttggagaaacacttcagtactttgaactgggcaaaaatttccccacaagcacaaacagccaaagcaaaaatggacaaataggattacatcatgttgaaaagcttgtgtgtgacaacaaaagaaggcacacaaacagcaaagaagtaaatgaaaaggtactcacgatcactgattatattagtctgttctcatgctgctgataaagacatacctgagacagggcaattttcaaaagaaagaggtttaatggacttaacagttccacatggctgcagaggcctcacaatcatggtggaaggcaaggaggagcaagtcatatcttacatggatggcagcaggcaaaaaagagagagcttgtgcagggaaactcccgtttttattttttaattttttaaattttttgttatactttaagttttagggtacatgtacacaacgtacaggtttgttacatatgtatatatgtgccatgttggtgtgctgcacccattaactcatcatttaacattaggtatatctcctaatgctatccctcccccctccccccaccccacatcaggccctggtgtgtgatgttccccttcctgtgtccatgtgttctcattgttcagttcccacctatgagtgggaacatgcggtgtttggtcttttgtccttgcgatagtttactgagaatgatggtttccagcttcgtccatgtccctacaaaggacatgaactcatcaatttttatggctgcatagtattccatggtgtatatgtgccacattttcttaatccagtctatcattgttggacatttgggttggtcccaagtctttgctattgtgaatagtgccgcaataaacatacgtgtgcatgtgtctttagagaagcatgattcgtaatcctttgggtatatacccagtaatgggatggctgggtcaaatggtatttctagttctagattcctgaggaatcgccacactgacttccacaatggttgaactagtttacrgtcccaccaacagtgtaaaagtgttcctatttctccacatcctctccaacacctgttgtttcctgattttttaatgattgccattctaactggtgtgagatggtatctcattgtggttttgatttgcatttctctgatggccagtgatgatgagcattttttcatgtgtcttttggctgcataaatgtcttctcttgagaagtgtctgttcatatcctttgcccacttgttgatggggttgtttgtttttttcttgtaaatttgtttgagttctgtgtagattctggattttagccctttgtcagatgagtagattgcaaaaattttctcccattctgtaggttgcctgttcactctgatggtagtttcttttgctgtgcagaagctctttagtttaattagatcccatttgtcaattttggcttttgttgccattgcttttggtgttttagacatgaagtccttgcccatgcctatgtcctgaatggtattgcctaggttttcttctggggtttttatggttttaggtctaacatttaagtctttaatccatcttgaattaatttttgtataaggtgtaaggaagggatccagtttcagctttctacgtatggctagccagttttcccagcaccatttattaaatagggaatcctttccccatttcttgtttttgtcaggtttgtcaaagatcagatagttgtagatatgcggcattatttctgagggctctgttctgttccattggtctatatctctgttttggtaccagtaccatgctgttttggttactgtagccttgtagtatagtttgaagtcaggtagcatgatgcctccagctttgttcttttggcttaggattgtcttggcaatgtggctcttttttggttccatatgaactttaaagtagttttttccaattctgtaaagaaagtcattggtagcttgatggggatggcattgaatctataaattaccttgggcagtatggccattttcacgatactgattcttcctacccatgagcatggaatgttcttccatttgtttgtatcctcttttatttcattgagcagtggtttgtagttctccttgaagaggtccttcacgtccctttgtaagttggattcctaggtattttattctcttttaagcaattgtgaatgggagttcattcatgatttggctgtttgtctgttattggtgtataagaatgcctgtgatttttgcccattgattttgtatcctgagactttgctgaagttgcctatcagcttaaggagattttgagctgagacgatggggttttctagatatacaatcatgtcatctgcaaacagggacaatttgacttcctcttttcctaattgaatgccctttatttccttctcctgcctgattgccctggccagaacttccaacactatgttgaataggagtggtgagagagggcatccctgtcttgtgccagttttcaaagggaatgtttccagtttttgtccattcagtatgatattggctgtgggtgtgtcatagatagctcttattattttgagatacgtcccatcaatacctaatttattgagagtttttagcatgaaggttgttgaatgttgtcaaaggccttttctgcatctattgagataatgtggtttttgttgttggttctgtttatatgctggattacgtgtattgttttttgtatgttgaaccagccttgcatcccagggatgaagcccacttgatcatggtggataagctttttgatgtgctgctggattcggtttgccagtattttattgaggttttttgcatcgatgttcatcagggatgttggtgtaaaattctctttttttgttgtgtctctgccaggctttgttatcaggatgatgctggcctcatcaaatgagttagggaggattccctcattttctattgattggaatagtttcagaggaaatggtaccagctcctccttgtacctctggtagaattcggctgtgaattcgtctggtcctggactgtttttggttggtaagctgttaattattgcctcaatttcagagcctgttattggtctattcagagattcagcttcttcatcgtttagtcttggaaggatgtatgtgtcaaggaatttatccatttcttgtagattttctagtttattttcgtagaggtgtttatagtattctatgatggtagtttgtatttctgtgggattggtggtgatatcccctttatcattttttgttgtgtctgttttattcttctttgttttcttctttgttagtcttgctagtggtctatcaattttgttgatcttttcagaaaaccaactcctggattcattgattttttgaaggcttttttgtgtctctatctccttcagttctgctctgatcttagttatttcttaccttctgctagcttttgaatgtgtttgctcttgcttctctagttcttttaattgtgatgttagggtgtcaattttagatctttcttgctttctcttgtgggcatctagtgctataaatttccgtctacacactgctttaaatgtgtcctggagattctggtatgttgtgtctttgttctctttggtttgaaagaacatttttatttctgccttcatttcgttatgtacccagtagtcattcaggagcaggttgttcagtttccatgtagttgagtggttttgaatgagtttcttaatcctggaaactcccatttttaaaaccatcagatctcaggagactcattcactatcatgagatcggctcaggaaggacccgcccctataattcaatcacctccccactgggttcctcccaccacatgtgggaattgtggtagttacaattcaagatgagatttgggtggggacacagccaaacagtatcactgattatgagaaacattaaaatcagaactacaaggagatatctcattccagctaaatggcttgtgtccaaaagacaggcaacaacacactggtgaggatgtgaagaaaagggaccccatgtaccatgctgatgggattgtaaagtagtataatcactatggaggatggtttggaggttcttcaaaaaactaaaaatagggctaccatgtgctccagcaatattactgctatgtgtatacccaaaaggaaggaaatcagtatatcaaagagatgtctacactcttgtgttcattgtagcactattcacaatagctaagatttggaagcaagctaagtgtccatcaagagatgactggataaaatgtggtacattgtacaataaaaatggaatttaatttggagaaaatcagtcaaaactatacagttatatggcaattaaacatgctcctgaatgacttcttagtaaataatgaaattaaggcagaaaacaagaagttatttgaaactaatgagaacaaagatacaacatactagaatctctggggcacagatatggcagcattaagagggaaatttctggcactatacactcacatcaaaaattagaaagttctcaacctaatgtcacaactagaaaaactagacaggtaagggcaaaccaacctcaaagctagcagaagacaaaaaaaataaccaaagtcagagctgaactgaaggagattgaaacatgaaaaactggccaggcatggtggctcatgcctataatcccagcgctttgggaggctgaggtgggcagatcacagggtcaggagtttaagaccagcctggccaacatagtgaaaccccatctgtactaaaaaaatacaaaaaataagccaggcgtggtggcgggtgcctgcaatcccagctattcaggaggctgaggcaggagaatcgcctgattccwggaggtggaggttgcagtgagctgagattatgccattgcactcyagcccgggcaataatagtgtgagactcttttgtctcaaaaaaaaaaaaaaaaaagaaacatggaaaaccatacaaggaccaatgaatccaggagatagtttttttgaaagaattaataatatagactgttaagtacacaaagaagaaaagagagaagatccaaataaacaaaattagaattgagaaagagaatgttaccgctgaccccacagaaatacagataaccatcagagactactatgagtacctctatatatacaaactagaaactccagaagaaatggctaaattcctggacacatacattctcccaagactgagccaggaagaaattgaatccctgaacagaccgataatgagctctaaaactgaatcagtaataaatagcctaccaatcccccataaaagcccaggatgagawagattcttggctgaattccaccagatgtataaagaagagctggtaccattcctactgaagatattccaaaaaattgagaagggatttcttcccaactcattctatgaaaccagtgttattctgataccaaaattggcagagatacaacaacaacaatagcaataagagttcaggccaatatctttcatgaacataaatgcaaaaatcctcagcaaaatactagcaaatccaatccagcagcatatcaaaatggtaatccaccatgatcaagtaggctctatccctgggatgcaaagttggctcaaaatacacaaatcaataaatgtgattcattacataatagaactaaagacaaaaaccatgtgattatctcaatagatgcagaaaaagcttttgataaaaattgaacatcctttcatgttaaaaactcaataaattaggcattgaaggaatgcaaataataagagccaactatgacaaaccctcagccaacatcatactgaatgggcaaagctggaagcattcttcttgaaaactggcaaaagaccagaatgccctctcctaccactcctattaaacataatactggaagttccagccagggcaatcaggcaagaaaaagaaataaaaggcacccaaataggcaaagaggaagtcagactatccgtttgcagaaaacatggttctatatttagaaaaccccatactcctggccaaaaagcagcttaagcaacttgagctgataaacaactttagcaaagtttcaggatacaaaatcaatgtacaaaaattagtagcatttctttacaccaacatgcaagtgaagagccgtatcaggaatgcaatcccattcacaattgccagaaaaagaataaaatacctaggagtacagctaactagggaggtaaaagatctctacaatgagaattacaaacactgctcaaagaaattagagatgatacaaagaaatgagaaaacatttcgtgttcactgataggaagaacccaatattttttaaaatggccatactcctcaacacaatttgcgattcagtgtgattctaatcaaactaccaatagcattattcacagaactagaaaaaaacttttaaaattcatatggaaccaaaaaagagctcaagttgccaaagcaatcctaagcttaaagaacaaacctggaggcataatgttacccgacttcaaactacacccacagggctgtagtaaccaaaacagtatggtactggtacaaaaacaggcacataaaccaatggaacagaatagagagcccagaaataatgccacacacctacaaccatctgatctttgacacagctggcaaaaacaagcaatggggaaaggactccctattctacaaatgatgctgggataactggctaggtatatgtggaagactgaaactggacccctttcttacatcatatataaaagccaactcaagaatataacgctgtaaatgcaaaatctaaaactataataccctggaagatgacctaggcaataccattctggacataggaactggcaaatattttatgacaaagacaccaaaagcaatttcaaccaaagcaaaaattgagaaatgggatctaattaaactaaagagcttctgcacagcaagagaaactatcaacagagtaaacagacaatctacaaaatatgagaaaatatttgcaaactgtgcttctgacaaaggtctactatccagaatctgtaaggaaaattaaaattaaacaaattttataagcaaaacccaaacacatgaacagatgtttttcaaaagaagacatacatgcagccaacaagcatatgaaaaaatgctgtacrtcagtaataattagagaaatgcaaatcagaaccacagcgtgatatcttatattagtcagaatggctattattttaaaaatcaaaaaattacagatgctggaggggttatagagaagagggaacacctatacactgctggtrggagtgtaaattagttcacccattgtggaaatcagtgtggcaattcctcaaagaacttagaactacttttaaacccagccatcacattattgggtatatacaccaaggaatataaatcgttctaccataaaacatatgcacatgtatgttcattgcagcactattcacaatagcaaagacatggagtcaagcacccatgaatggcagactgggtaaagaaaatggagtgtatatacaccatgaaatattatgcagtcataaaaaacaagatcatgtccttttcagcaacatggatggaactgaagaccattattcttagcaaactagcacaggaacagaaaaccaaatactgcatgtgttctctcttatgagtgggagctaagtaacaasgcacgtggacacaacaaagggaacaacagacactgggacaaacttgaggtcagagggtgggaggaggaacaggatcagaaaaaatacctatcgggtactatgcttaatatctgggtgacaaaataatctgtacaccaaacccccatgagctgagtttacctgtattccaaacgtgtatatgcattcctgaacctaaagtgaaagttaaaagagaaatttttttaaaaaagaaaatgtggtacatatataaaatggagtactattaagccataaaaaagaatgagatcctgtcatttgcaacaacgtagmtggaactagaggacatttattaagtgaaataagccaggcacagaaagacaaacttcatatattctcacttatttgtgggagctaaaaattaaacaattgaactcatgaagatagagagtagagtgatggttaccagaggttaggaagggttccggggaggagtggagttgttaatggttgcaaaaatatacagaatgactaggacctagtatttgatagcaaaatagcatgactacagtcaactataatttattgtacttytcacaataactaaaagagtataactggattgtttataacacaaaggataaatggtcaggtgatggatatcctatttattgtgatgtgattgttacatattatatgcctgtatcaaaatatgtaccccataaatatatacacttactatgtacccctaaaattaaaaattaaaaagtgaaattatgagcaattcataaggtattaaatgtagaagtagaatatataaatgttatgtacatttttaaattattttatgtatttattaaaatagcatttagctatgttrcccaggctggtcttgaattacttggctcaagtaatcctcctgcctttatctttaatgttttcacatgagaggattgactttgtacttgtagttttctatatagcaaatttttacaaaaagtctaagcataatttgtattaaaaagtatttctaatttaaatatgttttaactccaattttatttcagaaatcacgtaaccaccttgaagatgaaagataaatcattatcattaaaatttttaattttgtgtatttctaggtgtgtgtgtgtaactttaagacgctattatttcctcccagatatggattgtcaatgcagagccttttggatctgtccttttcttcatttatggatgaggcagctgagatttggagagtttgtgactagcccaaagctcctacgaactcaggctgtattttcctggtatagttgaacaaaaaattttcaaagtgatttttttactatgctactttttattagtgcataccacaaaatagaccaattaacacttttgaactaattgaaaattttcttaatgccattaatatgtgttgcagtctgatgcatttataaagtttcacctgtttttcttttatttatttattttaaattaaaaamatgtttttaaaaatgtttgtgggtacatagtaggtgtatatatttatggggtacatgagattatgtatacaggcatgcaatgtgaaataagcacatcatggagaatggggtatccattttcttatacatttatactttgagtcacaatcaatcaattacattctttaagttatttaaaaattattattgactatagttgccctgttgtcctgtcaatagtaggtcttatttattctttttaactcttttttgtacctattaactatccctacttaccctactacccttcccagcctctggtaactatccttctactgtctagctccatgagttcaattgttttgattttgagatcccacaaataagtgagaatatgtgatatttgtttttctgtgtctggcttatttcacttaacatagcaatctccagttccattcatgttgttgcaaatgacagtatcacctttttttatggctgaatgtatccattgtgtatatgtaccacctttttttattcattcatctgttaatgtacatttaggtgacttccaaatcttggctattgtaaataatgctgcaataaacatggcagatatctgttcgatacactggtttcatttctttggggtatgtacctaggggagggattgccaggtcgtatggtggctcaatttttagtttttttgaggaatctccagactgttctccatagtggttctgctaattcacattcccaccaacagtatacaagggttcattcttctccacatccttgccagcgtttgttattgcctgtcttggatataagccattttaactggggtgacatgatgtcttattgtagttttgatttagatttctttaatgatcagtgatgttgagcactctttcatatgcctatttaccatttgtatgtcttcttttgagaaatgtctattcaaatctttgcccattttttgatctaattattggattttcccctgtagagctgtttgagctcttcatatatactctggttattaatcccttgtcagatgggtagttggcaaatattttctcttactctgtgggttgtctcttctctttgttgagtgtatcctttgctgtgcagaagcattttgacacttgacgtgatcccatttgtccatttttgctttggatgtctgtgcttgtggggtattactcaagaaatctttgcccagtccaatgtcctggagagtttccctactgttttcttttagtataatagtttcatagcttgaggtttagatgtaagtttttttaatccattttgatttgatttttatatatggtgagacattattatttttgattaattcatcatttagtctttctacttatttaattcatttatcgttttgtctttctacaccacagttacagtgttataatattctgtgtttttctgtggacttactatatccagtgagttttgtaccttctggtgattatttattgctcattaatgtcctttttgatagaagtattccctttagcatttcttrtaggaagctctggtattgatgaaacccctcagctttttttttgtctgggaaattatttcttcttcatgtttgaaggatcttttcactagatatgctattcaagtttaaaaattttttcctttagtgctttaaatatatcaggccactctctcctgtcctgtaaggttttcactgaaaagytggctgccagacatcttcttgcaggatccttaaggtgtcacttttctggccagaaacctctttggcctgtggcacctttgcctgagtttttcttgggactgttggtctcgttccacacactggacctgcaggccgtgcttggctcaggctactggtctggatcccatgcctgccaagggtgaaccagacatggagcggcaagaggtatgtgagctagtgagtgtgaggtgcagccactgcacacagtcaggcacaccagctgctgcagcagggcgggcagctccaggtgcagcatgggcactggctctttgtgaggctgcagctagaccacactgcaggcagcttccatagctgtcactggggaacgtggtgtcgcctagcagcttagatactccaggaacctcaggccccaaagagggagtcacagccctggcttggggcactcccaagtctgggctccctgaagagttgcagctcttctgttcacccacaatgtggtgagcatggggtttgtttcagccctgtttgtgttacagctgtttcagtcctgccatttggcaggtcccaagttctcctgagtccaggaagaatgaggtatgtggacaagtggagggtgagcaaggtgaagaggagcatcactgagtgacagaaaagctcagatgagaccctggagtgggtagctcctctctgcaacctggtcatcatgttaagtgtttagccctcagcagataggaggccctggagtgggtagttcctctctgcgggtggtcatcccaacatctgcagctgtcaacagagaggaggccctggaatggmtagctcctctctgcagctgatcaccccgatgtctgtagctctcagcagagaggagttcctggagtgggtagttcctctttgcagcttgttgtcctggtgtctgctcagctctggctgagcccagggcttttatgggcctcagaggggaggaagtgcctaccaatttgtccatgagcaggtcctgaaaaggcaccataaattccctctctggtctgcaagactggcagcctggcctcctgcctttaggccctgcctgacctgaaggtggggcctcagtggggacctgctcccttctgcccaggctattcatgccaaggggcgcctgcaggccagtgctgagctgccctcagtcccccacggcttccctcccatgctcattggtgcccaaaatccagagggggctgaggtggcgggggctggcatgtcagcactgccctgatcatggcacacacccagctaggctatgacagtgcctggactcagtcccaaacttgcttcaagataggagcaggcactaggagcgggagcagacacttctgagcctgttggggcaggaggagccttctcagtctccygagagtgcacagatgcccggctctgtaactgtggcttgggtggctgtagctgcacctggcagggtgtggctcctgcctgctccaggagtgggaggcccggrtccacagccacaactctgtcacttgggcagctgcagctgcacctggggaactcccgctccaccaacgtggaaagagcagggctcccactttttcccagcttctgcagggtctgtggagtgtgtagccctggccgtgcttccctgctgtggactgggtgatggcagcaaccactccagatggccgctgctaccattaatattggagctccattgttgtttattttcttttgctgcttttaggatcctttctttatccctgacctttgcaagttttattattaaatgtcttgaagtagtcttctttgggttaaatcagcttggtgttctataaccttcttgtacttggatactgatacctttctctaggtttgagtagttctctgttgttatccctttgaataaactttccacttttatctctttctgcctcctcattaaggccagtaactcttaaatttgcccttttcaggctattttctagatcctrtaggcatacttcattgttttttattttttttcttttgtctyctctgattgtgtattttcaagtagcctgacttcaagctcactgattctttcttctgcttgatcagttctgctgtcaagggactctgctgcattcttcagtatgcccattgcatttttcatctccagaatttttattctttttaattatttcactctctttgtgaactatatctgatagaatttcttctctgagttatcttgcatttctttgagtttcctcaatacagcaattttgaattcttcgtctgaaaggtcacgtgtctctgtttctcccaaatagttacctagtgcctcatttagttcatttagtgagatcatgttttcctggatggtgttgatgcaaatagatgttcttcagtgtctgggcattgaaaggttaggtattatagtcatcactgtttagacttactttagctgtcctttttgggaaggctttctagatatttgaaaggacttggtgttgtgttctaagctgtatctgctttaaggggcaccccaagttcagtaacgctgtggttcttgcagactcatagaggtactgccttgatggtcttggacatgatctgggagaattctctagattaccaggcagagactcttgtactcttctctttctcccaaacatacagaacctctctgtctctctgttctaagccatctaaagccaggggtgaagtgcaacaagcatccctatggccatgaacactatgactacactatgtcagacctgaagccaacacagcacttgatcttgcccaaggcctgctgtaaccactccctggctacactactgcctatatgtactcaaggccctggggctcttcaatcagcaggtgaaagccagccaaggctgtgtccttcccttcagagtggcaaggtccagaagtaccgtctgggagtcagggaatagagtgaaaaaccttagaagtctccytggggttcttttgtattgtggctgagctggcactcaaaccacaagattcagtccttcccaatgtccctccccatttcaaaggccaccgccaccccaggccacaaggaagtactaywagactacccctgatgtttcttttaggcccaaggtctcttaagtctgcttttgttaaatgctgcctggcctaggactcacccttcaggacagtgggctcccctctggtccagggtaggtctaaaaatgccatccaagagccaagtcatagaactggggactctaagaacctgcttggtgctgtaccccactgtggctgtgctggtatctgaaaccagcaagtctccaaggctgacccaaggtcctcgatgtagtacctgggtgtttctgctggttactcagggctcaagtgctcttcaattagcagattatgaatgctgccaggatgtgtcattgtcttcaaggcagggggtttccttctggaccagggtgtatctagaaatgtcatctgggagctasgccctgaaacaggtgcctgacaactctgaccattgcgcagtcttgccttgggtgaactgataccttagatgtaagacagagtcctcccgactcttccctctcctctcctyaaacagaaggaaggggtctattttggagcagggagctgtgtagcatggggttaggagagaggtgatgccaacactcccttggcagccccacagtggactgtgcccttccagtccactgtcgctgagcctagttcaacaccakgattcatccaagagttgcaatccttatggcctagactgccttcaagcttacttggagacaagagtgctacaggccttggtggtgaggtttgcaagtacttaagttcaaactgctgggattagtgattcccctctggctagggctgattttgatgttccctctgtaggcgggcttagctcaatttggtctggctttctggttctaacagaaaagcactgagttctgtgccttacaattgctgaggtcagggaggggtggcactggcaattcaggactgattttttgtctcttcagtgcctctttccgggatatgaagttcaaaccaagtactrtgaaagctcacctgatttttggttctcatgaaggtatccttttcatgtgtgtagaaggttgttaaattgctgttcttgttggggggacaattggtggagctttctatttctccatcatgctctaccctctgtctcacctgtttttcttctaaaaacaatcttctatttatcagaataatatcaagctctatagctagttcaccaaactgaaaacagatggtttttataatagaggcattgatgcatattaacagcagtagcccaaatagtgtgttataaatgtggcttatgtttatcaacataaaggtttggtgatttcattatagtttctagtcagtcccttttgtaactcattaaaaaggtctgtctgaccccattgtggagtattcttacaactgtatatgacttcactaagatgttttcattagtaaaataactgagacattggaaatattgtaaaaataataagttagctagaagaaaggaaaatgagtcaaagccaatgtgagaatttagtcacccatataagggattgtttagatcaaacaggtatgataaagatgctgctaacgatggaatttaaaaactttattgagctctctttgtataacatacctttgattcataaactggaaggttagtcttgacaacattttgatatgacattagattttaactagaaaataaaagaattgagcataattattcataactaataaaattatatttttcctttttcaaattagtttaaggactgccattttacacccataaacaaataaaagttttcaggatctgcttttccgttcttcacttcactgtgcttggattccctccattgtgcttggattccctccctcttatattctttctttatatgcttatgagagaacaaaaattctaagtgtgtaaaatagctgactgtaaatgaggtattaccatcttggggaaaggcttatcatcctagattttggttcattggccaccttccaggcttcctactaaattattggcagcaaagcactaatgtgcctcccagccaacaagtgataccaacctatgtcttttcttttaggggtagaaaatagtcaaaattttaaactctagaattctcaaactataaatctgggtcaggtttgtagccagcaaaatgaaatttgtaggtactgtttaaattgtctaaaagctaacatgttcaggaacattttgggcaatgtaaacttaaatgaatgaataaataaaccaacaaatttagatctttaattttagtaaggctaattgttattggtaacatttgatagtgtcctttgagaaactgatactgaagaaacaaaaaaaatttaatgattactttcttctttctagaatgtattattatagatgattttaaatgatatttggtttttgaaaattatgaaataaggtatgtgaaacctccaaataaattgttgtagcaacaagaaattaatgctattttggaactatagtagcttgataaccttttataatgtattttaaaaaaattaatatgtggagtaggcttataaaattgtattttttcccaacatgatgaaaacctatttttatcccattaataggcatgaatgttggaatcagagacttatttaacagaagtctttggctattaatgaataaactataaaatgtgatggggttcgagtcatgtgctctcttcagagtgaaaaatgctatgacttaaccctaatctctgtgatcatcctgtttttcctgtaaaaattccattttttttttctccttccaacagtattccacaaagtaggtgaaacctttctctggcttccttctcaatgtatgacctaactgcataaaaatttttatcaattgttcataacttttaaatttattttttggctagctaacttgttgttaaggtgagatttttttccatataggagacccattatattcagagatttattttttttaatttttgagaatttgaggacactgtaccaacttacacttttagtatgctatgaagtatgaagctacttcctatggtagagaaaatggaattggaggctttcagggtaaatgttttcaatgtagtagattgtgtatatttcaaatcctagaagaccaatgaaagttgagtgaaaataatgacacattaccccagatgcataaggagcataaaagttctcaaatacgttttccacagagcagtcttcccactagatattgattgtttgattgttcctcaagttaaacattgaattaccatgggaactagcaattccactcctagrtatatacaaaaattcaaacagatacttaaatgcctgtacacaaatgttcgtagcttcactatttacaatagccaaaaggcaaaaaacaacccaatcatctatcaatggatgaatgagtaaacaaaatatggtatatacatacaatggaacattgttcagccataaaaaggatgaagtactaatttatacttgctgccacatggatgaacctgtgaacatgttatcctaagtaaagaagccagacacaaaaggggacgtattrtatgattccatttatatgaaatatccagatcaagtaaattcactgatagagaagcaaattgccagggttaggggagggaagaaaacagtgtggctgcttaatagttataggtttttctgttggggtggtgagaatgttttggaactagatagagggattagttctgaacatgctaaatgccactgaattgtacacttcaaaatggtaaattttatgttatgtggattttccctcaagtttttaagaaagaataactagttacactagtwtgtaggatgaatgctgtcaatatcagtgtctttacatacagtatatttttgaaaatgtttgctatggagtcagagtaccttattccagaattagagaaagttctccaaaaattagatctcttactattttgctttgttgcatgatttggtttttgttgtttgtgtttgtttttcactgtttgcaaatcagaaaaactaacaatgtttagaattccagattgagagaaattttttttggtctggaatttgcataatgacttttgatggacaaaataaaaaagttttagaagaccatatgataaaagaaaaaattaaacttgttatcattgattgctgaggagtttaataaaatcttcatagtgtttaaggatcagtggttgacagactatggaatttgtcagtattaaaaatgtactaatcatctgcccaacaaaaaagatgaacaagggaattaaaagagctttagtatttggtgctcttttttgatagaaaatgagtagatttagtgttcatttgccacatatggtttcattaatagcaattcagcttttctctgtcccatttcaggctttacacttagagaggtaaaaccagcccccatcagatttaccatgagatttctgtgtgtactgtttgttcagaggttacctttcaacactttctaagctgtattatctgtgttaagaaatgctttatttagaattaatttatttcatgtttatggtaagtaaatgacatgttaatattatgtttgttaagaaagtatactatatccaaataaggctgttaattatctatctctaacaacaatgaaattaacttagagtcagacttaacctgaagtgaaaacacactgcattcttcaggttaacccttttggctctctttcggttctcatttaagacctggaactcctacctgccttttgccctgtagatgaggaattttcacctggctcctttgtctatcagcyacttttgttagtcttatgaccagtgactgctggagatagagcacctggtatatgtagcatgttttctgaaatattttgctttaggttatcaattaatgaaatctccactcatgttagtataagactaattacagaataacattgagagatactaatagagaatgggtatatgcctagaaaccatagaacagcttaagtttaaataagagagagcattggaatgaggcagatacacaaaatatgatttctgctccacttctttctcttattcatctgtgaatcattaccatattataccatggcctttttctagcagcactctctttgggagtccagccaccatatgatactattcctgaaggttctattcttattctctttctttggcagaaacaccccagggagggagccaacttgagttcccctttcccaattaccttctaactatttcccctatcccacatccacagcaattcccctcaaggcttttctctgactaataagtccagatgggcccaacctccttatacttttacttttaggttatatttgtcttctatatctttaatgagctcttcactatttcacatttgcctgtgtttaaaaatgattgggagaacgcaatgaataatttccctgtacaacttttatttctgaagggaaaaccattgtgaagattgtgcaccaatgtatatagactcatagttcatcacgcttatgtgctgtctgctctccatcagtatttttcttagggttgccctgaaagtattttccccacctatgctattctaatagtcgagacatacagagtttgtctttaagatactgaatccttattaaatgtagtttgattagaaatcatgtctcrgaaaatattttatgactttagatatttagtaaaatcttattaccttgtgatggataacttaataaataaaaagtcrgaatttttattattaaactataaaatatttttatattgaagacatttgttctcttgctcctttctcttttaggtactaacctcagggtttggcatctcaggcatcatccacatcccgtgatcaaaccttcttatatggtcaccttatataacacagcaatgctgctggcccaatgccaacaaatactacaccttaaaaatgaaacaaaatgataaatccttcttatttgacgtgccctctaaaactagtatcgtcatatttccttagcagctggactaaggatttaatgagttgagaaagagaggaaagggttggtaggaaaactgagtggcagtgtagggtggtgcaagctgcctacatggatcagctccatcaataagcaagagatgacgatgagagcagtgcaaaaggaccaaccaggacagcattgtcagaaagtataggtggaacttcagagaatcaaaaggagctcaactcaactctttccttagttcacaactcataggattgcttattaactttaaatcatcaaacaggtctcctttcagttacctattctgtgagtcctctctaatactagcttaagataagaattgtagttttactttaatgtatcacttacttctctgtcagatcaagcaaggagggtattcagccttaactcctttaggatcttaagtagtcatattttttcttattcattctgatttaagattatgaaaatcctgaaaacgtgattttatatttcagaatagactacatgtaattcaatctgtaagttcaaggacattggaatcaatataatttatggttctttcttctcctcaacatgaataacttcaaattcagtgaagtgttcrgcttttcttacccaaatggtatacttatccgattcacttcaatagttgcctattttccctttcagaaatgtctgttctctcaccaggagactaaaacatygtgcagatgtacagttggatacaatgatgccaatataatatatgcactgttcaataatttattttgtatctggagtgatgcatctgtttccttcttgtgggagggggtttgagcttcatttcaatgtcattttaggtactggtccaattcttccatccagttaaccaaaaatgaaaatttccatctgttcaattggcattcggaggaatgttttatctctgaagcacattatgacaactaaaattgacagcataatctgtctgacttttttctcttttattccctcttcagattctcttgagatttaacaagagaggattcttttttacagctcctaagattataggacttactctttcttctgtctagtaactgtagaccaatagaacatgaatggctgtccactattcactgctttattatatatttttttctgtccatttgtgactctacaggaaatatacttgttagcatgctattaacagaacaatgcaaacatagcattctctttccataaatgtctgccagtactatttggcattctgttgaatgcacagattctctgcaatcaacgtttggaaggtacagttacaggctgatttttattgatcrttccgtactttagaaaactggctaagaaggcctttggaatatactgcttctgaagttttttaactcttakaattctaagaatattgtctcaagttttgttgctgaaatggcaaaaatgtttcttttttattactatcaatattccaatttaaaatttaaataaggagaactctttttatttatgagccaggtaaaatttttctggtacgctgaataaaacaaggtactatccatcaaataaagggttatatccttggggcatcatgattagrataagataactaatttttatggcagtcccctatgtgaaatgtaaatagcaatacaccagaacttcagatatgttgaatcccagaaaaatatcctggatggctgggtttctttgaaaaaaaatctatacttttttttttttttttttttaagagacaggatcttgctctgtcacccaggctggagtgcagtggcatgatcgtagctcactgcaacctcaaactcctggtctcaagtgattcttccttctcccatttcagcctcctgagtagttaggactacaggcatgtgccaccatgcctggctattttttatttatttattttttattaggagattgaggtcttactctgttgcccaggttggtcctgaagctctgtcctcaagtgatccttccaccttggcctcccaaagtgctgagattacaagcacgagctactgtgcccagccctaaaatctgtacttttagtaaacatctccgatgcctgtatcctttcttttttttcttgaaaacattgcatgatagtttacactgtaataacgaccactgcttacttgcctrtccygtaaaatatttgtgcctttatagtcctttgaagtttattaggctatttgcatctatgttatttatttatcctatgtggctgtgttcactaagttttctgtcttmtttgtttttattttttctcttttcccgtgctattggcttacagatatcccttctatgttcatatatctcatgtactttcttatagcaaacatgatttcctgtgaattaaatcaatgagttagtaccatattccaattatattatgctacccaatgtaaaggataacacttaaaaaactgaaattgatttttttaataatacaagagtctgatataatggataaccaactgtaaactactattgaggagtatttcaaaagctttaattgtgaaatctactggagtatcatataagggaataaaagagcattcttgagattgttaaacattagaactgaaggattttagatgtttcagacattttttagctggaataacatgaaaatatgtatatttgtatattttatgggaggctgagtaaatttaagtctactattttaggtctttgggatctcactgagaaattctccagactagcatggtaactggcacttttacaggtaaataaacattgtgactctaccagtcatagagagagacatggaaggagctgtttcagatccaagacacatacaaaagaagttaaaacttttctgagataaagtgaattactcatagcattsacccaaaatagtccatttaagcccctagaactcttaatccagcaactggaatactaaatcctatatggctataaaatgtactttcacttcaacagggcttgtaaatttattcttttttatttatttatttatttttcttattattatagtttaagttctagggtacgtgtgcacaatatgcaggtttgttacatgtgtatacatgtgccatgttggtttgctgcacccattaacttgtcatttacattaggtaattctcctaatgctatccctccctgctcccctcaccccatgacagaccccggtgtgcgatgttccccaccctgtgtccaagtgttcttattgttcagttcccacctatgagtaagaaaatgcagtgattggttttctgtccttgtgatagttggcttagaatgatggtttctagcttcatccatgtccctacaaaggacatgaaatcatccttttttatggctgcatagtgttccatggtgtatatgtgccacattttcttaatccagtctatcattgttggacatttgggttggttccaagtctttgctattgtgaatggtgccgcagtaaacatacgtgtgcatgtgtctttatagcagcatgatttacagtcctttgggtttatgcccagtaatgggatggctgggtcaaatggtatttctagttctagatccgtgaggaattgccacactgtcttccacaatggttgaactagttcacagtcccaccaacagtgtaaaagcgttcctatttctccacatcctctgcagcacctgttgtttcctgattttttaatgatcaccattctaactggtgtgagatggtatctcattgwggttttgatttgcatttgtctgatggccctcaatgatgatgagcattttttcatgtgtctgttggctgcataaatgtcttcttttgagaagtgtctgttcatatcgtttgcccacttgttgatggggttgtttgattttttcttgtaaatttgtttaagttctttgtagattctggatattagtgctttgtgagatgggtagattgtaaaaattttctcccattctgtaggttgcctgttcactctgatggtagtttcttttgctgtgcagaagctctttagtttaactagatcccatttgtcaattttggcttttgttgccatkgcttttggtgtttcagacatgaagtccttgcccatacctatgtcctgaatggtattgcctaggttttcttgtagggtttttatggttttaggtctaacatttaagtctttaatccatcttgaattaatttttgtataaggtgtaaggaaggaatccagtttcagctttctacatatggctagccagttttcccagcaccatttattaaatagggaatcctttccccatttcttgtttttatcaggtttgtcaaagatcagatggttgtagatgtgtggtattatttccgagggctctattctgttccattggtctatatgtctgttttggtaccagtaccattctgttttggttactgtagccttgtagtatagtttgaagtcaggtagcgtgatgcctccagctttgttcttttggcttaggattgacttggcaatgcgatctcttttttggttccatatgaactttaaagtagttttttccaattctgtaaagaaagtcattggtagcttgatggggatggcattgaatctataaattaccttgggcagtgtggccattttcacgatattgattcttcctacccatgagcatggaatgttcttccatttgtttgtatcctcttttatttcattgagcactgatttgtagttctccttgaagaggtccttcacatcccttgtaagttggattcctagctattttattctttttaagcaattgtgaattagaaaactgtgtttaaaacatagcgtattgttaccagggatgtgtctagagaatgtattgcagtacaggtattaccatctagttagttaatattgtaatgaaaacttgagcttttatttacttaaaattaatgatcattttggtcaaggcgtttgaataaccagagcttccaaaaatactagtggcactaagtctctggttttggaacaatatagtagaaagaagctgtcaatatttatctcttaaagaacggatttttyttcttgtaaatttgtttgagttcattgtagattccggatattagccctttatcagatgggtaggttgcaaaaattttctcccattttgtagattgcctgttcattctgatggtagtttcttttgctgtgcagaagctctttagtttaattagatcccatttgtcaattttggcttttgttgccattgcttttggtgttttagacatgaagtccttgcccatgcctatgtcctgaatggtaatgcctaggttttcttctagggtttttatggttttaggtctaacgtttaagtctttaatccatcttgaattaatttttgtataaggtgtaaggaagggatccagtttcagctttctacatatggctwkccagttttcccagcaccatttattaaatagggaatcctttccccatctcttgtttttgtcaggtttctcaaagatcagatagttgtagatatgtrgcgttatttctcagggctctgtgaaaacaaacaaccccattaaaaagtgggcaaaggatatgaacagacacttctcaaaagaagacctttatgcagccaaaaaacatatgaaaaaatgatcgccatcactggctatcagagaaatgcaaatcaaaaccacaacgagataccatctcacaccagttagaatggcagtcattaaaaagtcaggaaacaacaggtgctggagaggatgtggagaaataggaacacttttacacygttggtgggactgtaaactagttcaaccattgtggaagtcagtgtggcaattcctcaaggatctagaactagaaataccatttgacccagtcatcccattactgggtatatacccaaaggactataagtcatgctgctataaagacacatgcacacgtatgtttattgcggcactattcacaatagcaaagagttggaacgaagccaaaggtccaacaatgatagactggattaagaaaatgtggcacatatacaccatggaatactatgcagccataaaaaatgatgatttcatgtcctttgtagggacatgcatgaaattggaaatcatcattctcagtaaactatcrcaagaacaaaaaaccaaacaccgcatcttctcactcacaggtgggaattgaacaatgagaacacatggacagaggaaggggarcatcacactctggggactgttgtggggtggggggaggggggagggatagctttaggagakatacctaatgctaattgacgagttartgggtgcagcgcaccagcatggcacatgtatacatatgtaactaacctgcacattgtgcacatgtaccctraaacttaaagtataataaaaaaaaagaatggattttcacatctctcaaaccttgatarttgatgttactacaaagaatagtctttgtaagaaagattaacaagcaagtgtatacagatagcaaaggcatttattcacattcttagttaataacatccaaaatttgtatggagctttacagcctttagaatagttcatccacaccttatttctctcaatgttcaaaacaatctcaaggtcttaggaaaattgcttaaatgcactgagcttcaatttcattccctataaaatgcggatgatttcacctatcttgatgcattgtgagtagtaaatgagtatgtaaagggcttggtgtatcagtattattattaccacctttatctttactttcatcaaccatttgtggcacatattggctggttaatttagttaataagtgacagaacccgaatgtaaacatagatccttctcattccaaatcttatgtttgtttctttctattatctcttccatagaggcagatcattttaagctctgtagaagaaatattgactagggccttgaaggatgaggtttgcttttgtagcatccaaggctttttatgaactaaccgccttccttgtctgtcttatcagtttttcttcttttattatttattttcccaagtgtgtcttctatttgaggttcttaattcctgccgtttttgtctttgtacattatcatttctagggggcatgtaaatcttttactgtggtcttttctactaatccgtatctattattgttatcttcatagtttacagtgatttcctacatttttttaaaaaattgaaaatcgaaagacaacattctgatattttctacattttgtaaaaactctttaacagcgttttcagatcacagaatattttaggtrttataagttaaatgtattctgaagccaaataagttgagggaacaatttgttgaacagagttaaataggttatctaacaaaatgcagaacctattggagcatttaatttgctattgtgcactggaattctccaagagggaaagtagaggtataggggtatagtaggcaggatatggtatgtaacatctcctaatctcaccaaggaatcaaccccctccctcaagagcatctcaagagattaattcattggactgcccagatttatagcaatgatacttagaatactcttgacctgtgacatcagaattaaactaaatcaattaaatttaaagttactttttaaatttcaagattccttggacctaccagtcctactaaaacagaatctttgagaagtgaaataaaatgtcttgtagtttttctttttctatctctttagtaattgggctaattagagctctgttctcagctaattactagtcgtactgtacttcttcaagtcatggaattcactctcatggctccagtgctgattgccctaaagcaaatcagatccattctccctatgttctgattccagacacttaaagacaacagcttacaatcagatatttaatggggcctcagaatcatcagcatgttaaaactgaaactaattattcccttcctctaaaaaaacaaagcaaagcaaaacaaaaaactccacatctcctctagtatttcttgtcttaataaatgatgccacttccagctagatgtccaagtcagaaacctgagagtcagacttaactctttctgacttactcccaatgttccttcaattgtctgtcaattagactttgtaacaggctcttgaatccttccacttctctctatcctcagtacctctaccctggtctagtcatctgtcactttctcctgaactataactacctcttgattttctacctccaaccttgttctcctgtaatccaggcttcacactctggtcttggtgagatttctgagtttcaaatctgattataygactgtagctttaattcagtgactttgtaccatccttaggatcaagtctaagctgctgaatttaggaggcattattacaaggtgtctggtctctgcctttctgacaagtattatctcactctactcttccctttgctctctatccttcagcccgctacagcttcttcaattcgttttctgtgtatcataggtctttacacatgttttgcttgcctctagctaccttctcctcctyctctcctttctgcattcaactcttccatttagctaacctctcatcctttatctctcatttaaatacatcttccctggggaggccttccctattttctagactgggttagaatcctgtgctatatgttctcatagttcttttttgtacttgtcttaccactctctgttattacatattttagtggttgcttttcactgtgggcttgctgtggcttatgcagctatttgccttgcattatatattcatcccttcttctttcagtaataagaactctaatttttagctggacatattgccatatagcaaatcactacattcgctcttttctgttacagctaggttggctttagtattaaattttgggcaataagatatatgttgagtatgacttctgtaacgtatcactaaagggaaagggcattttcttcttttccccttcccttttctcctgctggctagaatgtgaatgtgctggctggccttttggctggccttttagtagccatcctgggtcatgagatggcgctgtaaggacagcagagtagccagatagaaggagcctgaatcccttatgattatggatctgtcaccatttgagccctggagtcttgtcctccatatctgctttatgtgagagaaaaataaatatctctcttaagttagtgttacatagttacttccttatgtatttttacttgctgatatagctgttcttcatatgaggtttttcctgtgttttcgtaattctgtgccttatgagtatttttgttaggaggcagagctctccccrctgcctccccagaggaagaactgtgtactcatgcctccagcttcccttgtagccaggccatggacatatgatctagactcaaccaatgagaagtgtctgccccacttttgagttcatgagttagtgatacaaataaataaatgggagcagcagataattcttcctggcagtggttttagttgggtagaacatttaggggaagagggaaggacgagcactcaagcttaggcatcacctgttgtttagtgccagggagattagtggtgcaaattgtaatatctgttgctgcgtggtggctgccataaggtaggtcttcactgaactagttctgtggcatcattttcagtggtttcctttttcatttcatagcttctgaacctgtttcttcagcctcccaacaattatgtgagccatccaacatctccttttaggtttaaactaagcaaacgtttctattgcatgcagttaaaatcctctactgataacgttatcattggtcttccctggcaggttgtagatgctgtgagggctgtcttactcatcagtatatcctcagtgcctagcatctcgttatacccgaactcaatgcctggcacattaaataggtgtttagtatgttctcttttttaaaaaaaataaattagcagtccatgcctccaatatgaactttcttacctgctctagcatgcttctagctccattaatctactcatactgcttttgataagattactactggtaacctgtttgctgaattcagtgaatatttttcacaactcaattaacgtctttaaagctttgataatgctatttcttccttattctcattttaccattcacactgttttgttttgttttgttttttaggtttctcaaactattccttrttatctgtcagctctcacatctttatgttcctccagatttctttcttcagctcacccatccctctggcttcagttgctgtatrtgatgatgattttcagaccttatctccacccagacctctctcttgagctttaaatcagtgtatccaactgctactcagtatttccaccaagatcttctacagaactctcaaattcaacattttttacatgtttaaaattaaatgaattttgttgtttcttcccaacagacaaatattgaagacatagctattacctaaatcatatggcttactctaattttcagccgattcactgaaattaagtaaatatgcatgtgtaaattcacaattaaaatttattctgttattttttccttttccaatctagtactttatgattttttaattagtgtacaattaaaactgcttataatttccaaaattctgcttagtgtcaagactttactattgaatatagacatgttgaataataatatatattagtatttcatgttgagtaaatgtaaattgtagaatacatttggatctatatttctctactttgaaaaatcatttaattaaattttaaacaattttattatttttgtttaatagaatttttagctttttctaactagaatgaatattttagctttcagaaaaatataaaacattttacaaagaaatggggcaaagtaaatgaaaaaatagtcaaacaaagtcacatttatttcttctatagtagtttcacctataatctcatttattcactttgacattttcaattaattgttttgaaaattgtaacaataatttggtttaatcaaatttgtatcttgcttgaactctctaagtagcaattgtgtgartagcatgacagggcaatttcagttaaaaacttctccaacagtttggttaccttggaataaaaaaaaattatcttcatattggggtactattaagtcacataaacaaataaaaatgattgttagtgttgcaagcattcaaagagagaagttgagaaaattattgaaacttggagagtagcttttttaaaaaaaattaatcagccccagggaacagctgataaataaaaaatatggtagtacaattttgttcatttgaaaccctcaagcttaattaaatttttttttcaacacttaatttatggaagagcaattggagcttttggattttaattttgtttaatgtcttttgttcaaaggtacataaaaagaaatttttccctttataataatttctttcaactctcttaaggtattttaagattttttctgtgttatattgatttaatgctttgtgccttatttggattatattaaagctaatggatttatttctaactagttattcttttttattggacatctgcctgaatgtttgaagattttgaataaagccagttttaaaaaattcactgctctgaattatataacattgaatgtgcttctctagtcatgtattctctgtactgttggttgtgcatcactggagactcagccaagatatcttttggtcctaatgttcctaactttatctccttttttttttttttggtagagttaggaattcctagtttaggtgaaaaagaatgtgtgataataaaataagcattcaacatagtagtttagagaaaacaaagatagaaatttggaaatatactaggaaattcctgagaagtaatttatgtgtaggtcatgtgcaaagcacctttatagacacgctaacttatatacctgaccttggagtaattcctattggagattattgaatttgattgtaggtgtggtaccatgggaaatacatatttaatttttgtctccagtttctggcacacagctcctaaaacccttggaatctctggagtgatgagagtgtttcttgtatgctcatgagatggctggtggcaagtgtcccctagatagtttaagaatggggctggtccccagaaagaccaagacatgattaagatggttgagatttacagccttaccccctcaatctctggagaggggagaggggctggacgttgagctaatcaccaaggccagtgatttaagcaatcatgcctatttaatgagacctccgtgaaaacccctaaatggcagagtttggagagctttcaggttttgacaatagccacaagttggtgaacacatctacatgccaggagggtggcacacctcagctccatggggacagaagttcttgtgcttggaacctttccagatttcaccctatatatacctcttcatctggctgttcatttgtatcctttattgtaagtaggtggtagtgaataaattgtcttcctgagttctgtgagctgtgctaggaaattatcagacttgaggagggagtcctgggaacccctaatttataactggttggtaggaagtacagatggcaacctgggacttgtgacctgtgtctgaagtaccaatagtcttgggacgtaacctatggagtctgcactaactcctaggacttagtgtcataattgaattaaattcaattttaggacacccaggtggtgtctggagagttgaataattggttggtgtgaagaaaacccccacatatttgattccagaagtttaagtaaaaataactcagagtaggccattctaacatttttgttttggcataattgttacccttatttgcagctttttttgaaacactaagactgataaactttctattgtcagttatccatataacagatctttggttttataagttttagaaagttgttaaactcttaactatatayagggagaagagaatatcttttgcatatgtttaatatttattcaacacccatgatataggcattaaataataatgcagaatttttgtttctcctttttcttgtttgttacctcttgagactaaattgaagtcaaagaactatcacaagcaaggctgacttttgggacattggcttcgttttgaagtaggcatgcttaggcatgaactcctattaactctgaaagtaggtcatatctaatggtagagtcttttaaaaatttcagtgactaaaacaatatatacttatctgacacactatttttaattacttaaaaatgttactaaatataacacccaattttttaaattaatttttttaatttttcagacagggtcttgctctgttgcccaggctgaagtgcagtggcatgatcttggctcactgcaacctctgcctcctgggttcaagcaattctcctgcctcagcctcctgagtagctgggactacaggtgcatgccaccacatccagctaatttttgtatttttagtagagatggagtttcactatgttggccaggctggtcttgaactcctgacctcaagtgatcctctcacctcggcctcccaaagtgctgggattacaggcctgagccacctcacctggcccaatttcttatatttctgtatttaatatgaaagtcatgaaaacttaatgattgttgaaatatttctggatgtcctttagtactaagaaatctttccacattagtgcacagaaaattctgcatgtcagaatagcaatcagtactgtaaatttccaagtttctatttaaaaatgattaaaaaatctgaagcaaaaaggttaaaaaccaacaaaaataattacagattatatatagtttccttgccctgtcttatggtggtgattatggattatattttaacaattagatgtgtggctaacagatttgtgttttaaaaaagacttatggctgggtgcggtggctcacgcctgtaatcccagcactttcagaggctgaggcaggcagatcacaaggtcaagagatcgagaccatcctggccaacatggtgaaaccctgtctctacaaaaaatacaaaaattagctgggcgtggtggtgcacgccttcaatcccagctactcaggaggctgaggcaggagaatcgcttgaacccaggaggcagaggttgcagtaagccaagatcacgccattgcattccagcctggcaacagagcaagactctatctaaaaaaaaatatatatatatacagaggtaaaatgatttacctttgggatttaaaagtattatagacacatatatatttggcaccctttttatataaaattcaaaaaggaccaaaggcggcagaggaagggagtggtatgttatataagatgaaaaagcaaaagactgaaattacaaaactatatattgggggacawaaggctagtttcaaagaaatcctgttggatgattgctttcattgtatgcgtattgaaattataatgcatttctggtaggtggcagccatgtagcatgaaagctggtaaataactatgtggttggaaaactatgagataactgtcaatagggaatttgaagctttcttcttttttcactaattttgccttctaccacactaatatattgtcttgacagagtatatttcttaaggtggagataaatgcttgagtaattactatgctgtcctccgctattgtggtaggagtctgtgaaacagttctctccccaaagcctgaggatcccagatcaagtgcctctgttttttaatcatctgaatgtcatgtaaagtggtcaaagcttgtagttttaggcatcaacatggcttataaatctcgataataattgagtctcagtttaaaggattggtaggttgttcgtgcctgtgtaaccttgacctctcattgtacccttgatgtatctgggatatccagcacctggtgcctggccacacttggtaagatcaggcctatcccgaagaaagtagtcatccttagtattctcaggggattggttccaggcttcacaaggattccaaaatctgaggatgctcaagtcccttactgtactcgttttctcttcttcatttttaaactcaacatttgcctcaaatcaaaagcatattcctttctctacttttcactcttgcttttttctattcgaatgagatagaggtasgcgtcaaacagcttacaataggtagtaagttctaaaataactgattatgtccyaataagatgattttggaataagacaaattcatactgatgttatgttgacagggtatattagggcaaaataaacacctcagactcagagaattaagcatgggagtcctttctgtattaatctaaatttaaaaatctttgtagaagctttgaactaaaaatgtaaacaaatagattattgattygggttttctttgggcacactttttttttaattaattgacttttgctaaattagataactttgtagaatgtttgagacaaaaaaatgaatgtatgattttatgtgaaatttcattatgtaaaatttcagaaagcaaaagtgtgggttttcagtggtgtggtggagccagcttgcaccagcccgttagaactgattggaaattttgtaaactagttgttaaatataaacattagtaaaaattgaagtagctgggcagggtggtatgtgcctatagtctcaactctgtgaaacacacaggcaggagtagaggattgcttgagcgcaggagtttgagtttagcctgggcaacacaggggaraccctgtctctttgtatttatttatttatgtttttttttgcgatggagtctcactctgttgcccaggctggaatacagtggcttgacctcggctcactgcaacctccacctcccaggttcaagagattcttgtgcctcagcctcccgagtaactgggatgacaggcatgcgtcaccacacccagctaatttttttgtatttttagtagagatggggttttgccatgttggccaggctgatcttgaactcctgacctcaagtgattcgcccacctcggcstcccagagtgctgggattacaggcgtgagccactgcatcctcatattaacttatttaattataagtacatacaaaggtagtaaatacttaaaactcagtactttctaattagcttactacattttactgttatctatgctcttgaggttatttatgcctatcatatttatatggtaaaataatatataatggctggctaccgggtgtgtcttcctaacttcacatttagtgacatcatgttagagcctgaacttagccataaaagagtatttatttaaaccacaggaattggcaaatgctacaaatcagggcttaatttattcttttgttgattgtgcttaaggaagtgatagagaaaatgttaatgcatgtcgtgtctatagtcattatattctgaatttcacaaaaattaaggaaacagtcttccaatattcaaataagtttaatccaatcagtatttatgttggaactgtgcccagaagattattaaacatttatcattataccactggtttaagttcatcaaattttattaatgttttaattaacaaattagaatttaacrtaagtattttaagctatataaatggcaataaaatgtatttttatttattcaataccagtttaccacttagaacatgagatgtatttatgcatttataataaaatgtagtttgtagtgttcttaaatttgtatattctcattcacctctatatggaggttccctaagtgactgataaaagtaatggaaactttaaataaaaacagtgacagcaaaactgaattttatactagagattatgattccataggcttatggatggtttaagagcctgcattttattgcatatcttatatggatgttattagaataccattagcaatatagtgaaaaactttttagttcctaagaaaattgtttccaaataaaatatcaatatgcacacacaaaaaataagtcttaagatttgttttcttgtactgactgtcattttagagttctattaccttatgtgggtaattctcattctctttaaaagcctgtatttcctcatctgtaaaataaagacattatgctagataatctttgaggtagaaatgatgattatcaaaacgttacctttcatttatagggattaatttttagkgctgcttctgaatccactgagtatcttatcccacaagaaaattgaaggattgtaatttttttcacttgtttctttagttgtattatggggataacaatagtacccatcatcatagtgttattttggagattaggcaagtaaacctgttagtgtttagaagaatgtctggcacatagtaagtgctgtataagtattagctgctattctaccttcttcttgttttccctcttctctccttttccctatcttcactcccctccctcattttactcttcccctttccttggagggttgatactaaactacaactctttttcttttgtacaagtagaatattaataaatattcttttaaaaaatgcagtacacttcaataagttcataacaaattaagaaaaattttaaagtttcttagaaagactattttttttccagcaacaaggcaatctaatgtagctaaaaaaccctcctgctataaaataccccgtagtgctggataaaatataaattttgtttttttcaaacatccagcgtgagctttaagacaataaggaaaatacctggtttttaaaaaatgaatgatttttacatatattcttataaatgagatgggccttacctttttcttgtactggcctcttctgatttttggtatcagattatgttcacctcttaaaaagagctgaatcatttccttctttttttctattctctggaacagattgtgtaaaacagaggttagatgttcctaagtgtcctggaaaatttaacagttagatattctggtcttggtgttttttacagaaagatttttgactacaaattcaatgtctttaatagyagcagattctatttagtttctctaattcttctttgatccattttgataatatatgtattttggaaaattatactgtttaagttttcaagtttatttgtataacattatttattgcattctcttatgctttttacatatatttgtaaattcctaacactgccttttaaaacttgaccaattaataagatgtttgtctataattattttcaaagaactagcttttaattacatcgttttttattttgtttcactaagcaataattgtcctcttttatctcatatattctactttctctgtttccttttcccaccaacccccactggtattatttttctgatttcttgaattaaattttagataatcagtttttagtttctttgttttctgttataaacagggctgtatattttactataaataataatttagatgcatctctgaatatttgatacatttatgctaggcttctctgataagttttaattatcttataatttccattctgtcttctttgacccatgaattattttgaactgtgtgggttttgttatgtgtgtgtgtgtgtgtgtgtgkacacatgcacgcatgtgtgtgtttaagagatgaggtctcgctgtgttgccctggcaggcctccaactccagggcttaagcaatcctcctacttcagcctcctgagtagctgggagtatgatctttatttttttgagacagagtctcaactctgtcgcccaagctggagtgcagcagcacaatctctgctcactgctcactgcaacctctgcctcctggttcagtgattctcctgcctcagcctcctgagtagctgggattacaggtgtgtaccaccacgcccagctaatttttgtatttttagtagagatggggtttcatcatgttggtcaggctggtctcgaactcctgacctcgtgatccgcctgcctcggcctcccagactgctgggattacaggcatgagccactgcgtccagccttttttttttttttttttgctatttaaagaagtttccaaatatattaggaaacttgatttggtgttacttttattactsgtttctcatttctaactttgtggcatrgtattagtttcctattgctgctgtcagaaattactgcaaatttagtggcttaaaacaacacagatttattatcttacagttctagaggtcagatagccaaaattagtctctctgggataaaatcaagttgttggcagggctgtgtttcttcttgaggatctagaggataatctgtttttttcccctgttctagcttctagagcctacctgcattccttggcttgtgatccctttgtccatcttcaaacagatgactctcagacctctgctcttccctcacattttctgtaactctgacccttctatctccttctataaggattcttgtgattacattgagtccacccaggtaattcaggataacttcttcatctcaaggcccttaatttagtcacatatacaaagtcatttttgccatgtaaggtaacagtctcaggttccaggaattagtacatagacatctttaggacgcccttattctgtctrttcacattattyatatcattttccttcccccacctttcccactctgttgttttggatgttatacattctgtttcttttccttggtattgatattatttatgtgtttaacagtatttaatattatgcctttttacctttgcataccatgctcatttgtactttccttgcttgtgttgtttagcattttagtttccctttgtttctaaatgccttctgcattaatcaggcttctctagagaaacagaaccaacaagtgagagtgagatttattgtaaggaattgtgattgtagaagcttggtaagtccacaatctgcaagataggctggtgggcaagagacctagggaaaaattgtggttctaaagatattatgttggcaaaattccttcttgttcaggagaggttgtcctgtctttgttctcttatggccttcaattggttggatgaagcctgttcacattatggaggttaatctgctttactcaaagtctactaattaaaatgtcaacctcatctagaaaacaactttacagaaacatctgaataacgtttgtccaggaatctgggtatcatggcccaaayaaattgacaaaartgttaactattactctttccaagttacttagtttttctgttactgttattatcaatattatgtacttatttaactttctaatgtgtttaccaatatcttttctcgtaacatattcttgcattccattctcctttctatgctcagttttccttctttacacatatatttcccaagaaactgggagaaataaattctcagtttttatttgtctgagaatgtctgttttcctcacagacctgaatgatggtttaatagggtatagaattcttggataacacttatatttccttagctctttgaggatattattctgttgtttcctagcatttgttattgcgtatgagacatctacctttaattatcttttctttgtagataatctgacctgtcctttgctggttgtttttaagatcctttctttgccattagtgtttttgttgttggtggtggtgatgttgtttgtttgttcgttttgagacggagtctcgctctgtggcccaggctggagtgtagtggcgtgatctcagctcactgcaacctctgcctcccaggttcaagcgattctcctgcctcagcctcccaagcagctgggattacaggcgcatgccaccacacccagctaatttttgtatttttagtagagacggagttttgccatgttggccaggctggtcttgaactcctcacctcaggtgatctgcctgcctcagcttccctaagtgctaggattacmggcgtgaaccaccatgcccggcctgcctttagtgtgttacattttcactgtactttatttaggtatgagtttcttttcttttaatttatttattctgatttttgtttttcctagacccgggaagggattcatgtggctcatcagttttggaaaatgtcagccactgtcttttcaaataggtgttccccccttcttctgtcatttccttctagaatgcctagtaaagatacagattgtattctgtcctccatatcagctattctaatctgtcattccttgaggttttctttttcttaagtgatttttttttattgaatttctctttggttcttttaaaaatattttagttcttttttttgcataaccagtgttgtcattgtggcttttctgtctttgaaaaatcattctaaacatttttactggtttagtcattttcagattctatttatagttttagattattttatttgtagtatttgaagggtaatttgcctatttattacatcagctaaagctttctcctcgtgatggtttcttcaatttataattttttattatgagctcatctttactagggactatgtattctatggaagtccagtatagtatgtgagtatctttgtgggactatttacatctacatcttttggtccttaaaaatttcaagggtccagtcagattttatgttacttttaaattttacaccacggaattatgtaaatttaaaaccctcacatatataggatactcttgtagagttttttatgttttagtggtgactgttttccctctctcattgaaggcttcaaattaatgactggcttctttcctcttagagttcatgggccacgtttttctagttaatttttcttgagtagcacacctctttgattctgtgagctttaggtggatgctcagttcttgatcccccacctcacatcagctatgggtatgttttcactcctgcaagtgatttaaaggtrtatgtccaagcacttagcccttaaagcctagagctgagtttgaaaccccggggattgctacagtgtctgtttaagcttatggctctggctttgacttctatttgtttccagcacttgaggaatttttgtttcttatttttagcaaagtattattttgaaagtattttatccagtatttctctgtgtttggagcaggaaggaagcccttacatattggcttggactataccatgttataagaattttctgttttttttaacattgatgtaatttgattgactcttaatttctttctattttaaggatattggttgattctctaatagctttttaaaaattctgttttgggattgttttaacttttcttttccctccagtgcgtttttcaaacattttttgttttgtgtgtatctggtacctaataartattcagtaaatgttttctaagygaaaataagtcaaatgtttagtttgtgccaaaggacgttctaggtgattttaataagtttatttgttttaggcctcatatatgttaagttagactgatagaccctaccaagttataaaatgataataataatagtaataataatagcttcaaataattataagacacgtcattttcattctaaccctgcaatatgtagtattattatcactgttttactgttgagataattgagaaatagagaaagtaacttatcccaaatcacatagttagcacatggcagagctctatttaaagtaagtctggctccagaggcttgtattcttaatcattatactgtagcttttatatcctgttgagagatatccttgattattattatacctctgcttaaaatattttcccactgctttctggataatgtttaaataaacattttattatttaaaaaataaatgtttaaataagtatttaatattctagcctaccttattctatcatactacatatcagccttgttctctgtttccaattgctaacagttttccaaaggccctctatttcatgcttccatgtgtttaattgtattctcccctctgcctagaatgtctctccttctgcttctctcctggctaactcctatacgtccttagaaactacagctctttttgaaagcttctataactgcttattgatatagctgtccctctcttcagcgttcccctaaatttgtcctcccataatgtgtcagcttatagcatttattttactatgttttaatatttttttttctttttgcctctcaactaaactgccttctctgaggtaaaggactgtattctgcacatctccataaccccatgacctcataaacataactggcacataggagatgttcaatatatatttattgaatgaatcgataattgtgatttcattacttgttttacagatcatccgtaagatttgtctactgcattgtcttgttgaatttttaaataggactatgaattattttgttagtaatattaataaaagatgtttataaaaacaagttagtatcttggaatacaagttacttaatgaatttcttaagatatcttttttaaacatataacatttttgcttatttagttgtgaaagaatatggtttctataatagtgtgttatttaaaagcagttctatttagctatttagttgaaaatgattctttggtgaaaaattaactctgtaaatatgtattaagaggaatgcctgctctgttttgattctatgttttaatatttttactcttggcaatatttaatgaaaatgtgtctcattaaccttgaagttactagtcattattttgtgactgcttttgatttatttactgtcttgacttcatatatagaaaacactaattttatcaaagcttattgcattgtttaccactaattacaaaataaataagtaagtaaataaagatcacatagaaaaaataagtctcttggggtgaaaatttatttgtaaaacatatattaatggtttttatatgctcattttcttataataatatagaaaatttaattgttcacttgggggcagatgttttatatcatggctttttaaaaaagttaactctttaaatggaatgaaggaataggagaaaattacttgtttgagccttatgggaaatatatctgagatagcactattttgctgcaactgaaattcaaacatgaggaaattgcagaaatttacaattcaatatgtgtttcatcagggagaaatccacagattgttttgacactcagttagaaattcagcatgaagatggacgtctcatgaaatttgcagctgctgattgaatttatatttccataaaggccatcaacagtagcagcctgcaggggaggaggggggagaaatgacaaaaatcgtgaggctagcatttttcctcagcattatagtcacaaattactggtaataagggtttacactgaccaggattaaagaaaaatatagacagccagagggaaggacttctcagtttaattgattttaactaaatatgtccacatttgatatctaaatatgtgtttagtcatttgtagaaaatctaatatgtgtgtaaaaatcagtttatctttactatttaaacagaaagaataagatagctcttgaagttaaaaaaggttgtatagtacaggttttcataagagcctttcaagatagaagatgagtattgtaggaatataatacgagcttgttttctatgtcactgaaataattatttcatgttcttgcaagtaacctacagttgatgtttttgagaataacaattattattttaaaatgtgttttaaaaattttttgaatggatatccaaataatagtgacagagaacaagttaccttttcaaggaaattatttcattttcaagtgtggtgggttttttatttttagcaaaatgtacaaaaagttctttcttttgtttaatgcatatcttgtggagatttcatattatacatgattttaaaatattcatggattgtaggtgaactgaaggacttaggagtgtgttcattgttcctgcagagttctttgtctctgtgggcagtgtgtacttttaaccataacaggatgccctcagatagctttatttgaaaattagaattttcacaactatatgtaaaaatattatccttattaagaaaaattatatttaatttaatattagtttataaaaagtgagaacattacccagaaaacatgtaaattaaattaagtgttggtctttattttttcacatactcaattaagagtttaagaacatagtgtaactgattacagttgttttgttatgtttaattatatttgagaccatctaatttataaactattgtaattggaaaagaagagtatatatttctgctacctgtgcttaaaaggtacaygtggactttttttttttttttgagtttcagaattttctttaggtgttaaataagcataatcaggctagattacaagaatgtgcttattcttctaggagtctataaatgcttgctttgtcaacatcacttcctattgttttactttctgtatgttaataccaaaatctaccagttaaatatattttgactttttatacattggtttacaaaccaaagcaaaactgttttgtgagagaagtaccactgtgtccaacagataaagtttgtaagtatttggaaaaacgattttctcatttgtgctttcctttcacagcattactcaggcatacacattttaggtcattcatgtaatccagacttccctctctttctttcttccctccttgcccaccccacttgagaatttgctattttcaacattccaaaatatattagcttaactatttaatttactacttattaaaagcctcctttttttcttcttatcagttgctgtcaatttcatcacccgatcaaatcaatgtctttatttctcttttagcttgttgtccctgcccatatgtattttttgtttttatgtatgagatataattcattcactcttgaatcaacagatatttattgactgccatctttgtatcagacattattttaggttctggggatatgttaataaacaacacaaagccttctttccaccttcatggagtttgccttttagtaagagacacaagcagtaaacaaatgagtatataatatgatgtcaagtagaaatgtgcaaaacttacagtgccaggtaaaaggctagaatgtgacaaaattagagtgcagcaactacataataacttccagaaggatctctctgaggatgtggcatttgaaaagaaacctgagtgaaataagaaagtgagtaacattatagagttctacatattttcctttttctttatagcatgaacatyccccccaccacaatttgctatgtgcatatttgttttcgacttatccccttctcttatcacattcaatattagaagtctgaaatgatgcttctacagctcccatcacttctccatgctcataaaatttctatattcatatacagatacaaataagattttctggaaggggtattatttgtcttttacaaaaatggtgttatcctatttaccttcttcaacacttgcatttcttagtaaacagtaaataataaacatcacttaggtcggacctaaagtattattgttaataactgcatattttccatagtatggatataccacagtttatttaacctttgattaatgtattgatgaacattttagttgtttgcagtttttttctactaaaaatgatccataaacatcctgtacaaatatccttttcaactcatgcttttaccttttgtaacatgaattcccagaaatggcattgctatggcaaagaatatgtgtaacttttattaataaatattaccagagtactttccaaaaagaccttagcagttcacattctcaccaacaatgtaggtgagtgtctttttccccacagctttattagcactaggkaactttgttttatattttgtgtattatctctgacggtttttaatccatctgtcatctatcttcctgatgctcagtttatgtgtacactaggcttactctttgcagtcttgtggcttactctttgccgtcttatggaactctgtgcccttataaaactgtacagaccacttttcagcaatcttagcatgttgtattttagttacacatttaagtgtatatctttacccactctgacccccaacacctaaataacatgaggcctagcacaaggtagatggtctaggtaaatactcactttcaaaaccaaatgtatctggtggagaatactgataataggataggctatacatgtatgggggcaggtgatatatggaaatgtctccacctttctctcaatttggctgtgaacctaaaactgctcaaaaatatctttaaaaataaaaataaaaggtacaagattttttgattgccatgcgtgttgaattactcgtgcaattgatttctctgtgtgaaagcagatgagcaagagttcactgcattttaaagttgttacctgaaaggtcaaatgtattccttttttgacactatttccatttggggtttaagcaaacatttatattaggttgcacattactgtgttcaggatacagttattatatttatcagattgttgccagctactctgcattttttttcctggctctgaaagcacatgcatattctaggcctgtgctctgaaattttttgaagtactattgttgacatttagagcattctgtgctgcaagtgtcttcaccccagaatgcgacgtgcaccagtgaacagaggtcaggcaaggcgaaaagttgtttgtcatctgccaagctgtttgtaacaaccagataaaagtatattcctattttcagatttaaaatgtaaacatacatctctagtcccaaccagtctctttattttggaatgttaatgtagaaatgtccccttgccggcagctagcccaatcttcttttcacagtcacccgttccagaggttatgtttatagctagaaccagtgtattttggcttttgcctttatttattctttatgagaactgggaactatggtgacccagcaaaagcctgggtgaccatggaagtagtctgtattagcgcctggacaccagagaaaagggaaaatgtgatcctcattcagccctggttgayagagatcatgcctttaaatggtcagtctcaaagacattcagttgtcacaagtgcagatttaccagttggcagttcagattgttactgtacagtgagtgtgagggtctttagaactggttttagtaatgtagcatatatacaggaatcttaggggatgtgtcatactgttttcaatagtcagggatagcatattggttaatcccaggcacttctgacacatatggttctgattgtgtaggcagaatgggcatgacaaggagggaaccttatcagctctttaaactaagtctgggttacattatacagaccatccaattctttgccctcctattcccattttctcattccccagtttattcattcttaccattttaatgaaaatggtaagctctgctgtcaacaacagatctcagctcttggatccttttattggatcttactatttagtatggaccacttttctttttgaggtatcaactctttaatttaggtcttttatatataaaaccattgattttgttttcaggttagttttctgccttagctgttttctttcttagcattttaaaagtgtgaagtcaatctattttattaaaagttcaatacatctaaattcacaagtaagagatgttatgtaatgtctggatagtgtaatgattatttgtttctggtttcctcttctttcttctttcctttctttttaaaaaatacttaaaagcatatatgaagattacttacaattcttcatataactaatgaggtcttctgcagcaaaaggccaaccagtttacataatataatctttttattttagatgagaacrttgctatttcctgaacctacttctgctcaacacctatttctcttttagttaccatcatcctttgccttaggtatcccacctttctattttgttaacttttttctctggtcatatcaccagcatctcttctggttagttcctttggctgcttttttaaacttagttttatatagactccttgagagtattcgttattcttatcaaccacttgaactcagagttattgatatgggcggtaggctctttactcttagcagccatcaaatcactattatgttttctttttttaaattattatactttgagttttgggatacatgtgcagaacgttgcaggtttgttacataggtatacacgtgccatggtggtttgcaactcatcatctacattagacatttcttgtaatgctattcctctcctagtcccccaccccctgacaggccctggtgtgtgatgttcccctatctgtgtccatgtgttctcattgttcacctctcacttatgagtgagaatatgtggtgtttggttttctgtttctgtgttagtttgctgagaatgatggtttccagcttcatccatgtccctgcaaaggacatgaactcatgcttttttatggctgcatagtattccatggtatactgcatagtattccatggtatactgcatagtattccatggtatactgcataaaatggtaccacattttctttatccagtctatcattgatgggcatttgggttggttccaagtctttgctattgtgaatagtgctgcagtaaacatacgtgtgcatgtgtctttatagtagaatgatttataatsctttgagtatatacacagtaatgggattgctgggtcaaatggcatttctagttctagatccttgaggaattgccacactgtcttccacaatggttgaactaatttatactctcaccaacagtgtaaaagcatttctgtttctccacatcctctccagcatctgttgtttcctgactttttaatgattgccattctaactggcatgagatggtatctcattgtggttttgatttgcatttctctaatgaccagtgatgatgaactttttttatatatgtttgttggctgcataaatgtcttcttttgagaagtgtctgttcatatccttygcccactttttgatgaggtttttgtttttttcttgtaaatttgtttaagttccttgtagattctggttattagacctttgtcagatggatagattggaaaaattttctcccattctgtaggttgcctgttcatgctgatgatagtttcctttgctgtgcagaagctctttagtttaattagatcccatttgtcaattttggcttgtgttgccattgcctttggtgttttagtcataaagtcgttgcccatgcctatgtcttgaatggtattgcctaggttttcttctarggtttttatggttttaggtcttatgcttaagtctaatccatcttgagttaatttctgtacaaggtgtaaggaaggggtccagtttcagttttctgcatatggctagccagttttcccaacaccatttattaaatagggaatcctttccccatttcttgtttttgtcaagtttgtcaaagatcagatggttgtagatgtgtggtattatttctgaggcctctgttctgttccattggtctatatatctgttttggtaccagtaccatgatgttttggttactgtagccttgtaatatagtttgaagtcaggtagtgtgatgcctccagctttgttctttttgcttaggattgtcttggttataagggctcttttttggttccatgtgaactttaaagtagttttttccaattctgtgaagaaagtcaatggtagcttgatggggatagcattgaatctgtataaattttgggacactactgcccattaatgggattactcagtcaaatggtatttctggttctagatccttgaggaattgccacactgtcttccacaatggctgaactaatttacgctcccaccaacagtgtaaaagcattcctctttctccacatcctctccaccatctcttttttctcattattttgggcaggatggccattttcatgatattgagtcttcctatccatgagcatggaatgtttttccatttgtttgtgtcctctcttatttactcgagtagtagtttgtagttctccttgaagagttccttcacatccctagtaagttgtattcctaggtattttattctgtttatagcaattgtgaatgggagttcactcatgatttggctctctgtttgtctattattggtgtataggaatgcttgtgatcaaatcactattatgttttcacatagatgactttaaaaagttgggcttacataggttttatttgaacattaattattacactatgtgaagacagtgatgtgaaattttttatgccatctatgtatggcaatacctaattaagttagtacagtaataacatagatgttaaagacatcatttcaagtaggggctttattacatatcatccctcatggtataaatgtttygtcttattccacatgaaacctattttgtgatatagatttaatttttattaaagaattgtttacattttcatttaatggaagctgtaattagtaaacctagaactacttaagacactagtttatgataagattgaaaatatgtatacatacaaattcatttatttccatgttttttcagcaaaaattcatgttgttttggctatagtaacgttaaactctccttaggtagaatattttttcttggaaagtgttttggttcaaatatatttttagaagtccgaacagggataaaccgaagctgtactaagatgactacttagaaggagttacaacytcaaacaaaaaaaagttgtagtgagaagttaggcaaacaaaagagatgcttttatagttgactctcttgggaaaaactatacataaataaatacaacctgtttcatttgataaattaatagctgacgttattttcatatcagaaggagaactagacatctgtgacttatggcctaattctgatcatcarggagaaaattgactggtaaagtagaatcttgagagaaatcagtatgtaatttstgagtttattacagccaaggaaggcagtgctatagggatttggatgcatattctaatttagacattagaagaggagccttcagaaagttttgcagaaaaaaagtaggtgttgtatttcaagaggaatggaaagatctttttgtaaacaaatatgggcaatatacctgttagcaatcttgatgagcaggagatggaaaaatggctaaagggagtgctttgactaactagtacagttatgtgtcacttaatgatggggataaattctgagaaatgtgttattaggaaattttgtcagattrtatttmcacaaaccaaatgcacctaggctatagggtatagcctgttgcccctgtacaacgtgatactgtacagaatgctgtaggcacttgtaacacaacggtatttgtgtatctaaacatagaaaaggtacagtaaaaatgcagtattataatcttacaggaccactgtcatagatgtggtccgtcattgaccaaaatgttggtgtgtggttcatgactgtattttaagtatacaaaaatgtctgtaaccatagccataaagaaatgtgatggcagcaagatagggagcttgaatcattacacacacaccatatatttttgatacattatatatgtaataattgccaaaggaatttaaaaacaaaattcaacaaaacagcatgttcaaactatgaaaggaacacaaagccaaggacagttgctcaaattagtaaaatataataccagaaagactaaatctcagaaagagatgagatatgtaaaagtctcaaatgacacaaaatagctgtctgcttttatatgtgaattcatgtatgtgtacatatttgggtttttttaggtaggcaaatatatrtrtgtrtgtgtgtgtgtgtgtgtgtgtgtgtgtgtgkaacaaatatgttctcttttgttaacattcctctgtctaaatatgaatattaaatatccacgtggagctaaaacattgggagcataaacatctgaaaagcttaacccactgcttgagaagatagtgtattttttttttttttgagacagagtctcactctgtcgcccaggctggagtgcagtggygtgatctcagcttactgcaacctctgaaccccgggctcaagcgattctttcacctcagcctcccaagtggctgggattacaggcatgctccaccatgcccagataattttcgtatttttagtagagatggggttcaccatgttggccaggttggtcttgaattcctgacctcaagtgatccgtctgcctcggcctcccaaagtgctgggattacaggcgtgagccactgcacccagccaatagtgtatttttaatggctggcagagaataagacmactctctttctctcttgctctgttttttttttttttttttttttttttttggtaaagggcttttaaaacaatatttaaaaaacaaaaccaagatggtattaaacataaaggaaatatccagcaaaactgaaaatggcccaagcttccggaaacaccattttttataccttgttctttaaaccacagagcagtctcttctctccttctcttccccactacaccaaaaaggacaagacacaaatctgtgccaggggtctcaatttagaggtagcactcctcctaatcatcacttcattttataattattttattcttagacttaccgaatgctaaacaagtaaaaagaatgttttagttttttcccaatttgtcaataataaattattaagatatttattttcatttataatatagtctagagcatatgatgagtctacattctatcttgaaatagcaaaaattttcataagctgtaatagctaaagagaagttaaaaatccgtcatactatttaaaatgttaaattgttatagaggatacttgcatgctgtattagataaataataaataaaccacaaaactcaccggtttaacagaagtgtgtgtttgtttgttttttaatcgagtagatctcatttatcttattgacatcacttggaaaagttttcagcattgacaagagaagaaaagagtcaaaggctcacttgggatgatgttaagggcaggcctggaagaagcatacatcactttcacccttgttccactggccagaccctagccacttgacccccacctaactgcaggggaggctgggaaatgtatacgagcttgtgcatatttggtgagtgctgcttctatcatagactgttaaattagtcagatgaatgtttattgcaaacagtgtgcatgggacttttctaggcacagggctgaatacaaagatgaataagtcatggcttcttcacccaagtggatcataatccagcactcattgtagactatagcttatatttagttttagattctcaaaacaaattcattgcctattcctagtgttatgagactaataactatttttttaaaacagccaagcaatttatatctaccatctgtatcagttaaaatttaggcaagaaacagatggcacattcaaattaggtaatttgaagactgctaaataaagggactatgtaaaggtgtgggctgggcctaggagggaaactacaaggtataggaaaccaccacaaattcaatactggaaggatgacagcaggatgtctttaccatttccagtgctgaaacagtgaggggaagaagtggtttctgggatctagagacagagttgtgaccttgggccagtgggaatagccttctccccatttgaccttgcaagaagagagccaacaaaataaattctctaatgttactgtccttctggtctcctgttggtmttgcctattagctggatcccactggaagccagagggcaagggaggctgttgatgtaatttatgtaggttacctttctggggcaggggtcagaagggtggatccttgatctggagaagcaaatagcacaccatcctarattttttttcatctatttggccagtattattgaggccctgctaattgcaaagctgtaaatagtataagaccatatacaaaagacatgacttttctttcagggatcttgctctcttgtgtgggagaagagaccaccaccaaaaacaaaatttaaagataagtctctggaagatttgtgtttaggcggtgattgagtgccacatggactataagatgaagtgaaagtggtatcattcaaaaaaagaagagattcatatgcacacaaattgttagggaaggctttgtagagaaaacaaaacttaaacttggttataaagggttgacagtttttgtagataggatggcagtcacacatgcatataattggctcaaagtacaatgagtgtagactctagatgaaggtggaaactcatacaaagttaatgagagattttttaaataatttgaggtcatactttagaaggtcataaggagaaatctcagggttcgtgctttttaaaaactgtcctaatgttctgggagaggttacaaggtgccatgtggtaaaagtgttctgcaatgaaataaatgtataaaatgcatactttccaacccttggatgtatgcaatgtgtattcaacatattaaaagctctgaaaaatcttgctataaagaaaccactttttccatttatctatacttggtgaaagaacccatcccctttcccctactcgcttttaaaaatcaaaacatggtgaaaatcatatgaaacttcagtattctataaaacatatctttggaaatggttctataaataatgggaagcctttgaatagttctgaaggatttatgacatgattagaggggtatttttagggtattattctgacaagatggattttagtgcacatgatcatttaagaacaattgttattgcagtaatacaggcacatggtgcaggtctgaagtgaagggtagtagttgagctgcmaaaaatgcagacttctgagggccattaggaaagacatgacagcatgacttggtggttgattgaatatgggtgatgggagggactgaatatgggtgatgrgacggggggtgggagggagggaggcgggggaagagagagagagagagagagagagagagagggagagagagaaagtcagcaatgttacaaactataactttaaggcctaaatcttccagttctgtgggagtttgttaaactgcaatctataatgtacatagatcatcaaaaataaaatactctaaaagacatttgagaagactaagtgaaagtataaaaaaggcaacataatgcctattctgcaaatgagtgtaaaagaatatatcctgcaaataattgtgcattattaccctggtattaaaattgattgtgattcagagacttagaagagctgtgttctgaccaaacaaggtttatggaccagaccactgggactgtagccagctcaaactgtactcattggtcacacctgtaaatgtagaacttttattaaccccaccccccagaaaaagaattttggcatagtttacagtaagagccaactctatcttgtttatttgaggtattattaggagtgataatctaaaagcattgctaatttttatagtatttttctctcttaccttttaaaccaaaatcatgttagggaccaaatgcttgcttaatgtttgatttgagccacatactaaaagaaactgattggtgttggataaagaggtaaatgctaagtaaatcttttcaaaattatttgttattaagttattattaatcatccaaaaagggtgacaaaaaccaataactccataacatttgaggtcatgtttcttaattgatgctctctttgcagctataacttttttttttcatttcattttatatgcttgctgtcatttgcccatttctcttctttgcatgaatgcttttttgtttatcttgttacatgtgtttttatttatagaagacaaagtacaatgtgatacttcttcattattacttgctaaattccttgtttaaatggtaagtccctattttaatatagttttggggataaatttactgaaaatattcagtgcttatattttcagttttgaatttattcatattgtgacagtaattggtagaaaactgtttctcacagctgacaggccaaaaaaaaaaaaaaaaaagtcttggggacaaagctaccacatgccagagtgctgaggacccatcagatatttaaggaagtggcatttgtactcgcattatttaagttactgttgaaaaaaagagatgggaagagactatatttgtagcaagcatattatagaattcattttctaaaaaatcatgtttctgaagaatagaacatctatcagatgttttataaagcacatgtaactaatagataatagttcttctccaaaagaactggaaaccatgaatgctatcttttttagaatcccaaaatttaaagaaatatttctgcttcctagaaaatagtaattaagcccaaatttccaactgaatctcaatcaatagttgtactattttctaccacagaaatgctattcagtaaatggtataagtgatgatataatgtatacttaacttctgttttgccaattaacttagatcattctcaaactgtgatttaggggacggctggtgtccttaagaatccctcaggtggtgagatagccagtcattagttttaatgattatggctgtatttctctttctggcaaggatgaataattatgcttagtaagaaccatagcatctcattgatttctcatcaaagaaaacaaacattgcccttaattctgatgaggtatgctggacaaacaggaatgggtggaacagtcatccctactttattttatttttaatagtttatgaactaaattttgaggagccattactatagatcaagatactataactctttagaactttgaagatattctgttaaatcatctcagatccattactgaaatgaagactttaaaaccttcttaagaagttgctaagctgttgaacacttgaacttgaagtttacacaacctggcaagtatttttttgttctttttcctcatacatggtcaatatagtgggttgaatagtgtccccccaaaaaatgtatatccatttgaaacctcagaatgttatcttatttggaagtagggtgtttgtctatacrgttaagttaagatgggatcagattatggtcgactctaaatctaatgactggtatctttataggaagaggaaaggacacacacacacacacacacacacacacaccrcrcgcgcgcgcgcsaaagttgaaagcagagattggagtaatgcagctacaagccaaggaaggccaggagccactagaaaaggcaaagaaagattcttccctagagccttcagaggaccctccctccctatactttcatttcagactttagcctccagaacagagacaatgaatttctgttaagtcacacaatttgtgattctttgttatggcagccctaggaaaccaaaatagtcagtattcctgaacattctcccataaatatatatttttttgcctttttttttgtacaaatttctatcatttactaagctatgaagtacttgagaggagaactgtgtcacactcattctatacctgatttyagaaccccacaagtatttattagcatataactgtgggatagtcttattttttaagattcacaaatatattcttcatgagaacacgttagtttttattaagtatgcatattagagagagactggagtataaataactgtaaggatattttgtatgaaaaaataattgtagataattaccaggtttgggtttctatagttagcaaaagtaggataactgttgttatcatgtttatgtcccattcatatgaaaaataaaatccaaagtgggttttaagtaaatgaaatccctaagggactgtcaacctgaattatccagagaatattcagtttgtcataattttgctccaatattatagagcacagctgaaaataactgcttaactatcaaaattctatccaaagcacagatcatttataaagattaacatttagtaaaatgacttacaaatgtgtttaaagtaacatggtattttatgaagagctaatattcagaagtaacatctaagaggatatatacaaatttaaattttttaaactttaaaggattggattatagcttacatttctgagatatgaaaaattaccatcaagtaatattcttatctcaatgtaaacatattctccatttactagtataatttttatctctctttaaatagaagtagttttataagtatttgaatatttttgatcgaagagttgaaatactaccaatagaggtactaatgactatttgaggtggttgtaggttgttttttcacccgtaccagtttttttcatgaattttaatacacaaagattcccagtgttggttttaaattcttacaggctaagagagacttagtcttagagagattgtaggtaagaaatataattaatattttaactcattactgagaatagaccaatactttcgagtttaaaacttggtagacttaactatgtgactctttcagttactgcaagtaataaattatgaattataagcaacgtttagtttatccaatcaggtgaataagcatcacttgtaatggttaaatctttatgtgtccatgggcagacattcaagttatcttctactaataaggagaaaagagtcattgttcttagttggtaggtgacattttttcccagatatttgttcaccatgtgtcttagaggaaagtgaagattttaagggctacttaaaaattattttctctccgctttccaacgatgctttcacatgccatgaatcaatctaaaaatccccattgcagtcatgggcaaaccagatgtgcttcttgaagtctgacagttttcctgacatatcatgtgagtgaatcatatgggtaacatttttcataataaactccaatttgaaatccaggtatgaccaygtagatttgtcactaatacgctagagtcttttttagactatatttgtacttttggacttagaactattattttaaatacctaaattagcacagtaactttgatagcactgttttagccataggagattatttaaccttattcaaaattcattggtcctttataaacaaataattccatgattataatttaaattttttataaactcacatgatcattattagaggaccagttccataaattatggtacatttacacaatggatacagctgttaaaaaaagatatgttctatgtattaatatgaaaaaatcttcaactatattattgtataaaaaggaaaagtacagaacaatttgtagaataaactatttgtggaaaaacaaaagtgaggaaattctatgtatgtatgtatttgtgtgtaatatatatatagagagatatacatttatattgactttatatgcataaaaataatctgagaaaggataaactaataaagaggggttgccagttgtgtgtgtgcatgggtgggaacttaccagatgggactgcatgagggagtttttttattatatactattttatgctttattcttgaaccatgtgaatatattagtccaaatttagacagatagataatgttctgtttttaaaactatggtagtgaattctgttttatgaaaaatccagtaaacagaaaccaactttaaaaatggttacattcattcagacaatgggatattattcagtactaaaaataaatgagctatcaaaccatacaaaaacatggggaaacctaaatgcatattaccagaggaaagaagccaatctgaaaaggctatgattccacctacatgacacttctggtgaaggcataattgtggagacagtgaaaagatcagtggttggctgggtgcaatggctcatgcctgtaatcccagcgctttgggaggccaaggcaggcggatcacttgaggtgaggagttcaagacaagcctggccaagatggtgaaaccccgtctctactaacaatacaaaaattagccaggcatggtggcgcatgcctctaatcacaggtacccaggaggctgaggcaggagaattgcttgaacttgggaggcaggggttgcagtgagctgagatcacgccattgcactccagccttggggacaagagcaaaactctgtcttgggggaaaaaaacaaaaatgatcagtggttagagggacagagggataaataagcaagccaaaagtatttcgagtgcagtgaaaatactctgtgtaatactataatggtgagtacatgtcattataaatttatctgaacccatagaaagtacatccccaagagtgaaccctaatattaatataaactaagtagtcaccatgatgtatagtctcttgaactttttcctcctaactggagctttgtgcactgtgatcaatatcttcccaaacccctcacccacagtttctggtacccacaatttagctctgtttctatgattttgagctttttacacatcacatgtaagtgagatcttgtgatatttgtctttctgtgcctgcttacttaccataatgtcttcaagtttcatccaagttgttgtaaatgacaggattgccatctttttgaaagctgtatatatgtgtgtgtgtgtgtgtgtgkatgtgtgtgtgtgtgtgtgtgtatctacatctatattacattttctttattcaacatccattgatggacacttaggttstatccatatcttggctattgtgctgcaataaacatgagagtgcagatatctcttcagtacactgatttcatgtcctttggatatataaccagtagtgggacaactggattatttggtagtcttatttttaactttttgaggaaccaccacactattttctgtaaaggctataccaatttacattcccaccaacagtgtgcaagagttcgcttttccccacatccttgccaacacttgttatcttttgtctttttgatactagtcgttctaacaggtgtaaggtgatatctcattgtggttttaatttgcatttccctgattattagtgattttgaatatgtttcatatacctgttggccgtttataagtttccttttaacaaatgactatttaggtcctttgcttattttttaatcaggttatttttttttttactgttgaatgagttccttatatattttggatattaatctcttatgagatgtgtgggttttcaggtattttctcccattctctaggttgtatcttcactctgttttactttgtttgttttactgtgcagaagctttttagttcaatgtaattccacttgtctatttttgcttttatttcctgtgcttttggtatcatatccaagacatcactgccaaagccaataagctttttcttgttgtttgcctctaggatttttaccatttaggtcttacatttaagtctttatttggagttgacttttgtatatggtgtgtattctttttcatgtgtatatccagtttttccaacaccaatttattgaagagactgtcctttccccattgtggatttttggcatctttgtggaaaagcagttgactgtaatatgtggttttattttggggttctgttttctgtttcattgctctttgtgtctgtttttatgccaataccatgctgttttgattactatagctttgtaatagattttcaaatctgatagtgtgatgcctctggcattgttctttttgctcaagattgccttggctatctggggtcttttgtggttccattcaaattttaagattgttttttctatctctgtaaaaattatccttggaattttgaaaagggttgcattgaatctagattgctttggggagtatggacatgttagcaatataataaatctttcaatccgtgaacatgggatatcttcccatttatttgtgtattttaaaatttcttttattaaaattgtattaaatttattaaattttaatttaattaaattttaatttagttaacattttaataaagtaaaataaaattttattaaattttaataaaataaaataaaattttattaaaatttaataaaataaaataaagttttattaaaatttaataaaataaaataaagttttattaaattttaataaaataaaataaagttttattaaattttaataaaataaaataaaattttattaaattttaataaaataaaataaaattttattaaattttaataaaataaaataaaattttattaaattttaataaaataaaataaatttttattttaaaatttcattttaaaatttcttttatagtcttcagtgtgcaggttttttgctgccttgattaaatttattcctaagtattttttgtagctattgtaagtggaattgtttccttgactttttttctatttttaattttatttaaaagtttttttactttatttttttagagacggggtctcgctattttgtccaggctggtgttgaaccccaggcctcaagctgtcctcccaccttggcctactaaagtggtgagattacaggcatgaactaccttacttggctgatttcttttttgaatagtttactgttagtgtatttttgtatcccacaactttactgaacttgtttgttctaacagttttttgatggagtctttaggattttttagatataagaccttgtcatctgtagagacaatttaacatcttcctttctgatttggatgccttttatttatttttcttgtctacttgttctttctaggacttccagtattatattgaatagaagtggtgagagtgggtatttttgtcttgctccagatcttagaggaaaagctttcaactcttcaccattgtgatgtaaactgcgggcttgtcatatatggccttattgtgttgaggtacatttcttctatgtctaatttgttgagagtttttatcgtgaaagcatgttgaattgtgtcaaatgctttttctgcatctaccgagatgattatatggtttttagccatcattctgttaatatggagtatcacatttattgatttgtgtataatgaactgttcttgaatgcttgggataaatctcaacttgatcwtgtgaatgatccttttaatatgatgctgaatttggtttattagtattttgttgaggaattttgcatttgtgttcatcaggaattggcctgtgttttcttttcttgtagtatccttgtctggtttttagtattagggtaatgctggcctcataaaatgagttcagaagtttttttggaagagtttaagaaggattggtattagttctttaattgtttggtagaattcagcagtaaagccatcaggtcctgagcttttctttgatgggagacttttttattattgatttactctcctgactcattactgatctgttcatattttctactttttccatgatttagtcttggtaggttgtgtctcttatatttaaccatagtcttaatatccattttgctatatattatctatcataaaatctcttctgaagggcttagtgataacacatctgagaaagagggaaagttaagaatttgcatatgtgttttgtgagggaaccagaattaaaattcaagataaccttgggaataagcagttttaaagaccaaagtaaagtaagtatcccttcatttatgcctggcaaagaattcatgcatacttatgctattctttgtggatccaagctgggctacataatgatattctctactgttttgcactgtaattgcactccagataagtgagggactccccatgcttggaaagttaatagtgttgcccaaaatcatatttgttccccacccacctacatttatttctcttttgatctttctaccagcttttctgaaagtttctttgatcctaaaatcactacagctttctaggcagaagaagtatggctgctctacagagcgctagggctaatacgaatttcaagagcatcaggacttactcttgctcacccctccccttcagcagcacaatggctaggtcttaaacatgattttaactttctgtggtcaaaacctgacttatgatgattcttctactttcccatcccgagagtattaatacaaactgatagtacaaagctaatacatataatgcttactaagttccagatactattcttggcactttacatatagtaactaatttcatcctatgatcatattttattatccctactttttatataggataactgaggcacagggaagttaagtaacactaaagaatacaagtttcagagccaggtggtctggctccaatatctgcacctaaccaattgccttgcagagaaaaaaaaaaagtttaagttgatttgtttgtcagcatttgtctgtcagcttagctagtgtcaaagcattcccaggaaatattagccatttctagagacttgagaggcatttgagttaggggctgacctcagcaatttctgaaccagccatggctgttcccactagatgcacattgctcttggatctcagtgttgtaacatccattatcttctttctgatgtttcatgttatttaaactgtgatgagactcttgtctttatctggtaggattataacctgccacagagcccaaaagtgaaaaaaaaagaatcaacccagctatttccagaatcatatttcattccagtaaggtttcctactgagatattaaggtcaggaaaagtaaaaagagtaaactagagtattttggtgatgctgtatgtgcctagagttaaagtggcatttatgcaagggtatatactgtcattacagtgaaaggaaagcctttctagccatttatcaatgattttatagtccttacttcatggcagatggaataaaagaacaaagaaagtttacttccaaagcaatttaataaacatgaagtgaaaaaaatcaagatagacttgtttcttttcgcatttccctctcacaagtgccttattgacaaatgaattcatttctttttcatatcacaaatttaagtgtgtccctgaataacacccagcatctaatactttttttaagttctaatgtgtactggaactgagtttgaaaattcattcccttggctgtttcttccctttacaatttggagagttttgaaattacctttggatggctttcactgaggagatatgtttgcttgtttatctattttaaatcaagaaaaaacagataaatattcatattatttctcgctaactaactcagttggcaaattatttttttatcctggggttagtgcctactcacattaaactttaaaaaggagattgagtttaaaatgaggccactctttaatcaggtaggatgcctggaactatttcaaaggcatatatggtttttgtttttatrggaagtgaagaatgagacattagagttatgaaattaagattcttgttgaataagtaaatttgcctaaggttggggataatggaagtgtgtaatgatttgcaytgagaggttagtgttgtcagaagctatctcccaggcagctttcttcaagccattayacctgggccaataaccttgtttcccagtctcagcaaagttgatcttaatcctaacatccaaataagaattcttcctgtaacctttgtggtttttttcttcaagacatttgagtgaagaaccrccattcctctctatgacttagatgttactcatcttgttgctagaaggcagtcaggcagtggaaaatatcatctttgagaccatacaaacatcatggttctgacctaagtggattaagatgggtgattggagaggggagtggtggtagaaccacattcacaatggggygcactttttcaggctgcgtggttatgtctcgttgtttttgacacaaacatgcaaggtaaacatgcatcttcatcatctgttggggccaaggtatattttaaaaatcaatgtataataatgtccaaaattcagtatattatattagagttttgtgttctttttatatatatagaattttagtttggcaattttaaggatcaattatatccttgtggataacagctggtaattatatactatttgagtcaatatattgatgtaaccttttattaaaactgttataaataagtccctagagtatgtagtaattttttattaacccagccttacttggtacaaagagttttctttattaaatatctttttaaatcacaggtaaaagtttttagtccaaataatttaggatctcaaaaaggaccaaaaaagccgtataaggaataagacayggatttttaccctccgaaatttgaagaattatcagaacagggttacaaaatctgtagtttgtgaatttttatttagttgtggtaaaatacacataacataaaatttactatcttaatcatttcttaggctgtagttcagtggtattaaatatattcacattattgttcaaccaatctccagaactctttttatcttgcaaagctaaaactctgtatctgttaaacaacaagtcttcattcttcttctcccccaccattctgctttatgtgtttatgaattgaactactttaagtacctcatgtaagtagaaacatagtatttgtcttttttgtgtctggctcatttcacttagcataatgtcctcaggttcatccatgttatagcatgtgtcagaatttctttccttttttaaggctgaataatatttcattgtatgtgtatgtgtgtatttatatacatatatataaatacacacatacacaatgaaaattatatatacacaaattatgcaatttaaattatacacacacacacacacacacacacacacacacacacagtctgayatgtatagtctgatgagggacacttgggttgtttccatcttttggccctccgaaagttgaagaattatcacaattttggccattgtgaataatgctgcaatgcacatggacatacaaatatcttttcgagactctgctttcaattcttttggttatatacccagaaatggaattgctggataaagtggtaatactattatatatatattttttttgaggaactgccataatgtttgccttactacattattttacattcccaccaacagtgcacaagggttccagtttctttacaacctcgacaacacttgttattttgttattctggggtttttgtagaaaggatagtagccatcttactggttgtgaggtggagtagtgtattttaaattcaactttaacctagagaaaattatgatggaaatgatgatgaaatgtacaatctcatttacagattatggccaaagtctaaatttgaatactgtgctgactgacccttttctactctattgttgcgcaaatgatactcttcaaggaaggattatggcagcctgagaaatcaggaaagcatggcttggaactggccaaaacaaaatccagcaagatctctttgaaggtggtatttaaaaaaaaaatcataaaatttatgcactttgaaccttgtacagaatacagctgtcctcagactagaactactgacttggtgtagtaggtaaggtgaaggatttagcaagttcagttttcctttcattaccaatttatttccttaattttctacatgtaaaagattggaaaagggctgacagacagtagtcagcagtaacactaattgacaataagaaatatcttcattattgcaaggtggaagaatcatttaaaagtcaaaaagtcacagtaggacactattttaacatagtggactatgttgtgtttataattagcatgtgatccaaagagaaagtgagtacacaaaggatgtttagttcactaaggcaggaaaaaaagaactctaaagtatttttaaattcttttcattaaaacaatcagactgagaatatttgcttttcaaaggarttggcttcatttatctaaaaaatgctatcatatggattagctgattttccagtgacgcagaaaagatgacatatggtacagagtagcatatattcaagtgtccaaaaatattctcataatctttcccatgtaaaatccaattgttctcttaattttaattttctagaatgatgcttctaatctccattagcctcctcttttgcccacctaactgctatttgatagatacctctcacagaaagtttcccatttctctttacttcacaattctgggttccttatttttcctgtgtggtatcacagcacacagcattttctttcttgtacttatcgctctctattgcagtcaatctgtgttcctaaccatctgacccctgagaccaccagtgtgtcccagatcagtaatagccaaagagacaaagttgttatcatgctgagaattgtatatagcatacatcttggtatgcctccaggaatgtgaggccattaggttgtcagatatgagtcatagtgggaaaaatattagggtcattgaaccagagtgtgaacaacttgagccttctttctttttctcccacatatagcagtgtttgacctaggcattagtataaacactaaagtgaagagtttggatttttgctgtattaaaaaaaatgcattgtagaattgagttttgtatagggatggtgttagaattgtggtacaataaaactattataagatcattctcttccttcttccagaaargatgtaagattgaagactcaaagatagaggcataaaattgcagtgaaaggaggaatgtaaagtcagggtggggaaaaagtagaaccagatatgaggcactaatataaactctgattagctatgcattttctaagagtggactcaaatgcaattctgacctttgtagcaaccaactcaaaaaggagaaacctttaagtcagaacctcacaatggctctgaggtcaatcaaacaactacttagagaagtataactattttttcttttccaaaaataaagtagctttattttgctttcattcgaaaaacaatatgttacttattttaaaaaaatcaagcaataaagtacaaaatcttatataattaccccactagagcacttgtggtcatacccctaagcttcttggtagtcagtccagaaaaggaaacagttggtcgcacaactcatactgctcaatttatattccaaacagtatragagcttgttaattttcctacactcttaataacactgggtctgtgttgttaatctttcctggtcctataagagaaaaattatatttgttattttctctttttttcttttgagacggagtcttgctctgtcgcccaggctggagtgcagtggtgcgttctctgcttactgcaagctccgcctcccgggttctcgccattctcttgcctcagcctcccgagtagctggaactacaggcgcccgccaccatgcccggctaattttttgtatttttagtagagatggggtttcaccgtgttagccaggatggtctcgatctcctgacctcgtgatccgcccgcctcggcctcccaaagtgctgggattataggcgtgaaccactgcgactggcatatttgttattttctattatccttaatactaatgtctgatgtgactttttctatggtttttataagtagacactaatgtaatgaacaagtattcttgataacatactttgattaatttgataagtttttttctggagtattataataacactgaattatgggtaatggtatttcaccaggtttttaattcagtaaaaccagtttttctggggcgaatatgatagtgttcgttattcaacctttttgttgatttggctttattcaggaacatatttgtgrtagagaccactagcttcctaccaaaatcactttttccttcttcgtggatacacaaactacctttagcagctccatttgaaattaagtgtgctatgtgactaagttttctctagtgcattgtaaatgaaacagatgtgagtcacttcattggcatgagccataaaaatctccattatgtgttcctgggtgctctttttctttctgactaaatgaaatggcagtgttcagggaagccttagaagtcatgtgttgaaaatgactgagtagccatcagcctggatctttgaatgactgcatggaaagaactgcatggcctacctgaacattcacccagcactgttgcataagaaacaaatacacttctaattatttaaactacgtagttttttagagtctgtttgttactgcagcttagccaatcccaattaatacaatattttagaaaatataactgaacagaaattgagctagattcaaatgatccatgtcatcaggatatgcaccatctccataacatgactctgaattggtttcattcatagatagattttctccacatagtagaatagatggcccagcaatcacaggtcttacatggtctttatagcttatgatcatagaagctgagaaagtatcttttcctggaagcaccagcaaaagttctaggaagactcttcattggcccagcaggggtcatgtacccatccctgaaatagtttctgtggctaaaaggatagaataccatgggtcaaatttggttaacattcctacctctaagtagaagggtgatagtcccacacaaccccatggacaaagtaggatcatatggaatggagtagtttcctaaagaaacaataaagaatagacatcagaatacaatatggttaggtttttaaaattaatatagacatgaaatgagagggacctggatgaaggtcttggtgtggatataaagggaaatattgaaataaaatatattttgttgaaagtttgcattgtcagggagggaaatagtagaaaaaacaactgaactttaaaaaacaattaaaaattttaattttggtaaaaaataaaacatatgaggtggtaggatcacttgaggccaggatcaagaccagtctgggcaacatcaygagaccccatctctacaaaaaatttaaaacttagctgggcacgttggcatgtgcctgtagtcctagctactccagaggctgaggtgggaggatttttagagcccaggagttcaaggctgtagtgagtcatgatcacaccactgtactcattcctgggtgacagagtgagactatgtctctagaaaaaacaaaaataaaataaaaatataacatcttaagcagtttgaagtgtacagttcaatatttttaaatatattcacattgtaaaaacaactgtagtttttgaattaggaaatgagtaaagtaatagtcctatcaaaatatttgagagatttgaaaggaaatgcagttcaggcctgggagaggtgggtgtcataaacactgatcaagcaggccagaccataggtttccaagtcctagggagccaatagaatagtcctgggcaggtgatttgtgagacaggagtagctaacagtgaggaaaatggtctacacctgggcagttgacgtcaccattagaccaaatctcagtagcattcagtaacgatttctagaactgagatacagggcaaaatccaaggaacaaaacccccttgctacttaattggtaccagcaacaaaagtgacttcatattgacaractgacttgggatatcttacatgttcctctgcttcaatgcaaaattcccacaggtaggaacttataggccttactcataaagatcagacaatttcagggactagatgctaagctcagtattacaggaagatacagaactctgtgtagcagaagtataaagacatacaagtagagagcrttgctttaaacaaaagtttatgactggagctcattgagtggttagagttatagatgtaatcctgttagtttccatcgctgagataaagttaaaataatgagagctgttctctcatgtgtcattagtataactttaaggggtcactgcaaagtaggaatggaccttattgttatcaacaaatatttgagtgtttcattatatgtagtgtaagatttaaatttcacaagacaaggagatgtatattaactcttaagaagaggaaaatatatatagtattgctttgttttagcattctattcctttatttaccatgtatgccactacagaagactttatacttttatatgttttaataatatggcaagtttcccaacttacaaatcagttgaatcctaaaaattccatgtatgtagcttgttgaaattcaacacattttaaaatagaaattgtgttgtaaattgtagttctgtttccagaataattcacaaattgcttttaattcacaattcatcttcattgcttcatattagcaaacattgattagcagtgaaatcaagtggtaaagtaactctacaggtttttgaaaggagatatgaaagataaaaaaggagttgtatgtgtatatgagaaaaacactttttcaggtgggtgtgagtgagctgaaataaaaaaggcagaataaaaagcccaaattatgcattatctttctaaaggtaagaaagcagatactgatttcagatttttccaatacctttgccagccaataagtggtgctattgtcacagaatagttaggttgttctgcagcacaaagcaaagggggaagatgtggaaagtatatgccaagtggttgtaaaatgggttgtgaaaaggaggcagaaataaaaaagggaggcagcatgaacctgactatatgtggacactgtttttgtagtataggaggtgattatgctagtacattttcttaaatttccatgtaaaaattaaacataattcaagacacacctttccttatccattcaattttctttgagctttagtttcctcaattataaaagtgaagattgttgtgagaattaagaaaataaaaataaagtgtctattaatatcatatacataatgctcaataaatataattctgctcatctaaatgagtcagataacattaataagccaaattaacataatattattgacacgttgctaaattagcctaaattacatgatcttcagaacctggaagcttataagaaagtagcaagaaatagggaaaaaatgttgagctttgtcatttgctactaagaataaagaattgttcaactccaattattttattcttttgtaggtaaatatccaggcatgggctatcagtacatccttgagtagagaggcaggctccatttttatatgcactctgtttttggagacccccatcttaaagtaataccatgtggcatatcttactattagtgactgtagtgtttatctttttgagcatcattgagaaataatgaataagtaggtaaaaattgcaagattaatggtctttttgcagccttcacaagcaaaatggaatcaacttttctttttcatgctcctacagcctgccttttggtgcaatcacagcttattagcatatctttctaacagcgaactaaaatagagaacaaagataaaattcatgtcatccaattttgttagttattagccagggtaaagtttgtcataggaagagtttaaacgaatgactaaaatcatatgatgctatggctgggcacggtggcccacacctgtaatcccagcactttgggatgccaaagcaagaggatcacctgaggttggcagttcaaaaccagcctggccaacatggtgaaaccccgtctctactaaaaatacaaacattagctgggcatggtggcgcgtgcctgtaatccccagctactcaggaggctgaggcatgagaatcgcttgaaccaaggaggccgaggttgcggtgagctgagatcacgccattgcactccagcctgggcaacagaacgacactctgtctccaaaaaaaaaaaaaaaaaaaaaaaaaaaatatatatatatatatatatatatatatatwtatwtaggtgctatataaaaacttttgatggaattttctatcctgtctttccttttactgctggtaattggcctcagactacctaaatctttcccttcacagcagcctgcagttctggggagtcaaagtattaaaaatgcctctccagtgaaggcctgcttgcttgatgacaagtgaattggagagttgtttttccctcttgttgttcagacttctttgtcttttcctaagcacttcttattccaacatgagaaaatgacttctcactgaactcatcctttctgaacactggaagcaagccttaaatcaagttctagctttaaatcatagattcacagctgaagtaggctttacatgttcttggaaaacaggattgtagggaaaatgctacattgtcttacaaccagttactcagtagtttgtgaaagattgcttgactaactaaatgaagaatagtatagggaaagaagtaaatgtatggtggtctttctgcccattggcaagatcttgattttgtttagtaaatgaatatatgtattcacagatggactggggaatctcagaagtacagtacttggtctgaatcaatgattttcacaggactctttagaatcctaggagtgtgaggaggtaactacatgtaaggggaggggagaaaaggtgggtggtactctgaacccctcccttaaccagagaggctctgcttgaatagttttgtaaattgaacctctaaagaggatatttttaaagacaatagtttgaaaattattggcatccgagacttttaccaactaaacccaatttttgagcttgggaatctggttcacaaatactagtgtagttcctgttaacttgataactatcacatttcattagatgattatgtgatctccttctatatcagaatgtttctatttattagtgatcagtggtgcctggtggctaaattaaatagattaatgaagggtattagtaatttcatggattaataaatataattttttaaaattgagaactaatgtaccacaaaatgcaatctgtttatttttattaaattattcatatttaaaactgccacatattctgtgaattagtaacagtagataacagtacggtctttgactcttttatggtctgtgattaatgaccaagtatttgatttctatgaaaccatttgggtctagaagtcaatcacataatcarctgtatctgctacatttcgaatctgaaaataagtttgggcttggcccaagcttttcacatactataattttataattctctaaattctagtaatatttgccatcatttttaattatttccttccatctctctttttacctatatattgaaagccctagtgttcaaattagattttcaaagtgaaaattaaatacttgattatattattttataccacactatgaatatttactaattttgaaagaaaatactctttttatatatatttttatatcaagggtgtaccagattggaatttgtttgcttgagtcactataaaataagatttccaatcacattcataaatgtcctcttattgtaaaatagttttgttaaaacttgaaattcttgtataatgtcttaaagcctatttaatttagctaaaaaaattttcatccccgccttttttccttcctttttgtgtgtgtttaagacatcttaactcatgttataatttagatatattcatagcagaatcacctaatattcatttttctgayattttgttaaatgttcacattttcaattatgaatatacttcatacattgtagacaatttagctttacaaaaaagtatagaatgtattaagtgagtgaagtactttcaaaagttgatttctacacatcaatcaaaacctgaaatgactacttctttcagctcttcatagtgaacacattattacatggactaaatagtcatgcattcatcatttatattttttgtttgaatggttaccttcttttggagagtagatcaggtgtaattgtaactgctttttcagcagatcaaaaattcctttcagtttggaaaataaatggtttttcaacataatattcaagtgttatttctttgttttttaaaaacagtttttgatgtgtgatttccacagtaatggaagggaagtaaatgaagtaaaggcatttctaagacttacatgtttgatttgggaatataatcagaagacctgcttaacttttaattataaatcttcttagattaatgcaatagactattcagtgtatatttgttggttgaattacagatgtttttagaactttgaagttttgtttgaatataatgctctcatggaacctttaaaaattaacggtcaataagagtttattgtccttgtgcaaagcacaaacacaaatttacaataggttaatcttttttcttaaattgtgatattcttatgtattttcagattgaaattttatttgtggctttaaaaaaaattcattaatgaagtccagtttaaacgtaatattggtgtgctataaacttgccacaggacattttcactaatataggaaataggttacttggaattgttctgctgtctttctgggtgtagtttaagaccttttatcttttcagatctgaaaagctaaatcatattatataaagcatttcagaataaccaagcattttgatrtaatattggattttctgtgatagaacaagttgagattccttataggacacttgtaaatatgaggaagctaataagattttaggtaattcattgaactagtaggcagtcttaaaaattctgaaagcttatctgtaagacttctataattgctttaaaaatattatctgtggagatagtcttacatgttcacataagtatatgtaggacatgtcagattatagaatcatcacattttcaagctggagtgcctcctttaattactgtgaggaataatagcttatgatagtcatgcataagatgttagtttttaattgggtatctgtaataatactatatgcaagctttataaatgctaattttaaaatcttaaacagaaagagcttatgcttggagtcatagaaatgcttaggttcaaatgctagctatactactttaatcagctgtgaacatttggataagttaactaccctatacctttttttttctcatctgtagaagattgttttaaagataaaagataaaacatgaaaggaacctaaacattgcttggtgaacagcaagctcttaataaacagatgctgcaactgagtaactttagtcaaattacacttcaagtcatgtgtaaaaatggctttcagtataagaattcctattttagtgctcttaatttgtgttcattttatttgtaatggttcagaataacaaagtttgaaagcccacaaacctaatatatgtagcgtggtgcttggctttcagtagttctcactttcatacattgtgcattgatacttctaaacctccttttgtatgcagaattcagtctcttatacatcaccaccagtcaacaaactgatttagaattatcacctgattgtactgcttgctgccactgctataaaaggagagacatcagtcagactataaggatcttattctggttgtcctacctatttgatcaccattcctccaacccaggagctcgtgtcaggtttgcttatatacaagggaacaactatctcagaagyatgtcacctcactcagcccagcctctctttcaaccccaaagtcacctccaaattccacttatctctcctcatgctaccccatcaatgtaaaatattgggctagaagtagacaactggttgaaaactatcaccaagaattatatatgcttgtgggttacagctctatagccctctacctttgatttggtactagtggaagaaaatccctcctccackgtcttagatattttatgagcgctgaaactctgaaatgtaaagattaaaggctgcccaaatatctctcctggcctgtgtgaatggattaggaaaggaatagtggctcaggaaaggagagatgcctgagtctgctgtttcattcttaggaaccattggtgtctcctgccacaggtaccttcaagagtcatactcacctacagggtcactgaaaccctaggaaggcagtatttgtaagtagtaatattagaaatcttatttctaaccatcctttaaataatatcttgcgcagctttcaaatgtgtgagaacactatatgcagaagaaagggaaactttctaaataaaaacaatccctttccattaataatttttatcagaactagtcatgatagttagaaaatgatgcttttccaactctggtacttgttccacatttactattcatcatcatggtaagcaagagcccttttatcgctccaatttttatttattcatctatttatctatattgtttagtgctgtggctttattaattcctgggtttttctcagtgttatatatagtgctcagacattttggtttcagaattcctttagactcttcataattattgagagaactttgtttatggaatatgtattgatattttttataataaaactaaagggtcagaaccatagctatatctcagccccttgggcccaggatgatagagtgtgcctcagagcaatagaccatggcttagtgagagaattgcattcacttgtacctttgagagtgaacctatacatcaggtcccaggtgctatagtggttttgaaagaccttgagctgaggaacccaactctccagacactctgagcatctgtgctctggatcccagtgctgccttggcagcctgtgagccatgtcagatctgacactgagagagatcccctaagctaagactcaccactgtgaggataacaagaatgagaggattcctaaagcctgtgccctaataacctacactgctgcagtcagtaccacaaactcctgaagcctagaccagggaggcacctgaagttatttccaacattggtcactgctgaagatgctgcatggaatcacattactgtggtgacatagaaccagagccaccacattctgcttatctggtggcatccttggtmccatctacatgtgaaagtcttcacctataaaaaccactctgtaaagtttggaagaggtgactgtaccagcagatgtgcagatatatcaacacagatacacaagaaacatggaaaagcaaggaaatatgacaccactacaaaacaaaataattcttcagtagctgaccaaagaaatggaagtttactaattgtctaaaagaaattcaaaataatgaacctgaggaaactcattaagaaagaagacggtgcaaataggcaattcagtgaagacagaaaagagtttatgatctgaatgagaaattcaatatagatagatatcataaaaatgaacaaaacagaaatcttggagctgaagaattcaatcaatgaaattaaagatacaattgtcggcttcaacagcaggctagatcaatcaagcaggagaaaaatatctgtgaatctgaagataggtctgttggaatgactcagaggaaaaaagaatgaaaaagagtgaagactgcctataagacttatgagacaccattaagaaaataaatgtactatgggagaaatgcacttagaggagaagagacagagaaggggacaaaaagcttatttaatgaagtaattgctgaaaatttgtcaagtcttgggagagatatggatatccagatccatgaagctcagagctccccaaatagattgaacccaaagagctcctgtttgaagcacattataatcaaactatcaaaagtcaaaaccagaattgtaaaagaagcaagaaaaaagcatcaagtcacatattaagaaatctccattagactgtcagcagatttctcagcagaaaccttgcaggccargagagactgagaagatatattcaaagatgtatccaaagaaataaactgacagttaagaatactatacccaacaaagctgttcttcagaaatgaaggagaaacagtctttcacagagaagcaaaagccaagggaattcattactgctagtccttccatacaagacatacttaagggaattcttcaggcagaaacaaaaggatgacaattactatcatgaaaacatgtgaaagtataaaaaccactggtagaagcaaatatccagaatactttagtattgtaaaggtagtgtggaaatcatactaatctctagtataaaggctaaaagtcaaaaccaggttgggcatggtggctcatgcctgtaatctcagtagtttgggaggctaaatgggaggattgcttgagtccaggagtttgggatcagcctggataatatggcaagatcttgtatcttcaaaaaagttaaaaaaaaaaaaaaagttagctgggtgttgtggcacacacaagctactctggaggctgaggcaggaggatcatttgagactcaggttgagtctgcagttagccatgttcatgccactgcactccagccaggagtttgggtgatagagcaagaccctgtctcaaaacaaacaaacaagtcaaaaccatcagaaataattaaaactacaataagttgttaaggaatacaaaaagatgtagactgtggtatcaaaaatgtaaattggtggggagggtagaagtccagagtttttgtatgcatcaatgttgagtaattatcagcttaaaatagtagattataaccataaaatatgttatttaagcttcattctgaccacaaaacaaaaaactacagcagatagatgaatgataaagagaaatgaatcaaagctcagctacagaaaattgtgaaatcataaagataggcaaaaagaggaagaaaagaacaaaggaactacaaaacaaccagaaaacaaatagcaaaatgacagtagtaagaacttrtttatcagtaataaacttgaatgtaaatggattaaattttccaatcaaaagtgatagaatggttagatggagttaaaaagaaaaacaagatccaactatatgttgcctacaggagacctacaacagctttaaggacacacataagctgaaagtaaaagaatggaagaagatattccatttaatggtaatcaaaagaaagcaagcgtggctgtacttacatatgataaaatagacttcaagtgaaaaactattgcaagaaacaaagaaggtcattagttaatgataaaagggtcaattaatgaagaggacataaccattgtaaatctatatgtacccaacattggagcacctaaatacattaagcaaatattaatggacatgaagggagaaatagatagcaatactataagagtaggagactttagtacccccacattcaaaaatgggyagattaatcagacagagaattaataaggaaatactggacttgaattgcacttttgaccamttggaactaacagacatcttcagaactttgcatccaacaacaacagaatacacattttgctctagcacacatgcatagaacattcttcaggatagaccttgtgttaggccacaaaagaagattgaccatatatctagtattgtttcaaactacagtgatatgaaactataaatcagtagcaggaggaaccttggaaaattaacaaatatgtggaaatttaaaaacatgctcctgaatgaccagtgggtcaaagaataaatcaaaagagaaatttctaaaatgtcttgagacaaatgacagtggaagcacagcataccaaaacatgggatgcagcaaacgcatttctaagagggacattatagcaattaatgcctatgttaaaaagaagaaagatttcaaataaattgtctaacattacacctcaaggaaccagaaaaagaacaaactaaaccccaaaaaagcagaaggaaggaaataataagattcagaacagaaataaatcaaataaggaacaaaaaaaacatagagtcaataaaacaaagagttggttttttgaaaaacaaaatttacaaacccttaaccagtctaagaaaaaaaaattcaaacaaaataaaaaatgaaagtgatgaaattatagcagatgcctcagaaataaaaaggtcatacagtactattatgtacaagtatatgccaacaaattggataacctagaggaaatggatgaattcctagaaaaatacaacctaccaagatttagtcaggaagaaatagaaagcatgaatagaccaatattaataaagacattaaagaagtaatagaaaaccccccaacaaagaaaagccaaacaccagatggctttgtagctgaattctaccacacagtcaaagaagaattaatgccaatacttcttaaactcttctgaaaaatagagcttcagagaatacttctaagcatattttatgaggtcagcattaccttgatacctaagccagacaaagacatcaaaagaactacaggccaatttttctgatgaacattggtgtaaaaatcttcartaaaatattagcaaaccaaatccaacaacacatcaaaaggtgtatacaccaggaccaagcagggagatttattgctggcatgcaagactggtttaacatacacaaatcaatgtgacacttcacatcaacagaatgaaagataaaaactacatgatcatctgaattagtgcaggaaaagctttcgacaaagtgtgatattctttcttgttaaaaattctcaacagtttagttatagaagggaagtttctcagtgtaataaaggccatttattaaaaacgcacagttaacattataatccatggggaaaaactgaaaacgtttccactgagatctggtgcaaggcaaggacatgcactcctgccacttctgttcagcgtagtrctagaagtactagcaagatcaatcagataagaaacagaaataaaaggcatccaaatcagaaaagaagyagaattatctctatctgtagaaaacatgatcctatatataaaaaaaattttaagattttagcaaaaataaaaaacccgttagaactaataaatgaattcagtaaagttacaggatacaaaaattagcatacaaaaaaaatcaagatacaaaaattagcattttaatacacaacctaactgaaaaagacgtaaagaaaccatcccatttatgacagcattaaataacataagatactaaggaataaatttaagcaaggagatgaaaaatctgtacaccaaaaactataaaacattgatgagagaaattaaagaacacacagataaatgcaaggatatcccatgctcatggatcagaagaattactattgttagaatgttcatagtacccaaaccagtgtacatatgtaacacaatctctatcaaaattcccatagcattctatacagatataggaaaacaatcctaaaatttgtatagaaccataaaaggcctcaaagagcccaaacaattctgagaaaggaaaacaaatttggaagcaactttgatttaaaattaataaacacttactttctgatttaaaattttattacagagctatagtaatcaaaacagtacggtactggcataataataggcacatagatcagtggaacagaatagagagcctagaaatcaatctatacatatatggtcaactaatttttgatcaaaaaaaatttgatgaaaaatctgcggatgatcaattcacttatataacatggcataatatttgtatataacctatccacatacttctgtatactttaaattatctctaaattacttataataccaaatatagtctaaatggtatgtaaatagttgttatactgtattttttaaatttgtattttattgttgtgttgttgtttcatcatttttttccccaagtattttcagtggtggttgactgaatctgcagatgcagaacccatggatacagaggactgattgtatacagagaccaggaacaaaacagtggttacctgggacaggaaggggtggttgggagaagtagggagatgtatgtcaaaggatacaaagtagcagatatgtaaggtgaacaaatctagagatctaatgttcatgaggactgttggtaataaaattgtactgtgtgtgggattcatgctaaatgagtagattttagtcgctcttgcgacacacaaaaagggataactgtgagatgatgtatattttaattttttttatgactagatgtttcttttttttaattattatgctttaagttttagggtacatgtgcacaacgtgcaggtttgttacatatgtatacatgtgccatgatggtgtgctgcacccattaactcgtcatttagcattaggtatatctcctaatgctatccctcccccctccccctaccccacaacagtccccagtgtgtggtgttccccttcctgtgtccatatgttttcattgttcaattcccacctatgagtgagaacatgtggtgtttggttttttgtccttgcgatagtttgctgagaatgatggtttccagcttcatccatgtccctacaaaggacatgaactcatcattttttatggctgcatagtattccgtggtgtatatgtgccacattttcttaatccagtctatcattgatggatatttgggttggttccaagtctttgctattgtgagtagtgccacaataaacatacgtgtgcatgtgtctttatagcagcattatttgtagtcctttgggtatatacccagtaatgggatggctgggtcaaatggtatttctagttctagatccctgaggaattgccacactgacttccacagtggttgaactagtttagagtcccaccaacagtgtaaaagtgttcctatttctccacatcctctccagcacctgttgtttcctgactttttaatgattgccattctaactggtgtgagatggtatctcactgtggttttgatttgcatttctctgatggccagtgatgataagcatgttttcatattttaatttgcttcactctagtaacctttttactgtctattcatatcccacaacatcatgttatatcccttaaatatatacaatgaaatttattttaaatacataaaagtgagatttttaagtgtttattaattcattttaaaatatcactaataaatccattacatgttaacataaagaatgtatggatcactatactttacctctttcttcctcccggatcttgaagttctgccttaatttgtaaaacttcctttgtatagcatatctgatacatatctttaattggcatacattttcatttttagtattttttaacttgctttactgcctatgcttaacaaggcaatcttttttacttttatcttcacattttaaacacaattgaacaaaagaaatgttattaacacacttttacaagaaatttctttttcctcagaatgtcagagtaagttcagaaactgaatattgattttcctttttaagttatgcaacaatgacatgaaaacctttatattttccatgtggtaggaaaaaggatataggtacaattttaatctcataaatacatgcgcacatgtatatgtgtttgtgtatttataatctattagttacaatagtctgaaagggaacaataacatgttaatatgatattttgagtcacgcgcttacaggtcatttttatttttttctactttttggtattttccagattttcttcagtgaagttttaatgaatctattattaggattaagttaattgatttaagatgtgtcttccacattctgaaacaccttaatgaaaggcagtggtttttcttttttggaaagaaatagtgatttttactcttttacttttagcttagcccttgtattttaccaaccgaaatgtcagtttgtagatgtaacatttgtagtcatctgaaagtctggcaacatatcttagtggttaagtgtctaggatctggagtcaaaagacccatgttcaaatcctgatatctgtttgctagcaagtaaatgtcttaagttctcttaagcctcaatctctttataaatgaaatgtacaaattgtttatttaaatgaagtaataatagtacctcatagcattgtatagcttaaatgaaattactcatgcagagctaaaacttagttcaatatctggcacatggtaaacatgccataaatgttagtgcttttttttttttttttttcctgactctggaaatctaggacctctcccttcttccttcaaacctaacaaaacattgttgtgaactacaggattttttgaaatcaagggtaaatgtaatccaagcaagactttgatattcaacacccattacctgtccataggagtttcctgctggttgtattggtttctatgccctgtaacaccatatgtgtggctgggcctgtctctacaacccagtgtggtctgcagtgtggtttcccaactgtggtctataagatgactttagatgacacaaagacaaccctttaaattttttaaatctatttttatgggtgagcaaaaaacacaactagcacattaagtcagtgattacatgaatattttttagagtaaggtaaaaatgagtattgaggaaaaatgcaaatcactgtaaagaaaaatattaggttatagtactctaaagtatggcaaaaattgcaaagatggtacttgaatggctgaagtttaggtttctgctctagaggctccttcccatatctgtgtccagggtgctcatacactgtcccagaagctcagtagtacatgtgaaacctgtcttttacctaaacccttgtcatctacgatatgccttgggatctcaccttttattatgttttcttccttcctttctttctttttttaaaattaaatgggctccatatatttctaaacaaagaaataggaaatctaccatcctcctaaggcaattagctcaacagcagctagctttttctttttttaaagtttggaaaaatatactgttatatctacagtctttaaatayatagattattgaccattactaccttcctgaattcaaaccctgtgtttcaattaaatataatattgtttagtattaaataaaacaactgtgtactgttttayttaataatactcattgagtccaccaatgtcaattatttttgttgtattaggacttattgaacctacacatatattggattaaatgtttttgtcaccaagttaatttttaaatgtaaattagaacctaaaattttgatgcttgagcaggtacttaaatttgctgtattcactacgatggaaatttttttgctgtgataaatagagttgtctttacaaatattgcatgaaagcatattagtataagtaagtgtacagtttgtgcataattccttactcagtgggaggcataaattccattcccaattcataaaaattgaacaagtagtatttattccaaaaaaagggagtagttttacagtgatttattgaggagataaacatatctgattacaaagaatttatttaataagctaatagctttattttatattactaaagatgtatacttttttaaaaaatctttatttcaactatttctaaataaaggtttattcagtgattgtcctgaaattaaactagctcattaattactcttcctgtctttgcatacacacacacacacacacacacacacacacacacacgcactcacatacacacaaataggcataacttttgattttttaaatccttgggagaccttacatgaagttgatygacctaagagtaggaatagaaagttattttttttgttgcagatatgcctgtagtatatatgcatttagtagtgctactgagaacgatagacctgtctatcctctccccatgtgctaaactttatggatgtacatttaaaaacttatagaccatacatgtactttgaggatcccatgtatttgcatttttattttagacaatagttttcctttctataactattactccaaaaagacattcttacattttggtaattagataaggactacatgaagacatcggtatttgactaacacattttgaaaattgtcacataagcttactttaatatatgctaaattataaatactaaatttatagtaacttgttatgatgtatttatatatgtgaatgtaaatagcattttagtaaacatacatgtacatatattgaacctctactgtgagagaaatgcagttgtcattgttatatgctccttgtaccctaatccttgttcctaccacttttagtatcagtcccttgtcctactgtaaatttattgggtaagataagcaaaaggtaactcctctttgtagaacttggggaacctctgcgttaggattaaatcagcctgattaaatgacttcataatgaaatgcagaacttcctgaccacatacttaagatttattagccattaatgggttgtctatgaactcccagcctttcacttaatattactaagatggaagaaataaaaccagccattcagctttcttaggctttccttttatgtcgtcctttctcctgcacagtcactcccaggagtttcctgtccacacttaaatgaatttacagctaatagaatatcaggtagtgtaggagagagatttgcaggcatcaaggttaatttctttaattatgtaagtcagtatatttagcatagtgtaagattggcttaggagtggtaagagaaaggagtattttgtaaggtccaaatttctctccctgactggtctgatcactgttaagccatgctgctccctttatcattcctcactaatgacttctctgtctcagctcacattccctggagtaggcaggcacacttgttaaatagtaggaagtagaaagcctacctggtttccccaggctcaaaggttcagtgagaaagaaacatgttttgaagcaaccattttgataaagctgctttgaaagatataatgaagactttctgaaaacagaagaaaataacaattagttttatgccttctgtataaacttaaaatatgcactaatcaacttttattgagaaatataagcattaggcattctcattccattcttgacttctcaccaacttttactttactgttctctctgtttcatgtttctgcattgctactattccactccagatattaatctctcatctgaagaaccatagactttgaaattatgataaaagatcaaagggagacaaaacagcagcagctggtctctcaatgtggctctaacagtaacatacgaacttagtagcttgtaagtggtcaccatcagtctaccatagccataaccaaaccaatgaccagttttgttaaattctcttaagaggaagtgattcagatgggccacagaattcaacccatggcttggctcccttgggtttgccagtgtattagggagagggtggctgcagggtcttgtggtccattacatacttagtaacagcaatgaatatcgattttcttgggtgattgcagcagccattgcttcctctaagatatatacatgtaagtcagaagaagttgaacttgctgttgattattaaaatattttttattggccattagtgctctataggattaaytggttgctctttttctgtacattaaatctagatttatttatttatctatttatttatttattttttgagatggagtctcactctgtagcccaagctggagtgcagtggctcgatctcggttcactgcagcctctgcctcccgggctcaagtgattctcgtgctttagcctcctgagtagagtagctgggactacaggtgtgtgccaccatgcctggctaattttttgtattttagtagagatggggtttcaccatgttgcccaggttgatcttgaactcctgagctcaggcgatccacccacctcggcctcccaaagtgctgggattacaggcgtgagccactgcggctggcctacctttaatttttgtaggctgtggtaaataattataaatttttacagtagtttagaatttgccttttgtaatatacctaattcaaaatggaaatctattctcgttttcctgttaatttaattcttttactatataaggggttatgcaatattcaaagattaattgtagaactactgtatcataggttcatttaaaaatgtattaatgacttttgtcttataggacaaactattcgagagaaaagaattgtagaagcagcaaataaaaaagaagtagactatgaagcaggggatattccaacagaatgggaaggtaagtttctgcttttagtagaatctcatgggaggtaagttrtataacagtatacaaattcaataagagcatatatagttatatactgtttctctttgcaaaaaagttttagttctgaatgtttgaaactttgtttttttaacattgcatttctttgaaagttgtgaaggtgctgaattttagtaagcagatgcatgtatagcaaaaagaactattaagcattatcagagctgagactaaggtgaggcaagccaaaatcctaagatgcaaaatttaagcaggcactcactttcatgtagtgacccagcacttgcacaatcctaggatttgaatcctgtttctggcactcattacacacatgaacttgcaaagtaacttaaacttttagttttttcttttataaattatgcataatacttgctgtagataccatttggagtattttttcaactcacaataactctatgataactgactgcctgttaagacaaggatggatgctcgatccctttcctaagactttgaagttaaaataaaagatcaaagggagacaaacagcagcagttggtctctcagtgtggctctaacagtaacatatgaacttagtagcttgtaagtggtcaccttcagtctaccatcaaagttttattgcataaaaagctaattgattttagaaaagctaatattgcagaaaaagctgatttactgagaagaaaacggaaactagttcacaatgagaagtacatagagagaatatttcctagttttccaacagctttctggttcccagttcagtttctctctgaatgaagttcatctgcaagactgagttcaaaatggcacctcataaccatgttatgtatttctgttttttgcttaccagttcctagcatagtgcctggcacattgtaaggcacctagtaggtagttaatcaatatgtattgaatacctgaggccgggagtggtgactcacgcctgtaatcccagcacttcaggaggtcgaagtgggcggatcatctgaggccaggagttcaagaccagcctggctaacatggtgaaaccccgtttctactgaaaatataaaaaattaggccaggtgtggtggctcatgcctgtaatcccagcactttgggaggccaaggcgggtggatcatgaggtcaagagattaagatcatcctggccaacatggtgaaaccccgtctctactaaaaatacaaaaattagctgggcatggtggcacgtgcctgtagtcccagctactcgggaggctgaggcaggagaatcacttgaacccggggggcagaggttgcagtgagccaagatcacgccactgcactccagcctggtgacagagtgagactccatctcagaaaataacaaaaaattcaaaaaattagccagtcgtggtggcacaggcctgtaatcccagctactcgggaggctgaggcaggagaatcgcttgaacccgggaggcagaggttgcagtgagctgagattgcgccattgcactctggcttgggcaacaagagcgaaactccgtctcaaaaaagaaaagaaaagaaaagaaatacctgaaactgggtaatttataaaggaaaaaggtttaattgactcacagytccgcatagctggggaggcctcaggaaatttacaatcatggcagaaggcgaaggggaggcaagcaccttctttgcgtggcagcgggagagagaataatgaaggaggaacttccaaatacttataaagccatcagatctcatgagaactcactcacttcacaagaacagcatggggaaaccgcccccatgatctagtcacctccctccttcgacacaaggggattacaattagaaatgagatttgagtagggacacagaaccaaaccatatcacccatttaatagatggagcacctaaggcctaaaaaggttagttaatttacctgggttatatagcttcatacgtgggtaaacagtagactcattgcttcttggttggcatagcatgataccttacatgtggtagctataggcattatgttacttttatgccagcatgtgaatgtaaacatcatttcagtaaaaatatttttccatttctgcttactactagaactatgaggaaaaaaaaamccataaaaataagtagataccaaaggttttttgaagaaatacagaatataaattggcaacttctaggaggggtaattgagctttcttattttagcagactctccagtgttataaactacatttacaattcttggataatgcgtgcaccttcttagaatgagtttgtttttatcattttttccaataatagtatagaattaagatgtttatagaaatgttataaataaatgagtacgtaatgactcatttttcagcctttgagactttcagagagtttgaatgaagttctaatctttttatggctgtcctgatctagtaatttggcataactctcccatgggacatatgtttaaaacaaatgtatcaatcaaacactaaacaaaaattatttttatggtggtacacatcaattaaatgtgaaaaataactcagcaccatgaaaaagtaaattaagtattttcaggttcagatgaatattgtatttgtcaattttactgggacctgcaagttgcatattctcccacaatgtagattaaacaatgtgccctttttcttcgtttatttagtaggtatctattaaggacctctacattcatagagcttattttctagggtgggagaaagacaatacaccagataaataactagactatattgtatgttaatggccacagaaaataaagcagggaaagggcatagggagtgttggggaaggttttgcagtttttttgtttgttttttaagatggagtctcgctctttgcccaggctggagtgcagtggcgcgatcttggctcactgcaggctccacctcccaagttcacgccattctcccgcctcagcctcctgagtagctgggactacaggtgcccgccaccacgcccggctaattttgtttttgtatttttagtagagagagggtttcaccatgttagctaggatggtcgccatctcctgacctcgtgatctgcccgcctctgcctcccaaagtgctgggattacaggcgtgagccaccgcgcccggccgttttgcagttttaaatagtgttcagaaaaggctttactgaaatgacttctgaataaaaacagaaggagctagtcatgcagctaaccagctgaagagcattactggagagcaagtacaaaagccctgaggcaggaacatgctcagatgtttgaaaaacagcaaggaagtcagtgtgattgggatagaatgagagagaaattaatagataaggttagagagttaataggattgtgaatstggggggccttgtaggccattttaaagactctggcttttactgtgagactggaagccattgtagggttttgaaaagagtagtcatatgttctgaggtatatttaacaggatcactatggctgctgcattgcaaatagacttagrggaacataggcaaaatatggagacaggaagctcttgtaataatttaggcaagagattaattgtgacttgggccagagtaacagtgggagtggaaagaagaagttgcattccggatctgtggtaaaagtaggaccaacaggatttgatgacatattggatgtggagcatgagaggaaagcagacagtaattactcttaagctgttttggcctcacctggaaaaaggagttgctgttaactgacatgtgcagttaaaggagtgcagtgaaaggagcaagttaggggtggaaaaatgaaatcaattttggacatgctaagtttgagatgcctattagacatccaagtagagatgttaaattgtgtatgagccaagaacttagtggacatatctgtactggagataaaatttgggagttgtcagcaaataaatggtgtataaagcaatgagactgaagagatcacacacagaatgagtgtaaatacaaaatgagaaattcaaacactgacccttaggctgctccaaagtttagttagagacaatggagaccaaaaaggagctgccagaaacataggagaaaaaaaaagtgtcatgtactagaagccaaatatcaaggaggaagaagtaatcaaaatgtcaaatgaggtctgaaaattaactctgctttaaatacaggaactattttgtctgacaaaaatagttctgtagagtggtaggagcaaatgcatgatagaaaaagaagtatagcaagagagaatttggagagtctgagaatagacagtgtttatgaggagtttatctgtaaagaaaaggagaatgatgaagcagtacttggagaggaaaatggagtcaagaaatattttcttttgttttaaagacagaagagaattttgtaatagtgatgggaaagatccagtcagaaagaagaattgcaggaaagaggaagtccttgagaagacaagatgaggcaggacctagtaaacagggggaagagttgacctttgaacaaaagcttggaaaattcatcaatagtgatagcagaaaaagagtctgtgggcatatatgcaggtagatgggtagatgtggtaatgagaaattgtgtaaattctcttctaattcttactaatgaagaagagtgatttaagtaagttcctaagtatcaatagcaactagaacccagatttgaacccaaattatctgcttccaattttttactcaatattatactgcctacatcatttataacttggctaactcctatttattactcaagttttggagtagacattacttccctttgtaagctttttctgacctggcccgtcacccccagtgataggtgagatgttccttttttttgtttttatctcactttggacctcctccaatcatgacatttaacacactatagggggttccttgtttacttatctgcatcctccgccctaaactggaagattttttasaataggatccttaccttattcatttttgtattctcagggcctagctcaatagtttaagtaaatataagctcagtcaacatttgttgaatgaatgcatttcaaactgaaagtatgttatgtaagtatgtttaaggaaaaggcattttggggagtctgctggcttgctgaaaatagtctgttttaagaagaaagacatggaacagtagaccagaccaatttttttcaaacatatagaagatttgatcaggtgcactggctcacacctgtaatcccagcactttgggagactgaggcaagcaggtcacttgagtccaggagttctagaccagcctgtacaacatgtgaaacgccatctctaccaaaaatacaaaaaattagccaagtgtgatggcacacactggtattcccagctattcagggggctgaggtggaaggattgcttaagcctgagaggcagaggttgcagtgagctgagatcgcgccactgcactccagtctgggtgacagagtgagaccccgtctcacaagaaaaaaaaaaataggagattcttggacaagattcagctgtgggagatagtatagtactaactactgggcaatgttataaagtttcagtgaaccttgtaagtttaattcatggcattatttgtagttcttatgtagaggctctcatatttgtctctctataattcagattgttgtatttatctttcatttttgttatttttcttgtttttggtaagtttaagcttgtttcgtgttaacagtaataaacattttttatgagaaccctaaaatacatacaaagcagaatatagttggaggaggcagaaaggccctgatccagttaagctttacttatcacatrtactcattaaaatagaagattaatgcctcagaagagaaataaaaattactttttaggtatattagaccatacctgtctatcattaacactgttaataattaatatctcagtataaaatgtcatacccacttttattgcttttaagttaataattgttcataattattcaacatgtctttctcaggccacaggaactccttataaagaattttcaaagtaagcttcataaaataatagaccaggatgttgctatccctgttctagaatcaagacttatgttatatccatgttctgcaatggtcatttactaccttggtcattttggcaaagggatttacctcctatttttcatctataaaattaaaacgctgagttcataaccctttaagcctcctatctatctctaatgctctatgattcatgacccaagaagtatctcgaataaactcacattgcgacgcagaatctctggacttccagaacaatttggttgaacctccagtacacttgaatagaaaagattagagagaatattcttgcattgtttctgaccttagcattcaatctttcaccattaaatatgttgtttgtaggtttttctcatagatgcctttatcaagttgcagaacttctttccttgatggggccctctgccaatcctctagggtttgttctctatgtagctgtcacccaactggtactctgaactgtgaacttgcgtgaccttggtctccctagactcccagctccatcttcttaacttatatagtctgctggattttgacaggattccctccctggggcacaaccgaaactcaaagtagtaaactggggcgatcgtgaggtcagccttcgtttatttaacgttctctgagaccactgtgtttcattattcaatgtccattgttttgaagattgttgttttatgtaatttgtccttgttgctccatcttgactagaagcaaaaggcagcttttttttttaacataccttaatacatttgagatttgtttgtgtacttgcatgaatcagtaagtttattcctttttattgctgactagaattctgtcatattgatatatctttttgcattaactagttgaaagacatttgagtcctttctactttatagcaattatgagtaaagttgctatattaattcatatacacattcacgtacaaatctgtgaacagaaattttctttcaaataagtccttgggcaggattggtaggttttattttaagtatagatttgattttataaaaaactgccaagatatttttcaatgtggctgtaccattttgtatttaagtgtaagtttgattttataaaaaactgccaagatattttgcaatgtggctttaccattttgtattcccattagtagtgtatgagagttcaagttgttcatcatcttctccagccattgctgttgtcagtttcattacatttgagccattctaattggtgtgttttgatatctcattgtggttttaatttytatgtctctaatgactaatgacctagatcatcttttcatgaacttatttgccatctgtatatcttctttggtgtacttttatatctttttgcccagaatttttttaattaaaaaaattagttttgagaatttcctatgtatcatagatataagtcctttatcagatatgtgattagcaaatatttttcacagtctatggcttgtcttttcattggcttgtcttttcattctcttgacagtgcctttcaaagagcatacattcttaattataatgaattccagtttatcatttttttcttttatatatcatggtttcaatgttgtatgaaagaaatctttgcctaacctgaggtcaagaatattttgtcctgtgatttcttctagaagtttggggttctacagttttgggttttacattaaagtctatgatacatttttatctgtttcatgttttttatggcaatctaattttccagcaccgtttttttaaatgaccactattttttccattgaattgccttagcacctttgtcagacatcaattgactatggatgtgtctatttctgcattttctattccatccatggagttatttatctttttgctagtgctgattgtcttgattactgaggctttgtaacaagtcttgaaataaatcattttgagtctgccaacttctttcccaaaatttttgtcttggttagtcagggcccatataaygtttttacactttaaatatgtgcagtttattgtacatcagttatacctcaataaagctgtaaaagaataacatagtcatcttggaaaaataagttactgaatgaggatagtaataatgatacaagcaagggatacaacaaaaaagtgtcagaactgactcttttcccagtctcaggatttgacttaatctagaagactatttgaaatgtggatttgccccaatctctttaactgaagaacgtcaccttgggcatagattagtcttgagatactaagttatataatatgaagttatcccaagtaacagagcatgtaaagatcaaatgcccagacaaacctctatagtttttccagagatatttaaagttggtgtcatattcaatccaggactttccaaagtttctttaaatttaatgataaatgttttgaaatcttttttgaggtttcttaatagcgaaagcaaaaacttacataccattgggaatcatttatttgttcttcctgttgtgataaaaatgtctgtagtaaaaactttaacagaaataaaaagcaatctggcaaggaactaaaatatatttcttcatcagcatacattattggaaagccagcagaaagcatggctgaaggaacatgtatttggacaaagtatgcagggcactgcactgccaaatggatgttacaaatgtttttagcatgtcttctcttataacagaaagaccatacttcttaatttttgttagtccccaaagcaaagataaactagagaagatatagcctcagcagtaaatgacccacttaataaaaacaacgattcacaggagaaaaaaaatgtgcatgagtgtaagattgatggagctgctgctttaggctacaaggacctgtaatgaagttcctgagattgtgcaaataaaattcatcattcttggggatgaaatagaagccaagagtgtacatatatactttattttttagagatggggatcttgctctgtggctcaggctggtctcaaactcctggcctcaagyaatcctcctgcctcagcctcttaagaagttgggactacagacacacatcaccatgcctataagtacactttacttttttctttctttcttttttaaattttagattcaggggttccatgtgcatgtttcttacatggatatattgcatgattctgaggtttggacttcaactgaacctgtcacccaaatagtgaacatggtaccctccctagtttctgttgttcccatttttatgttgatgtatactcagtatttagctcccacttattagggagaacatgcagtatttggttttctgtttctgcattaattcacttcagattatggcctcctgatgcatccatgttgctgcaaaggacataacttcatcctttcttatggctgcatactattccatggtgtatatgtaccacattttctttatccagtctacaattgatgggtatctaagttgattccacttttttgctattgtgaatagtgctgcaataaccgtgcgaatgcatgtgtctttatggtagaatgatttatttttctttggatatatactcagtaatgggattgctgggtcaagtgatagttctatttttattagtagttctttgagaatcgccaaactgctttccacttaggctgaactaatttatagtcccaccaacagtgtataagtgttcccatttctttgcaacttcaccaacatctcttattttttgacttttaataatagccattctgactggtgtaagatggtatctcattgtggttttgatttgcatttctcagatgattagtcatattgagtattttttcatgtttgttggccatgtgtatatcttttgagaagtgtttgttyatgccctttccccacttttaatgttgttttttttttctttttgatttattaaagtttcttacagattctggatattatactttgatgtcttacatttaagtctttaaaccatcttgagttcatttttgtatacggcgaaaggtaggggtcaacttgcatttgtctatatatggctagccagttatcccagcaccatttattgaatagagttttcattccccattgtttatttttgttgcttactgcaaactctgcctcctgggttcaagcaattctcctgcctcagcctcatgagtagctggattacaagcacacaccatcatgtctggctaattttctatttttagtggagatgggatttcaccatgttggccatcctgaccatgctggccatcctttcaccatgttgagatcctgacctcaagtgatctgcccacctcggcctcccaaaagtgctgggattacaggtgtgagccacccctccggcctgtagttttcaactatagatcttgcacatgttttattaaactaatacctaagtgtttcttgatttttttggtgctattgctagttgttttctattttaatttcaaattattcattggtaatacatagaaatacaattgattttgtatatcaactgtgtacttttaagtgatattgttaaactcacttatcaattgtatcatctttactgtaaacttcttgtggttgtctgcataaacaatcttttccttctgtttcttctattctcatgcgtaagcctttgttttttcttgccttactgcactggcaaggaacctccacaataatgatgagtagaactggtaaaagtgaacaactttgccttgttcttgatcttagcaggaaagcattcagtttttcactgttaggtatgatattagctgtaaggttttttagatgcctgctgtcagattaaaaagctgtcttctattcctcggttgctgggcatttttatcatgaatgctgttggattttgtcaaatgtattttcttcatttattgagattatttttatgattttttttttcattctgttaatatgatttattacattgattgattttatttttaaattatcctcccttttcattgtggtaaagtatacataacataaaaatttccattttagccatttttaagtatacagttcagtggctgtaggtacattcactgtttgcaactatcagcagcattcatcgccagaacttttttcatcttcccaaactgaaacttcatgcccattgaaaaacaactctccatttcctcctttctcccagtctttggcaaccaccattctactttttgtccctatgaatctgactactctaagtacgtcatagaaattgaatcatacagtatttgacctttttatgtctggctgatttatttccctcagcataatgtcttcatggttcatccatgttacaggatatatcagaatttcattccttttttgggctgaataatattccattgtatatagataccacatgttgtttatccattcatcgaatgatggacactggagttgcttcccccttttgattattgtgaatagtgctgctatgaatataggtatacaaatatctgtagatttaaacctatgtaaataggtacagtaaatttaagtggtctagaaatgccacacaaaaagcagaagttgtcagaatgatatatatagaagatagctacatcagacaacatgacccaattgacataggacactccactgagcaattgtaaaatgcacatttttttccatatgctcatggaacattcaccaggatgggccacatattctttccagaaatgtgggagataggaatacttctctactcattttattaggccctgtttaacctgatatcaacctgacagaaacaataaagagatactacaaaccagtatcctacataaacatagatgtagaaatcactaacaaaatattagcaacctgaatccagcaatatataaaaagggcagtataccatgaccatgtggagtttatcccagtaatacagattggtttaacatttgaaaatccatttatattcagcataataacaaaaaggagaaaaatcatgagttaattccagttggtacagaaaagaattgacaaaattcaatatacatttatgattaaaaactctccacaaacttaaaatagaaaagaagcgcctcaacctgataaagggcattaaggggggaaaaaaacctacagttaacctcacattcaatggtgaaaggcagaacactttccccctaagattgggaacaagacaaggatatcttctttgactatttacatttcacatcatcttggaaattcttgtcaatgcaataaagcaataaaaataaatgaaatgaatacagataagaaacagatgayatgattacatgtagacagtctacaaaaagtacgtaaaaattaagtgaattttgtaacttttcaagatacaggggaatataaaatcaattatatgtctacataataataccaaacaatttctaagtaaaaatttaaattatattacttcaaatactattaaaaacttgaagatttagggataaatttacaaaaatatatccaagacctttacattgaaaaacataaaatatcagccgggtgaggtggctcatggctataatcctagtactttgggaggctaaagtgggaggatcacttgaggccaggacttgcagtccaacctgggcaacatagtgacaccttgtctctacaaaaagtaagcactttagccaggtgtggtggtgtgcacctgtagtctttccagcctactcaagagcctgagatgggagaatcacttgagcccagaagtttgaggttatagtgagctgcaatcattccacagctctccagcctgcgtgacacagcaagatcctatctcttaaaaaaaaagaaaggaagaaaagaaaaatatgaaatattgctgagaaaaattaaagaagacttaaatagagagatgtacaattttcatagatcagaagagttaatatttaaaagacagtatttcccttcaaattgatctgtaaattcattgccctccaatcaaaatactaacagcctttttggaattgatatgctgattttaaattttgtattaaaatacagagaacctagaatactcaaaacttttttggagaaagaacaagattggagaatttaacttaatataaatctacatttatcaaggtggtttggtactgatgtaaggataattatacaattaatggaaccaacctgaatatccaggaattttctcacacttatatggtcaattgatttttcaatagcaaggaaaattcttttcaatagcttgtgttgaataactgaatttccatatggaaaaaatataaaccttgaacattaccttatataatcctccaagaaatttaacttgggatttatcacagacctaaatataaagctaaaactaataaacttttagaagaaaaagatgaacaaaaatctttcaattatgagtagtcaaaaactattaaataggaccctaaaacacaaacttaaaaaaaatgataaattggacttcaccaaaattttacagattcttatttttaacagatttattagagcaaaggaaaatacaagccatagacagggagaaaaatttgccatacatgtctaacatcgaacttatattcagaatatgtaaagaactctcatacctcagtgagagaaacattaattttaaaatggacaaaaggtataaacagacactttaccaaagaggatttatggtgtggactaaatgtggttcccccacactcttctaccccattcatgtgttgaagccctaactctaaatatggtggtatttagaaatatgggacctttgagaggtaattagagttagatgaggtcatgagggtgaggccttaatgatratattagtgcccrtaggagaagaggcaccagagagctgtactctctccctgagcatgcacaaaaaaagaagtcatatgggtacacattgagaagatggctgcctacaagccatgagaagaagccccagaaagaagctgattatactggcatcttgatctcagacttccagcctccagaactgtgagaaaataactttctgttgtttaagccactcagtctgtggtggtttgttatggcagccgaagcagactaagacaatacataaaatcagtagtcatcaagggatactaattaaaacaacagtgaagtaccactacatacaactagactgactaatattttagaaattgataataccaacaaaactgacaatacattcatgaagatgtaaagtacctgaaactttcatatatttctgactagagtgtaaaatgttacaactactttggaaaacagtttattagttctttatcagtttaaacatacacacttatcctacaacctggacattttatggctaagtattcacccagagacataaagacataagtccaaacaaattcttgtaccggaattttcccagcagctttattcataatagccaaaaactgaaaaccactaaaatgtccaacaagtgagaggataaacaaattgtcatacttccatgcaaaggaatactacacatcaataaaaaataatgaactgctgatatgctcattatgtttgtttttattgctgtatgtcaacattaccacaataataatagcttaaaataagacacatttattatcttacagtttctgtgcatcaggagcccaagcacagcctagctaggttctttagttaagggtttcactaagctgtaatcaacccaaggctgggttctcatctagagacttgattaggaaaagctctaccatcccacttgtgtggttgttggcagcattcagttcattgctgttgtaagactgagagcttcactttttcactggttgttggccaaagaccacactgagtcctagaggtcactggcaatttcttgccaatggtgtttcccaatatggccacattttccttacagccagccagggggaaaaatactccagccaagatgagcaccataatcttatataaygtaatcacatgagcacatatatcccatcacctttgccgtgttcttataattagaattcatgggtcctaccctcaytcaaggagaagagataatacaaatrtatgagtaccaggaggtggtggttgtgtaggctaccttaagagtatcactcattgcctggggactatgggtaggataaggtgggtgtttccatgtaaacagactggggaacttttataggtgatggaaatgttctrtctgttgattgtggtgctaattacaggattgtaaatatttttgttagaagttgtggaattgcacacttgaaatggctcacagtattttgtaaattatacctcaataaagttaagagaaaagacagtaatagccatgagcaccacaaaatttgtaacttaaagatgccaacttaataatatccctaagatatccttaaaagtcaataattggaaaatgatttgtttcataatatatcctttgaaggattttcacagtaaaaactgtggatctcttatttttatagtcctttatgaagtgtcagcactcagaactagcaaagatcatttttttaaagatgaggctttattacagtctcttctgtaagtgaagtaagcacatatttctaatgcaatatcttttggatgcagactattgataacctttccgtaattttggttctgaatggttacctactggatctggtgatagagtatttcatttactttagcctctattgacaacgcttctaaaggtgtacttgccatttttagcacctgtggagatttgaagagtgtatgcttcatgaagtattttcttgcttgattcttctagtctctttaagtgattaaagggtgctttaatttgcatactcacctttaatcttattatagtggcttatattctaataggaatattaaagttcagtgaaaatctcatacatgctgatgagaatgcaaatgaatattgatgaaagaatgctaggatcataaggtgtaaactgtccagttatcttgctaaattcatttcaaacaatgtttacattataatgaggactgatacagatttcaccacataaatatcactagcagtggcaaaattatataatttataattggataatggttcagtttcagactgttttgaagttaacaaaaacaacaaagtaatgtcttgatattaatgcaaacttcagctggtcatttgttgtatgtagtagttgggaaattgggtatgattttacaaataagtggtcacgttgagcatttccggctgtagcctttacaggatgcataacaaatagtagtggcatcactcatcatcccaacaggacatttcaagtatctggttattgtacaattataaatatacaagcttatttcagtagttatgtttatgtatctgtgtaaaaccaagattcattaaatggtcattgaaaatgaagctaaaagaagtcccctgacagtaaatagactaggcaatatttattataatacattcagtatttaagttctattacattcttatatyaatggatgaattttataaacttatgcaaaaccagtaagctttagaaaacatataacagagtttctccaacctctttaactactttggaatttttttaatgatttgtattcaattgaagtattttttttttcagccttacaagagaactgaaaatgctgttttatagactcatcagtagggcagattgttatttagagttgtttttctcatggtgacgataagtgtgcattatgccattatactttttcagcatggtcttatgcccactggtgtgtattcatagactctagaatacatggtaatcattagttaaaagtataataatcaataatgatttttattttaaataatatgaaagtgtttttgcatcaaaatatgtatttttcgctaaagggattatacttaattgtagccctggcacaggagttggcaaactttttctttaaaggtccggatggtaaatattttaggttttttatgggccacttagtcagttacaattactcaactctaatgttgtagcacagaagcagccacaaataatatgtaaacaaatgtttgtctgtgttccaatcaaccttatttctagacactgaaattttgaattctctatgattttcatgtcatgaaatactgttcgtcttttgatgtttttgcaaccattaaaaaaatgtaaaaagtggtaggctaaacttggcttgcaggctatactttgctgacacctgtcctagaagttgatttttctaaagctagaattaacttctactctacattaaaactgaagatatattgctgaaaccttttatagatatatagttcatgttgagttattttaaaaggaagctgttttctagaaaaaaaatcataattatacataagtaactttatttttaaaaaaacttttattttaagttcaggggtacatatgcaggtttgttacataagtaaatgtgtgtctggagattttgatgtgcagattatttaatcacccaagtattcagcctagtaccccattagttatttttcctgatcytctccctcctcccatcctccrccctccaataggcttcagtgtgtgttgttcctctctaggtgtccatgtgttctcataatttagctcccacttataagtgagaacatgcattatttggttttctgttcctgtgttagtttgctaaggataatggcttctggctccatccatgtccctacaaaggcatgatcttgttcttttttatggctgcatgtattycatggtgtatatttaccacattttctttatccagtgtatcgctgatgaacattcaggttgattccatgtctttgctattgtgaatagtgctgcaataaacatacacatgcatgtgtgtttataatagaatgatttatattcctctaggtttatacccagtaatgggattgctaggtcaaatggtatttctgtctttaggtctttgaggaatctcacactgtcttctacaatggttgaaccaatttacactcccaccaacaatgtatagcattcctttttctctgcaaccttgctagtgtctgttattttttgactttttaataatagccattctgactggtgtgagatggtgtgatttgcatttctttaacaatcagtaatgagcttttattttatgattgttgaccacatgtatgtcttcttttgagaagcgtctgttcatgtctttggcctactttttaatggggttgtttattttattttcttgtaaatttgtttaagtttcttacagatgctgaatattagacctttgtcagatgcatagttggtaaaaattgtcttccagtctgtaggttgtctgttgactttgttgatagtttcttttgctgtgcaaaagttcttcagtttaattatattccatttgtccatttttgcttttgttgcaattgcaacaaaattgcaaattttgttttgagaattggtgtcttctcatgaaatttttgcccatttctatatgctcagtggtattgcctaagttgtcttccgaggttttgtagttttgggttttacatttaagtctttaatccatcttgagttaatttttgtgtgtgtataaggaagtggtccagttccaattttctgcatatggctagccagttatcccagcaccatttattgcataagaaattctttccccattgcttgtttgtgtcaggtttgttgatcagatagctgtaggtgtgcagtcctatttctggactctctattctgtttcattggtctatgtgtctgtttttgtatcagtaccatgctgttttggttaccatagctctgtagtatagtttgaagttgggtagtgtgatgcctccagctttgttttgtttgtttgttttttgttttgtttgttttgtttaggattgctttggctattcaggctcttttttggttccatatgaattctaaaatatttttttctagttctgtgaagaacgtcaatggtaatttaatgggaatagcattgaatctgtaaattgctttgggcagtatggccattttagcaatattgattcttccagtccgtgcgcattgagtgtttttccatttgtttgtgtcatctctgatttttgggcagtggtttgtagttctccttatcgagatctttcacctccactgtattcctaggtacttaattctttttgtggcaattgtgaatgggagttwgtttgtaatttggctctctgcttgagttttgttggtgtataggagtgctagcaatttttgcacattgattttgtatcctgagactttgctgaagttgcttatcagctcaagaagcttttgggctgaggcagtggggttttctagatacaggatcatgtcatctgcaaacagggataatttgacttcctctcttcctatttggatgccctttactttttttctcttgcctgatttccctggccagaacttcctatactatgttgawtacaagtagtgagagagggcatccttgtcttgtgccacttttcaagggaattgtattagtcagagttctctaaagggacagaactaataggatatatgaatataagaaggggagtttattaggagaattgactcacacgatcacaaggtgaagtcccacaataggccatctgcagctgaggagcaaggaagcaagtctgagtcccaaaacctcaaaagtagggaagctgacaatgcagccttcaatctgcagctgaaggcccaagagtccctggcaaatcactggtgtaagttcaagaatctaaaaactgaaggacttggagtctgaagttcgagagcaggaagcatccagcatgggagaaagagtaagtccagaaggctcagcaagtctgctcattccgctttcttctgcctgctttattctagccatgctggcagctgattagatggtacccacccagattgaaagttgttctgcctctcccagtccactgacttaaatgttaatctcctttggcaacaccctcatagacacacccaggaacaatatattttatccttcaatccaatcacgctgacactgaatattaaccatcacaggaatgcttctagcttttgcccattccatatatcggcagtggatttgtcatatatggctcttattattttaaggtatgttccttcaatgcctagtttattaagagtttttaacatgaagggatgctgattttaattgacagccttttctgcatctgttgagataatcatgtggttcttgtctttagttctgtttatgtgatgaatcacatttattgatttgcatatattgaaccagccttgcgtcccagggatgaagccaacttgattgtggtggataagctttttgatgtgctactgtattcaggttgctagtacttygttgaggatttttgcattgacattcatcaaggatattggcctgaagttttccttttttgtggtatcaaacactgccaggttttggtatcatggtgattctggcctcatagaatgagttagggaggagtccctcttttttaattttttggaatagttttagtaggaatagttccagctcttctttgtacatctrgtagaattcagctatgaatctgtctggtcctgggcttttttggttggtaggctatttattactgcctcaatttcagaacttgttattggtctgtttagggattcagtttcctcctggttcagtcctgggatggtgtatgtgtcaggaatttatcaatttcttctagactttctagtttatgtggataaaggtgtttataatattctctgatggtttttctttctatggggtcagcgataccccgtatcttttagatacaccaatcaatcagatttggtgtgtttacataatcccatatttctcagaggttttgttcattctttttcattcttttttgactattcttgtctgcctgtcttatttcagaaagaccgttttcaaactctgagatcctttccttamcttggtctattctgttattaatacttgtgattgcattatgaaattcttgtattatggttttcagctctatcaggttggttacattcttctctatactggctgttttgtccgtcagcctctgcaatgttgtatcacaatttttagcttcttcgcattgggttacaacatgctccattagctcagtgaagtttgtttttattcatattctgaattctacttcggtcatttcagccatctcagcttaagcgcagttctgagccctttctggagaggtgatgtggtcatttggaggaaagaggccactctggctttttgagttttcagtgctcttgcactgattcttcctcatctttgtggacttatctacctttgatctttgaagttgctgacctttggatgggtttttattttttagtttgtttgtttcttttaatagtctagtcagttttccatagggctactgcagttttctggggatccactccagtccctagtcaccttgaattttccagtacctgtagacatcaccaatgaaggctgcgaaacagcaaagctggcagcctgcgcctttctctgggagctccttcccagggagatacagacctgttgccggcctgaatgcacttgtaggagggggctagagaccccagttaggaggtctcacccatttaggaggaacaggatcagagacctgcttaaagaagcagtctagctatgctttcatagagcagctgtgctgtgctgggataccgcttccacccctggtcaacttggactctccaaagcccggagcctggaatggctatgtcaccgaaacagcaaagatggcggcctaactctccctctgggagctctgtctcaggaagttctcaaatctctgtcagcctgagaacatgggcagggtggctggaggccccagtggggagctcctgcccggggaggaggaacagatcagggggccactttaaagaagcagcctggccacattttggtagaacaactgtgctgtgctgggagatcccttttgtttctggtcggtttggactctccaaagttcacaggttggaactgcagagttatccaaacagcaaagatggtggcccttccctcccccaaggaactctgtcccaggtagggggcgacactgttgccagtggttggctggaattctaagccagtgggtcttgtcctttgaggcactgtggaagtggggcctgcggaccatcactgcttagccccctcgattcagccttcttcctaggggtatgtacagaggtccaacctcctgccttgacagagctgcagtcactattgccaggaagtgtggagcctaagtatgtagagctgcgcctctgtgcgtgcctgagtggctgctctgccaagagtccacacagctctgtgtcagaccaaaggccctggtggagtgggtttaggaggagatctcctgactcagggttgcaaagatccatgggagaagcatggtttcccagggtcacacatttgaatactcaccacttccctaggtgggggaggttcccctggctccatgtcgctccagggtgggctgttgtgctgtcttgcttttcttcattctccaggggtcgagttgtttccttgattagtaccaatgcgagtacctggatgtttcagttgaaggggctatatttactcgcccctttggttgctctccatgagagccacgtaccctagctgtttctagtcgtccatcttggcctgaatctaagtaactttaatttgggccataaagaggcaattgaaaaattcccaaagtcacttatttccttgactacacaaaggaattgtggtattgctaagctggattttctaataaagatcaaaatcctgatagaacaaatatttttcrcaaaatattcattcaataatttttaaagtaccacctcttttatagcatttaaaagagtaaataccccaaaagagtaggtacttaaaatgacagaaaaataaatctcccatgggtacctcctgcctttgacaaccttacagactcacaagggagattaaaacctttgcaagttggccaggtgtggtggctcacgcctgtaatcccaggactttgggaggctgaggcgagcagatcacgaggtcaagagatcgagaccattctggccaacacggtgaaaccccgtctctactaaaaatacaaaaattagctgggcgtggtggcgagtgcctgtagtcccagctactcggggggctgagacaggagaattgcttgaaccagggagtcggaggttgcagtgagccaagattgcgtcactgcactccagcctggcaacagagtgagacaccattgcaaaaaaaaaaaaaaaaaaaaatctgtacaagttttggctagaaattggccaaataggagtaaaagctaatagaaacagaatacaggctgggtgcagtggctcacgcctataattccagcactttgggaggccaaggtgggaagatcactgaaggtcaggagttcaagaccagcgtggccaacatggtgaaaccccatctctacaaaaaatacaaaaattagctgggcatggtagcgagcacttgtaatctcagctacttgggaggctgatgccagagaatcacttgaatccgggagacagaagttgcagtgacctgagatcacaccattgcactacagcctgggtaacagagcgagactgtctcaaaaaaaaagaaagaaggaaacagaatgcagaaagaataacaagggtagaaatttagaaacagtagtagagaatggagaacactggaactgtattggagatacatgtaagggataagtgcaagagagaatagagcagggggaaatgactgatcccaagcccgcagttgaatgttgctgtttccacccccacaaaccattcagtgctgggctttttatgaagacaagtcctggtgctattacagatgatccttggtttgcagtgaggttatgtcccaataagcctatcatatgttgaaaatatcatcatgtagaaaatgcatttaatacacctagactactaaacatcatagcttagcctagcctactttaaatgtgttcagaacacttacattaacctacagttgggcaaaatcatctaacacaaagcttactttataataaagttttgaataacttatgtaattcattgaataagtactgaaatgaaaaacagaatggtttcataccatggtaaagtcaaaaatcctaagtcaaactactgtaagtcagtgacagtctgtgcctaaatgaataaggctggctgttagagctggtcacaagagatagtggctggtgaatggataaagctaagactttagagccagttcaaccagggtttaattcccagtcgctaattatatggcattaggaaagtttcttaatctctctgggcctcagtttccaaatctctaaaatgggatcaataattcttatttttctaacatgtagttagggtcacacctagcctggctttctctttctggtttaatattctttgcatgttgttcataaactttgaaagactgcttagttgagcgtggatggtttttagagccagagacagggtcagatctgaattcaaatacaaccattactacttaatgtataaatttgaggaattcattttatttctatttcttcaattttgtagtgaagagtgaatcaactgaaatgataaaacagtggccttcaagatcatattccctacaatatattttctcacagtctcctatacaacattgcaggctaagcagatattattgatcttttgttttttgagtcttatttttaagagatttattgaataatagtaataattatactaataacttagacttatgtgccaggcttcaaagtaarcatttatgtatattatcttatataattttcacaacaaccctgaagtgtagatacttttataatttccattttatagatgggaagcctgatgcttagaaaattaaataacttgctccaggtgacacagacagtaagtgatgaagctgggatttgaacccagaaaatctgactttagaatctcataagcactatactatactgtcttccatgtgattctgataacttccctaaaggcagctgccccactcccttcccattgctgcaaagcatccagcacagtacccaggccccagcagccacttaacaaatgtgggctctatctctgcagcccatctgccaagtgttagagctaaggcctgatgatatttttgcttgctggagcaaatcagaaaagaaacctctgtaaatgaaaaacttttctaagtcccttcctttataaattgaacagtaactaattcaaatttccagaataatataattttgatattgtcttgaagtttgctgtattttggtttggcttgtatgccataaatatacccagtcgaatttagatgattaggaggtatgattttaaacatatgaaactgtcccctctttatcttctctacactattatattctcttcatgacacatatcaccaccaaccatatgtttgtgtgtttattttctgcaaccccttcagtagtacatgtgctacagtagagaagggacttaatctgttttattccctgctgtatctccagtacctaaaataatatggagtaggtactcaaaaaaatttgttttatggataaaaatgtttgtgtaaattatgggaaactgacatttaaatattatttttctttctagcttggattagaagaacaagaaagactccacctactatggaggtaagactacacaaggaggatatcatttaggagtatatattcccaaggatatacgaagcttcagaaaaactatgatgtattttctcaaagtgttgattttattccatcacagaaaataacttaaaacattttataataaattaatatataaacctatattattaataaaataatatatgataaaataaatgctcatattatggaatataacaaaatttgtataaattttaaagtgaaataataaaaatttaaaacaaaattaaaacactctgtagaaagtctgaacttggagcagtttgcaccaggttatttcccctgggccctgggggttctctgtgccaatactcaagcttttgtggaaaagtttgagaaacactgaatctctttgtcttgtccaaatcatgctcttatgtttcccttaatattatrtatttaaatccatcaagtatccaaagaaactttaaaatacagaattagcaattattttataacagtaattattagttgactttttatttaaaactaaaaaatttgtagtcagtgataaacaataaaaaaacatagaaatgctatggtatatatgttttacaatataatttttatatagattattttataaaaattataattttaattttaaaaatatgtaaagacctctaaagttattttataagaagtaatttcataaaaggagagtctctaaatgcattagtgtactgccttgtttactttttgtctagaggcattccctttcttctactatttaggacttccctcctctcttctgttgcctattctgtcactactacaagccctgatgacaacataaatgggctccggtactcaatccccatttgttgggaagtggagtgctctagagcagrataatgatgatacctcaactggcatgcttatgtttatttgctccatacatttgtcatatactgaacccattaatgttcattcggccagggtctgactgagtacatctcttgacccatttctagctttgtatgttgcttctgccttggcctacttttcgcagacccttctttccaacattgataaaatttggaataaaagctgttttgggggaaaaaataaaaggcaatatgatccaggattcagaagtatgcccagtagtttacagtgaaggatggattgaagagccttctgattctccttctcttggtcataataagagctactgttatcatttgcttcatccatcctcagaactttgaaagccttattcatagaaacattaatatgcaaagtgattaatggaggcaattgcaatagttgggcctcaggcacaacttctgtaaattttaggtaatttcagcacctcaaacaatctctagccagaacacaccaagtccttccatccctgagctcactcttgttaattttgattatccaaaatgagccctcttttgttgcctccctttaagtgtactatcaatcacattgttctttatgctgcttcgtaccctccctaatacacacacacacacacacamtcttttccttcctcttggccctttccattgtgtttcaggaatttctgtttctttgttagcaaattaccattcaccattaatattttcctggaaactttctctaccacagaacctcaactgaaatccgtctgtgcctgcaagatagwgagttcctttttttccttgaagtaagttgtgctcgctttcccacgccccacataaagaaagtgagttcaactgcttcttgcttccccaaatagtctttgtttgtggacccaagagagtggagsacctttgtaatccatgtgtatttctctgtacctgaccatcatttttatgtktgccaacatccaagccagtctaccttactgatggtmgagattagaacctggaatatggtyttctcctttcaatgctttcccaaattttagctttccagttctttgacttcatccatactagtatccctgcctcaagtgaacaaccacttcattaggcacactttagtttttatcaaacacagttcttaccactgtaacttttacactcttcaaatccaaattctagatacatcatattaagaggaaaaaatttttcttaatgtaaagtaaaacatatatttataaaccgtaacaaaaaaatagcttatttagttattaagctgtgaaattataaggcaaattccacccaggtcaagaaacacaactttgccatctacttcagccccatatatcccatcctaatcacaaccttctctctcttgacaaaagaaaaccttaagccaacttttatagtaatcatttcctctcattttaaatagttttttcacctaaatgtacattatagtttagacttgtccatttcgtaaaaacttcgtatttgttttaaatctttcagtctatcctcttccatttcttttacttccttagaaatttatgtgttaaaatacccagcccagttggcctacagaatttgccacagtctagattttgctgatcttatgttcctggtgcacttcatcatgttcctctgtccactgttttccttccaagttgacaactggatccagaaactagattttttttccagatcttttagtgaatacccaactccaaataaactttctttcatatctcctatatattattgctaaaggttagccagcagccattagaatgtcatttacaacagtattagaaaacatagaatactgtggaatttagtgagcaaaacatgtgcaagatctgtgtactcaaaactacaaaatgttggtaagatayattaaataagacctaaataaatggggagaagtatctgttcatggattggaatgtacaatattgctaatgtattcattcttcccaaactgatccacagtagttcttatgcttttattttgcatctgcatcacctgaaagacttgttaaaacacagattgctggaccccaagcttagagtttttgatccattagttttgaggtagggcctgaatatttgcatttataacatgttgctggatgatgctgatgctgatggttcatagcccatattttgtgaaccactgatttatagatttaayaaaatgaatatccagttaaaaccatgtcagacttttttgatagaaatcaacatgctgatttgaaaatatatttggaaatgtaaaagacctagaatagctgaaagcagccatgaaaaaggagatgaaaattaaagggctaatactgtctgactttaagaattactttaaaactatagttatctagacagtatgatactggcattaggatactrggtaaataaatcaatggaaaaaacaaaagtccaaaaagtagatactgtacaaccagttggtttttaacaatgacatcaaaacaacacaattaggaatggaaagtctttttagcaaatggttctggaataacttaatatccatatggggaaaaattgatccctacctcacgtcatacacaaatattaatttaagatggattatagactagacataaaagccaaactattgtgcttctagaagaaaaaaacaatggaatatctttgcaattttgaggtagacaggagacagaacaatctgtaaaggaaaaatacagattaatcagatttaatcagaattaaattctaatgctcattataagagaacattaggaaatcaaaagactaggagaaaataatcatagtacatatatctgacaaaggaattgtatctaggctatataaagaacacctcaactcagtgttataaaaaagaagctaacaaatattgggcagaaatcttgaacaagcactctgtaagacacgttttaagtatatgaaaatatacttagcaacactagtaatcagtggaaccacagtgagataccactacacacccattaaaatggcttaaatttaaaagattgacaacagccatcactggagcacccacaacttttatacagtgctggttggggtgaaaatgatacaatcatgtttgaaaactgacagtttgttataaaatcaaacatacatataccctgtgatcaaacagtaattctcccggccaccttgaaaactgaagggatcaatttttagtcacactttctgggagctctggccaacagtaggtctaacrccttggcatactatgcaaggcttcctgatttgggcccagcccgactttctagctttgtctccttaggctaccctactcttctstaccctactctaccctactcttcaaggaactccctgctgtttctcaagtttaatgtcttctccttctcccatcaactggcatactcctgcttatgtttaattccttttaaaaggccctttaaaatccttggttgttttcctcacctttttttycctcaacttcttaactgatagagctaatcactactttctcggtataactacactgctgtgtactcctgtataactctttaagttcaatattaaaattstgtgttttatttgtccatatttctaactattagctgtttggcacagggattataacttattcatttgtgtgtcataagcacctaacacagagcctgattcattattggtttcattggccattatagacttaaaaatctcaatactatgtaattacatggtttctgtgagatgggtttgaatttctatcagccaactacaaaataatgttgtaaaagtaaacatatttccaaattgattgttgtctgtattttgttcataggaattcacatttacctgcaggttaccagtgaaggcggtcccttacttaggatagttcagcttaggattttttaacttcatgatggtgaaaaagcaatatgcattcagtagaaactatacttctgagtacccatacarccattctgtttttcactttcaatacagtattcaataaattacatgagatatttaacactttattattaaataggctttgtgttaagataattttgcccaactgtaagctaatgtaagcgttctgagcatgtttaagacaggttaggctaagctataatgtttggtaggttaagtgtatcaaatgcattttgacttaagatattttcaattttgtgatgggtttataaggacataaccccatcataagttgaggagcatctggtaatagttcagcatgtgttcttcagtgttgtataaggtgaattcacatttcacagagctaatgaggtagacttttcctagtcctaactctattccattagaagccacttatagcaaatactttgaaatattgcttcttttttttatactaacacaataggaaaagtgtaaagttttttgtttgaacaagtggttacatttattgccaatttttgacaaattatatggtttaktataggtttacaggcagtagaaaaaagttacaatattagagttcagcctacttcatttttaatatacatactccataaaaaagaaagaggagattctagaaacgaatagagaatggagttggagatggtgctgctgttggagatgatactgctgcggtctaaaaaaaggttgggatggctggataggacaacacatcatagtatcttgtttacttgaccatattctcaaatctgggctgcaggctccaaagacttacttttgttcatgtctaaggttgcttggccctaaaggacatcacagtgactaaatgcatgtgaatttgagatggtggccaatccccatgtattaatttacagtaagaaatgaaattggcacagaaaaaaaaaacaggagactgcttggtaaatatgacattggaataaggggagttaagtaaaataaatgtttaattgcctcaggcttaaaatttcatgttgcattcaccttacaacaaggatagtctgacccctagcaatggaaacatttaaagagaattggctacaattttcaattctatctctgtattagaaatagccttacgaattgtaatagaaaaattgccaggtgctggttaagcctccttttcccatrgacagtgtttttatggattgccagcatttgtctctgtgattctatttttttctttgcttctcggttctggttgacatatttcctatgccatgacagtagttatactctggtcagatgttactggccctgcagctatttttttgttttatccttttcctatttctgctctggcttatgatgtgttgatcttatagtttaacattcagagaggaatcttatttctggatttttcaggcccatttcagtgttgtctctaaataactggcattcattgagtaagttatctgtgcccaatattactaggttcattttataagttacagaattaaaatgtcttaaaattgccattttatgtatagaatcctacttcctgwtgacttaaattgcaaagagtgtatgtatgtatttatggttaaatggacctcccactcctcaccccaaacttcacaatatcacttttagtaacatagtggaaatgaataagaaaattgcagcatgttcatacctgttaaacatcattcattaaaatgaatgaaaaaaaaaacttamgaatgaactggagctgtatgttttaacatggataaatctcagaagcaatgatactgagcaaaaaaaaaaaaaagcagctacagaagatgtcatacaatataccatttacataaagtttgaaagcaaggaaagtataaagggctttcaagtaaagatagtgggtcaaacatgtaagttcactctcaagtctaatgaaaatgatagtgarggaatttattttaaaagacataaacccacaaggtcatagaaacgtgagtatgcaaaccatcaataaagttttggaggcaggaaagcagatggacaagaggtaatggatttagtgaaactgagaagaatgaatcctaatctggcaagggagaaatctgagaagtaatccaatttaaaccatagaaccacagaatgctcagtaactggcagtgccagaaaactctgaaagtggagtttaagctcgcactaaaaacaatgacctagttaaaaatccgtttaagaagcaattagatgctaaccaataaatatagaagaaataacagagttggaaaatcaccactattcaagtgataattgggaaaaaattaccagcagatactaaaatcattgagtcaaactctgttggggagcaggctgtttacatggtctaaaggcatttccctacagattacttatcaattacaaaaggggaaaagggacctttctagtagacaaatctgacagataccaccttaactagatggtcagaagttgtactaagtagggcagatttatattatatgtgcttctttctatgatgcactgaggattaaacattattcacrtagtattctttttttaatttttgattttgtgggtacttagtaggtgtatatacttagaaggttcttgagatattttgatacgtgcatacaatgcgtaataatcacatcaaggtaaatggggtatttatcacctcaagcatttatcctttccttgtattacaaacaatcttaattatactcttttagttatttgaaatatacaataaattattgactgtagtcactctgttgtactatcaaatactagattttattcattctatctaattatatttttgtgcccattaaccattcccaccccccctaacacccagactacccttcccagcctctggtaatcatccttctactctctatctccataagttcaactcccacaaatgagtgagaacatgtgaaggttatctttctatgcctgccttatttcacttaaaataatgacctccagttctatccatgttgttgcaaatggcaggatctcattcttctttatggctgaatagcacttcactgtgtgtatatatcacattttctttatcagttgatctgttggtggacatttaggttgcttccaagtctkcactatcctgaatggtgctgcagtaaacatgggagtacaggtatctcttcgatattctgatttcctttcctttggataaatayacacacacacacacacacacacacacacacacacacacacacacacacacacatatatgcctagcagtagaattgctagatcatatggtagttccatttttagttttttcaggaacctccaaactcttctccatggtggttgtactaatttacattcccaccaacagtgtacaagggttcccttttctccacattttcaccagcatttgttattgcccatctttttgatagaagccattttaactggggtgacgtgatatctcgttgtagttttggtttgcatttctatgatgatcagtgatgttggagcactttttcatatacctgtttgccatttgcatgtcttcttttggraaatgtctatccagatcttttgctcatgttttaakctgttcattagatttttcctattgagttgtttgagttccttatatattctgattattaatcccttatcatatgggtagtttgcaaatatgttctcccattctgtgagttgtctcttcaccttgttgattgttacttttgctatacagaagctttttaacttgatgtgaccccatttgtgcgtttttgctttgattgcctatgcttgtggggtatttctctttttttaattatgattactattattattattattattattatactttaagttttatggtacatgtgcacaatgtgcaggttagttacatatgtatacacgtgccatgctggtgcgctgcacccactaactcgtcatctagcattaggtatatctcccaatgctatccctcccccctccccccaccccacaacagtccccagagtgtgatgttgcccttcctgtgtctatgtgttctcattgttcaattcccacctatgagtgagaagatgcggtgtttggttttttgttcttgcgatagtttactgagaatgatgatttccaatttcatccatgtccctacaaaggacatgaactcatcattttttatggctgcayagtgacatgaactcatcattttttatggctgcatagtattccatggtgtatatgtgccacattttcttaatccagtctatcattgttggacatttgggttggttccaagtctttgctattgtgaatagtgctgcaataaacatacgtgtgcatgtgtctttatagcagcatgatttatagtcctttgggtatatacccagtaatgggatggctgggtcaaatggtatttctagttctagatccctgaggaatcgccacactgacttccacaatggttgaactagtttacagtcccamcaacagtgtaaaagtgttcctatttctccacatcctctccagcacctgttgtttcctgactttttaatgattgccattgtaactggtgtgagatggtatttcattgtggttttgatttgcatttctctgatggccagtgatggtgagcattttttcatgaacagacacttctcaaaagaagacatttatgcagcttatggggtatttctcaagaaatctttgctcagtccagtgtcctagagagtttccccaatgttttcctttagaaatttcatagtttgaggtcttaaagtcttcgatccattttggtttgattgctgtttatggtgagagatgggggcctcatttcattcttccacatatagatatccagttttcccagcaccatttattgaagagactgtcctttccctaatatatgttcttgatacctttgttgaaattgagttcactgtagatgtgtggatttgtttctggattctctaatctattccattggcctgtgtgtctgtttatatgccagtaccatactgttttggttactatcactgtatagtgtaatttatgccaggtattgtgattcccccagttttgttctttgtgctcaggatagctttagcaattctgggtcttctgtggttccataataattttagaattttttttctatttctgtgaatgtcattggtattttgataggatttgcattgaatctgtagattgctttgggtaatatggacrtttttaacaatatttattcttccaattcatgaacatataatatccttcccttttgcctgtgtcctcttcattttcttgcatcaatgttttataggtttcattgtacagatctttcacttcttggttaagttaaatcctaggcatttagttttgtttgtagctattgtaaatgggattacttccctgatttcagattgtttgctggtggcatatagaaatgctattgattttgtatgttgattttgtgtactgcaaccttactgaatttgtttatcagttctaacagttttttggtgaagcctttaggtttttccaaatacaagattatattgcctacaaacaaggataatttgacttcttccttttcaatttggatgaccttcatttctttctattgtctgattgctctaactaggacttccaatattatattgaataacaatagtaaaagtgggaattcttgtcatgttttagatcttagaagaaaggctttcactgtttctctattcagtatggttaggctktgtgtccccacccatatctcatcttgaaktgtaatccccaggtgtttaggaaaagacctagtaggaaataattggattatgggggttgttttccccatgctgttctcatgatagtgagtaaattctcatgagatctgatggttttataagtggtaacttttcctgtgctgacacacaccctctcttgcctgccaccatgtaagacatccctctttcccttccaccataattgtaagtttcctgaggcctccccagccgtgcagaactgtgagtcaattaaacctcttcttttaataaattacctggtctcaagtatgtctttatcgcagtgtgaaaaatggactaatacaagtatgacactagctgtgggtctgttgtatatggcttttattgtgttgaggtatgttccttctatactcagtgtgttaaaggtttttatcatgaaaggatgttgaattttatcaaatgcttttccagcatcaattgaatgatcatagagttttgtccatccttctgttgatatgatttgcatatgttgaaccatctttgcatccctaggataaatcctacttagtcatgatgaatgatctttttaatatgttgttgaatttggtttgctagtattttgttgaggatttttgcatcagtgttcatcagggatattggcctatagttttcttttcttcttcttcttcttctttttttttttaaatgtatcyttgtctgcttttgatatcagacaaagatttggtatattgacctactagagtgagtttggaagtattccctcctccatttttcggactagtttgaggaagattaatatgaattcttcttaaaacgtttggtaaagttcagcagggaagccattggttcctgggcttttctttgctgggagactttattatggtttcaatcttattcttattggtttgttcaggttttggatttctttatggttcaatctcagtaggttgtatgtgtctaggaatttacccatttcttctaggttttccaatgtattggcttatagttgctcatagtagccttcttatgatcttttgaatttctgtgttattgtaatgtctcctttttcacgtcttatttttttgtattttggtcttctgtcttttttcttaatctggctaaaagtttgttgattatgtgtatcttttaaaaatgacttttcttgttgttggtcttttgtattcttcatattgttttcttcaaatttcatttgtttctgctttgatttttattatttcttttcttctactaattttgggtttggtttccttttgcttttgtaattctttaactttcattgtcaggttagttgaagtttttctacttttttggtgtaggctcttatagctataaatttttctctttgtactgctttctctgtatcccataggttttggtatgttgtgtttccattttcatttgtttcaagaaatttttcaatttcccttttaaattcttcattgacscactgatctttcaaggagcatattaatttccatgtgtttgtatagtttccaaaattcctctagctattgatttctagttttattccattgtggtcagagaagatactcgagataatttcaactgttttgaaatttttaagagctgttttgtggcctaacgtatagtctgtccttgagaatgatccatgtgcttaacgagaagcatgtgcattctgcagctgtttgatgaaatattctgtaaatatctattaggcccatttggtctgtagtgcagattaagtccagtgtttctttgttgattttctgtctggatgttctttccagtacttaaagtgggatgttgaagtctccagttatttatttattatttatttatttatttaaaatggggtctcactctgtcacccaggctgcagtgcagtggcatgatcttggctcactgcaacctccacctcctaggcttaagcgatcctcccacctcagccccccaagtagctgggaccacaggtgctcgccactacacacagctaggttttttttgtttgtttttttgtctttttttttgagacagagtctcactctgttgcccaggctggagtgcaggggcatgatctcaggtcactccaagctctgcctcctgggtttacaccattctcctgcctcagcctcctgagtagctgggactacaggcaggtgccaccacgcccggctaattttttgtatttttagtagagactgggtttcaccgtgttagccaagatggtctcaatctcctgacctcatgatccgcccgcctcggcctcccaaagtgctgggattacaggtgtgagccaccgtgcccagcctagtttttttgtattttttgtagtagagacagcgtttctgcatgttgcccaggctggtcttgaactcttgagttcaagatgtgcccaccttggcctcccaaagacctgggattacaggcgtgagccatggctcctgtcctccagttatttttgtattggggtctgtctctttagctctaataatatttgcattatatatgtgagtgctccagagttgggtggatatatatttatagttcttagatcttcttgctgaattgatccctgtatcattatataatgaccttctttatccccccccctttttttttttttgagacagagtctctctctgtcaccaggctagagtgctatggtgccatctcggctcactgcaacctccaactccctggttcaagcaattctcctgcctcagcctctcgagtagctgggattgcaggcatgcaccaccatgcccagctaatttttgtatttttagtagagatggtgtttcaccatgttggccgggatggtctcgatcttctgacctcgtgatccgcccacttcagcctcccaaagtgctgggattacaggcatgagccactgcacccagccctttatctctttttatagtttttgtcttaaaatctattttgtctgatataagtatagctactcctgctcttttttgatttccatttgcataaaatatctttttccatccttttattttcaggctatatgagtctttatacgtggtgtgtttcttgtagacaacagattgttgggtcttgttttttaattcatcagctaatttgtcttttaatagagaattcatgctatttacatttaatgtttttattgataaggacttactcttgacattttgttgtttcatggttgttttgtgggtttctcttccttctttcctttcttcctgtctcccttttagtgaaggggattttctgtggtggttatgttttagtttattcttttttttttttttgtatctgttgtatgtttttacatttgaggttaccatggaacttgcaaatactgtcttataacccattactgtaaactgccgacaacttaacactgattgcataaacaaacaggggaagagaaaactaataaaaactgtacactttaacatgtcccctctgtttcttaagttttgttgtttcaatttatatcttactctactgtcttgraagattattgtagttattatttttgatcagttcatcttttagtctttctcctcatcwtatgaatagttcacaaatattacagcaaaattggagttttacaatattctatattattctgtttatttactattactagtgagyttgttaccttcagatgatttgttgttgctcattaacatgcttttctttctgattgaagaactcccttttacattttttgtaggagaggtctggtgttgaaatttcttagctttgtttattttgtaaagtctttatttctccttcatgtttgaaagctattttcgctgggtattctattctaggatgatatggtttggctgtgtccccacccaaatctcatcttgcattgtagttcccataatccccaggtgttgtgggagggacccagtgggaggtaattgcatcataggggtggttacctctgtgctgatctcatgatagtaagtgagttctcacacaatctgatggttttataaggggttttcctccttttgcttgtcacttcttcctgccatcatgtgaagaaggacatgtttgcttccccttccggcatgattgtaagttttytgaggcctccccagccatgctgaactgtgagtcaattaaatctctttcctttagaaattacccattctcaggcatgtctttattagcaacataagaacaactaatacataggattaaagttttttttttcccttcagtacattaaatgtgtcatgccactctctcctggcacataagatttccactgaaaagtctgctgccaagtgtattggagctccattgtatggtatttcttcttgctacttttaggatcctttctttatccttaacctttgggagtttgattattaaatgtcttgaggtaatcttatatttgggttaaatctgcttggtattctataacctttttatacttgaatattgwtatctttctttgggcttgggaagttccttgttattttacctttgaataaactttcttcccctatctttctacctcctatttgagaccagcaactcttagatttgtctttttgaggttattttctagatcatgtaggcatggttccttgttttttattcttttttctcttgtctcctctgactgtatattttcaaataccctgtctttaggctcactaattctttcttctgcttatcatttctgctgttaagagactctgatgcattcttcagtatgtcaattgcatttttcaactcagaatttctgtttgattctttttaattattttaatgtccttgttaaatttatctgatagaatagtgaattcctcctctgtgttatcttgaatttcattgagcttcctcaaaatagctattttgaattctctgtctgaaaggtcacatatctctgtctctctaggattctttactggtgctttatttagttcctttgatgaggttttgttttcctggatrgtcttgatgcttgtggacattcatcgggtctgggcattgaagaatttggtatttattgtaatcttcacagtctaggcttgtttgcacctgtccttcttgggaaggctttccaagtatttgaaagcacttgaatgttgtaatctaagtttttagtcactgcatctgtatctgcattagtggggactcaaagcccagtaatgctctggttcttgcagacttgtmgaagtattgtcttggtggtcttggataagatttggaagaattctctggattaccaggcaaaggctcttgttgtcttcccttactttctctcaaacagtctctccctccatgttaccaccagtgatgttcactcaaggccctagggctccacagtgagcaggtgatgaagccgggcaggcttgtattcttttcttcagggaggtgagttccttggttccaggtggatctagagatgccaagcaggagccagggcctggagtctagaaccttagraatctatctgttgctctrttctactgtggctgagctggcaccggagccagaagaggaagttcttcccactcttctctcccctttccacaagctaaggagttctccccatggccaccaccaccccaggctcatggcgagtactgccaggctactgctgatgtttatttaaggcccaagagggttcttccatcagtttgtggtggatgctgccaggcctaggactctcccttcagggcagtgggctttcttctggcccagggcaggtccaacattactttccaagagccaaggcctagaatcaaggaccccaggagacygcttgatgctctacctgactgtggctgaactgctgcctaagatgatttttgattcttatgaaggtgcttttttggtgtgaatagtttttcaatttggtgttcctgcagtgaggatgattaatggaggcttctatttggacctcttgctcccctctcctcttatagtattcttgctaataattcataaccttaatctaaccagaaggaaaaaaaccggaaagaaacaactggaaatcctaaattgggagactctcatttcataaaacaccaggcttgtcatgtcagtgacatgaatgattaaaaaggactgatacatgacagctaaatgtaacatgttatcctagattggagaaaaaactttgctgtaaggaaaagtattgaggtaactggtgaagtttgaagaggaaccttattaaataatagcattatatcaattttaaatctcctagaaaaaaggaaaaggatgctgttatattccctttgtgatatcgtacaacgagacaactgcctcttctctatccatttcaaaactagaaatttactcatgggaaagagaaaatagtccagactatgtagcactgctttcctaatttgagagaagatataccattctgaraaacagaggaattaaatgaacatgtacatactgaaaatgagacctctagatctttttccctactgggttttcaaatgaagacaaacaggcctttatgctccaggcagagtattagaagattcgtctttgcggactcttaccaaccaagaaaaaggacctgaaacccttattaggttatagtgaaactgagcttgcaacaagcttcacctgtggcatcaaagtttccagctagatttacctaggaacactagacatctgagaaatgaaaaacagagacccatacaaataaatagggtaaaacacttggataaaacagactacttaaaaacttaaaataactgctatcctcagcgattcaagaagttactacagtcatgaaatgagaacttaatgttccaaaataaaaggaatatttaacaaaaaggagtacttggaaaaataaaaatataatagaaatgaaatgtttaactgaagggttagaaccttctattcaatttcctgtaacatagggcagaaagaaacagaaaatagaaaagaaaaattagaggactagtaatactagaagctagaagacagagaagtaacggtgctttcaacattctgacagttctagtctagaattctatacctagttttatgatttaagcttgaatgtaggctaaacacattttagacatgcaaagtctcatagaattatctcctacaaaccctttctcacaaagtgactaaaggagtaaacaaagaaaaagggaggggtgagatccaagaaataaaactgcagcattggcaaagggtactagagtatgaaaggcaaccagtccaggcagagtgaatggagagatttttttccccaaaaacatgaaatacatagagtacctgatacatctgaacataccaagtggggctgaattatcgataagtacatgagaaataaacaaaattcatttatttgcggaaaaaacttgggaaggaaaaggaaaaataatyattttctactacataactcacttgttgacagtgtttactcataatatgtgaatccacaactatactagggtattagggaacacaaagaataaggcaaaccctcattttcaaaaatgagaagttaatatatagtgcctaaaactgaaaaaataactaacagttttaaaatattagttagctattatggagtgtttaagtgcagagcctgctttgtaactgtcagacacttttaaggctccttggtttggcctatactatgaccataaacatcagcttaaagaatataaagtattgcttttgagaagaggsaactattatttgtcataacaagccttttagaatgaaatggccctacaataaaaagatgtataatttttttaagagacagggtcttgctctgttgcccaagctggagtgcagtggcactgtcatagcttactgcagtcttgaactcctgggctcaagagttcctcccacttcagcctcccaagtagctggggctgcaagtgcacactaccatgcctggctaactttttttgattttgtagagatggggtttcactatgttgcctrggtttatctgcaactgttagactcaagcgatcttcccacctcagcctcccatagtgctgggattataggcgtgagccactgtgcccagcccaatgcatatgattgacttttttttwaaaaaaaaagaatgttaaaaagcacatatacamtgatatggatgagcagtggcaatttttttcggcagggtatcagatagcaaatattttagggtttgtgacccaaatggtctctgttgaaactactaagctctgccattgtagtatgaaagcagttatagatggtatgtaaataagtaagtgtggctatatccaataaaacgttatttacagamacagttggcaggtggatcctagtttgtcaatcctggtaatgatcaatggttttcaaattgggatgcctataccactggatacacaaagacttcmtatgggatatmccattatgaatagctttaaaaaattaatttcctcattctctctttmtatatggagtccttcctaaaaactatctacctgagaactctttstggtctgccagttctcctttctcacttctttcaaaatcatctgtctcccacttttcagaagaaaagcttaccccttttccgtactaaatcttactatggtgtcttgccttgcagtttaaaaatctcccgggcaccacacaaggagacaattggagagtgaatctctcttgagggatagtcctttgagagcaaagcaaagaaagcatcaataaaaattagtgaaggggtaatacattatttcatgcaggcaacaaactcatggccaggctccgtgccttatattatagtttctctgtctacctagctagctagctgtccatttatctatcttaaaattaaaattcacaagtgagaaagttgtcatggggatgaataataacacgtttatttgaattttaaaattaagtcagactttttctgacagatagtaagtcagatttggctggttgagtttgacaatgaggactagccttgccaattmagttatattgttatattctctgtgtattgaataagctgaactgcagctccaaggctttgacaaagatatacttaaagcatgcattcagtatacaataagctagaaaatgcatcctttgtcattacttaagtgtcaactgaaatgtgcaagatggtgcatagtttttcaaaagtctttgaagataaaatgtgcaaaaaacgaagaaaaaacactgctactattatttatggatatatagagatattgtaaaagtatgaaaacattcatgaaaatgatagatgagaaaccgggtagttattatctctggggaaggaaaatgttagggttcacagtcatggagagctttggtcatgtctgtagtgttttatttcttaagttggatggtgggttataggtgtatgttattagttatgtttatttttaacacatgaaatactttattttaaaagaatataccgaaaccttataattacatattttaaaagaacatattgggtccctgatagaaaaacaagttactcaggataaactgaaaaatgggatacttgaaatttgaaaataccaaaagcacttgaggaattgtcacagtaatgtgcatacagaacgaatcagtatagtttagttcttgaaagtccttttaaaagccttaaggcttatatatttgcattactaattcaaatacttatcatcaggcatctggtatatgctcaagagctaacaatttctttgcatgtagacttcttttgtacataccaacctgccctggacactacactagacataacagttaatatatgtctataatttagattctgtttttagtattttttttctatatgaaaattgctctgatactttacattttcagggaaaatacattcatatattgttttcagaaatttgatcttattgcaaatttacacagaagcatgttttcaacaataaagttattctgggatttctggcttccaaagctggaaaggatatatcctgagcttggtcaacatcccatttttttatttacctactagcatttctacctccccaaaggaaaagatgtggttgaatgggttaaccaccatccacaatggaaggtccctgttgggcagttttatgccagtcatttgacctacctcaggcctaaccatttgttcctgcctttgatcaggcaaagaggtagggttgtctgcactcagaggtgcctgaggctctgcaatgcacatctgcaagtgtaactgttgagcacttttgggactctctggcttagccaatactatgatcttacttgatttattttcctttattttattaaaaatttaatataacagtacatttaaaaatttttttaaatagaagtaatagattacctgaaatcctatgtctggctgctacctgaaatcctatgtctggctgcacaactcttaattttagcaagttaatttgcctatgcatacattggtacataattgtaatttttgaaaacttactcttttgtattctgctgtttttacttaactaccgtaataaataaagaaaaacaagcacttgaaacatagtaacaaaacacatggagaccgcttttctctatgtaccttctttgataatgacctctacctctgtgaaaactaagagaatataaaatttatcatacttctttagataaatgtggtaggcagtgatcatgaatcatttgaatgttttgagctcctcagaatctgtactcttacctggtaagctattctgcctctcaaactgtagatgtttatttattaattgtacaagaaatgtttatgctagtttgtgttataaatctttttggttttgaaaacatttattttaggcaggtcttcctaagaagtagtatctccagtttcaaggatcccacctttctcagtctaaaaggacggtttcttacatacttctatacaaagctgaggtctgagtttaagcttattcttagcataattttccctctattttgacctttatctgacttttaaggggcaaaatataaaaggtttttaaaataagttgaatataaataaggtgctattatgaattatttttagatatactcctgctcacgttcttttaagagtcatcaaaacttactaggtgcatattaaaagtatacagaattagttctgaagagttaaccttctgagtcatatcattagtcactaagacaagtctcatttaagttttaaaactgggtttagatccagagtgaaaaggggttaaaggagttaaaatgaggttaggtgttttttggtttattttttttatccatacattttttctcagttgtctcaccaaaacaatttatgtttttcctcttattctctccatgctgaagaagtaatgattttctcaatctaaattttaaataaattacttgctgatcacttttatcagataaatttgacatttttttaatgggcggaataatggtgtttaagagaattgtattgatcacattggtgataacccctataggatactaagcaacagttgattgcctctgatcttatatctttaggcatgcctgattttattctcaaatatttatcatgatggtgataaaatactatgcccatatgttagtcctatagtcataaagaattaggcattttatatatttttcttatatacacatgttcattatatttcatgtgttcaaatgtactcaatttccttctcaaatttatattctggtgtcaccatgatacatttatttaccagtattctaaaacatcagtaaatagatgtatctagagcagagtttttgaatctgtgtaatacatttggggctgggaaatcaaattgatgggttacagcttgtttttctttttaatgagctagaaaaacatggaatagaaagtatcagtgtacaaaggcttactgggagtacttattgctttctgaaactcttgttgtagatacacttgcacatatgttttgtttgtgaagttgtggtgtcaaatgtatttcttactgtrtaggttaattttgtgtcaacttggctagactgtggtacccagatatttggtgaaatactagcctagattttgtgtcaaagtatttttttaagtgagattaatatttaaatcagtatactttgagtgaagcagcttaccctctattaaattagtaggcctcatccaatcagttgaggactttaagggaaaaaaacattccctctaggaggagggaattctgcctgaagactggtttcttttcttttctttccttttmttttcttttttttttctttttttttttgacagtcttgctctgttaccaaggctggaatacagkggcatgatctcagctcactgcaacctctgcctcccaggttcaagcaattcccgtgcctcagcctcccaaaaagctgggattacaggcatgtgccaccacacccagctaatttttgtattttagtagagatgaggttttaccatattggccaggctggtctcaaactcctggcctcaagcaatctacccaccttggcctcaccaaagtgttgggattacaggcaygagccactgcgcccggcctgaagactgctttctgatttcaactctttcctgggtctccagcctgccagcctaccctgcaaatttgagcttggacttgcctttctccataatcatgagagccaattccttacagtcactctctgtttctctggaaaaccttgactaatgcactcactaaaggtcatactcttaaaaagtttgaaaacttactaatcttgagagtcattttttaatctaatgaactggtatataaagtgtttagccagtgcataacaaaatatgataggtgctgttattttactatcatttgtacctgttatttaaagtcaacaagaatcctgatttgatgtgaatttatacagaaataattctgaactctacactcatttaactatcttttgaaaaagattaatttgtgtttatgaatacttctgtggtattttgaaggtttgctttgcagaaattattgtgaaattttcttctatgtttttgtctccccatttgtatggcctaagagccacctctgttttctcatcataatattcaggacaatttaatatatttgaattttttaaactactttcttctgtagtccaagatgattgtaaattctcaatttcagtggaaaaagagacaagcatataaaagtcctgtggcagacacctcttgtgccctacctcacatccttttgtatttttactccagccttgctgcagcaaccagctgctaacaggtgtaacctcattacagctctacagaatatrttttgctttcttctctgacactgtggcatgggatgtctgtggggaatcaacttggaagtgtgagagggttaacataccagataaaccttgatacctggtatcaaggggatagaagctaatggataaaagttcctttcctgtccattgagcacatagtccaggtatattcaacatgacttctcagaagttctcagcagggattgggtcccagcacccagagcagtgaccaactccagaacacaccttttattttggctttccctccttccctgtttcatattctccagtatcttgctccccttccctggattacttgttcaacataagccataaaaaattcagaactgttgtctctaacagatatgaactcaaaatgtaaatagtaccaagtacagtcaygtgtcacttgatgacaggtaggtcatttcgtcgtcgtgcaaatatcagagtgtacttagggaaaactagatagtatagcctactacacaccctgtctatatagtatagcccattactcctaggctataaacctgtacagcatgctattgtactgaactgtatgtaggcaactgtaacacaatggtaaatatttgtgtttctaagtatatctaaacagaaaaggcacagtgggaccaccgtcttatatgctattcattgttaactgaaatgtcatcgcatagcacgtaactgtaattaaatccaacttactttgtaaccgtagtgcacgttgatcctactggcataaaactgagaaatgaaagacttgtaaatttacatgtacttgtaaaatgtaagtacattatcgcttattgataaatgctgctagcaaattaactcctggagaccttcttttcaaacaagtttattacaattagcaatgaaggtgtaaatgtgaatctaattagtcatttggcttagcctgtttccaggctgatgtcttctttatgtgtttaacctttataaacatattgtatgagaatgaattttaaaaagaagaaaattatgaaatatgccataatgatctgaccctgttattttaggtatttttwaaataaagggactctttgtatgtagaaaaaagactggaaggaaacataaatacaaaattataataattatttgggtggtgagttgatttttattttgttgtttatgcgtttttgtattttatgaatttgctacataaagggaacatttttctttaatcagaacaatatttaagttttaaaaaggaaattaagaatgctagctgaatagtttctttttctcagtaactgactgacagatggtgcaaagsacatgacaaagaagaggcccatcataataactacctcatttcaattcagcaaatatttataaagtgctgttgtgctctttttatcagataattaatgctttttgtctttaacatgattgtttatataaattcatttttactctttacttttttccattattctttatatacttaatttctatacctacttctttgaatgggtattgtttctrgtttctaaagatttttattcaaatgtcagattatggaaagatttctattttggacatattactctcatgatggttctcaaattttatttttattataacttataaatctttcatcttaaaatttctcttagttactaatatttctcatctttgatctagactgtctagtcctgtgttttccagtaaaatatctactgtattgtacatgtagctattacaatttatttaaaattaaaattaaaaatttagtttcttggtcaccctaccacattgaaatgttcagtagcgatgtagctagtggctaccatattgcacagtacaaattagaacatttccattcatcactgtgttcaattggatagtattcctttagcctcacagtactttttaattctaaactttcttttcattgtacattagttcgttttcacattgctataaagaactactgagactgggtaatttataaagaaaagaggtttaatggacgcacagttccccatagctggggaggcctcaggaaacttaacaatcatgacagaaggcaaaggggaaataaggcacatcttasatggtagcaggagagagagcaaggagggaagtactatacttttaaaccaccagattttgtgagaactcactcacaatcatgagaacagcatggggaaatccatccccatgatccaatcacctcctaccagatccctcccctgacacctgaggattacaattgaacatcagatttgcatgggtacacagtgccacacactgtgtcacattgtttctgtatttcttttttctacattccctttcatactgtattcaattttttaatggaaaatgttaatttctactcaaataattgttaccatttcctctcctaaattcttggatgctttgtagtttccatcactgaatattgtcagctcttttcttatgcactgtatttttttttatcatggcaaagaaattgaaattgtggttctaatagcatctctagaagaatacagtggcaggctctggaagggagaagtaggtagctgggcatgtgtaagggggagtgttactttttatctcaaaatcttttgcatcattcacatttcatgccatgtgcctatagttcttattttaaaaagaataattttttcaagtccatcgaattcaaggtccacatcaataacttggccttaatgtttaggtggtcccacaaataaatttaaaatagaataaaatctacatttaaaactgtgtattgacaaggcagatggtttaaagaaatagagattcccacatcttcagatcaaagtaattaaattcattccccaaaatgaaaggtaagcctgttgccagttggatattaagtatgacagtgttatatatttaaaatttagaaatgactgcttttatttgttataggccaagtcttttgattttgattacctaaataatcttggataactttaaagcctggctaccatagtaataaataacctacacaatataaaacagtaatacagctcaatgtattctgcactaagtgtgccccaagtcctatgcatccaatcatattgttagcatagaaattcaattatacagaaagagaaataatacagtagtaccaaasgaaagatccatttctgagggaaggtgtggaaagatcttctgcttaaaataagtgtcataaatctaggtatttgcttaacttgatttcttttttatttaaaaaaatatgtttttctttcattcgttttcaaagtatgaaaaacatttgggttaaaaattgattgcttttcatctttaatgtatgaagttcttgctatgtagtaataaaattaaatgttttctgatttgcacaactggatataaggtgaaatgttgaaaggaaaataaagtttttgtgacaggtcctgtctttcaaactgtttctagcttttctataattatctgttttgacaatgtctcttcttaaaacaagaaaaaggtttattttagtgaggattaataagcataagttttcagtaattgtctccttcacaaagtcaaactaattgtatgacggattagcaccaagttacatggcagtttatcataaaaacatttcattatgtatgtgttcgttgaaaataatctcactaataagattttctgtagaatgatttccacactttaattaccaaattgatgttgttatcagtaaatttacatcacattgtgatttaaatgtrataatttttaaaagtcagtacgtattttcacaccagaataatacttgctaacaaaatttatttgcgtattggcaaaatacttacatgtaataagtccagtgacatattcagggaagattaatacattccatggattcacctaagaaaacatcacagttgcctctgaatttaagaaggaaaagcactactgaagcagatagagacacaaaaaaacccttcaaaaaaatcaatgaatccaggagctggttttttgaaaagatmaacaaaattgacagaccactagcaagactaatgaagaaaagagagaagaatcaaataaacacaataaaaaataataaaggggatatcaccaccgatcccacagaaatacaaactaccatcagagaatactataaacacctctacgcaaataaactagaaaatctagaagaaatggataaatgcctcaacacatacaccctcccaagactaaaccaggaagaagttgaatctctgaatagaccaataacaggctctgaaattgaggcaataattaatagcttaccgaccaaaaacagtccaggaccagacagattcacagccgaattctaccagaggtacaagaaggagctggtaccattccttctgaaactattccaatcaatagaaaaagaaggaatcctccctaactcattttatgaggccagcatcatcctgataccaaagccggacagagacaaaacaaaaaaagacaattttacaccaatatccctgatgaacattgatgcaaaaatcctcaataaaatactggcaaactgaatcaagcagcacatcaaaaagcttatccaccatgatcaagtgggcttcatccctgggatgcaaggctggttcaacataaatcaatacacataatccagcatacaaacagaaccaatgacaaaacccacatgattatctcaatagatgcagaaaaggccttcaacaaaattcaacaaattttgaattaggtattcaataaatacctctcaatacattaggtattgatgggacgtatctcaaaataataagagctatttatgacaaacccacagccaatatcatactgaatgggcaaaaactggaagcattccctttgaaaactggcacaagacagggatgccttctctcaccactcctattcaacatagtgttggaagttctggccagggcaatcagacaggagaaagaaataaagggtattcarttaggaaaagaggaagtcaaattgtccctgtttgcagatgacatgattgtatatctagaaaaccccattgtctcagcccaaaatctccttaagctgataagcagcttcatcagcaaagtctcaggatataaaatcaatgtgcgaaaatcacaagcattcttatacaccaataacagacaaacagagggccaaatcatgagtgaactcccattcgcaattgcttcaaagagaataaaatagctaggaatccaacttacaagggatgtgaaggacctcttcaaggagaactacaaaccactgctcaatgaaataaaagaagacacaaacaaatggaagaacattccatgcttatggataggaagaatcaatatcatgaaaatggccatactgcccaaggtaatttatagattcaatgccatccccatcaagctaccaatgactttcttcacagaattggaaaaaaactactttaaagttcatatggaaccaaaaaagagcccacattatgaagtcaatcctaagctaaaagaacaaagctggaggcatcacgctacctgacttcaaactatactacaaggctacagtaaccaaaacagcatggtactggtaccaaaacagagatatagaccaacggaacagaacagagccctcagaaataataccacacatctacaactatctgatctttgatgaacctgacaaaaacaagaaatggggaaaggtttccctatttaacaaatggtgctgggaaaactggctagccatatgtagagagctgaaactggattccttccttacaccttatacaaaaattaattcaagatggattaaagacttaawtgttagacctaaaaccacaaaaaccctacaagaaaacctaggcaataccattcaggacataggcatgggcaaggacctcatgtctaaaacacaaaaagcaatggcaacaaaagccaaaattgacaaatgggatctaattaaactaaagagcttctgcacagcaaaagaaactaccatcagagtgaacaggcaacctacagaatgggagaaaayttttgcaatctacycawctgacaaagggctagtatccagaatgtacaaagaactcaaacaaatttacaagaaaaaaacaaccccatcaaaaagtgggcaaagtatatgaacagacacttctcaaaagaagacatttatgcagccaacagacacatgaaaaagtgctcatcatcactggccatcagagaaatgcaaatcaaaaccacagtgagatattatcacaccagttagaatggcgatcattaaaaagtcaggaaacaacaggcgctggagaggatgtggagaaatagaacagttttacactgttggtgggactgtaaactagttcaaccattgtggaagacagtgtggggattcctcagggatctagaactagaaataccatttgacccagccatcccattactggtatatacccaaagaattataaatcatgctactataaagacacatggacatgtatgtttattgcagcactattcacaataacaaagacttggaaccaacccaaatgtccaacaatgatagactggattaagaaaatgtggcacatatacaccatggaatactatgcagccataaaatatgatgagttcatgtcctttttagggacatggatgaaactggaagccatcattctcagcaaactattgcaaggacaaaaaaccaaacaccacatgttctcactcataggtgggaattgaacaatgagaacacttggacacaggaaggggaacatcacacaatggggcctgttgtggggtagggggaggggggagggatagcattaggagatatacctaatgtaaatgatgggttaatgggtgcagcacaccagcatggcacatgtatacatatgtaacaaacctgcacgttgtacacatgtaccctagaacttaaagtataataaaaaaggaaaagtacttataagtaaaaaataatagtagaaaataaatgctattatcatacactatgcaaataaaacccagctttttgttcaacctaggcatgttaaaaagactttctaattctaatattacaagtatccttgagaaaattttccagataagagctgttctaattcctgccacacttaaaagataacttagtataaaagaaaagaaacattctcaagaattattctagaaaacattcatctaatctgaataccacgaagctttttattgccagaatgcaaaggaaccaaccttgatgtcttttaaaaaaatggttttacctagcaaatggtaagacaaacttttagtttgtatctttaactggtacttttcaaggaattgactatcactgttgctgaaacttgtacttaaatatgtaacacaaatatcactttccttgaaatgagttatgaattgccatcccagaggatatcagtagaacccagggtacaagttcccaacttttggggtgctctggcatcacaagactcttcctaaatttgttgtatggcatgtaattcattttgaaaagggaacagtagattttgaaaccatcaaaattcttgagaaacaggatttggatgcactcttggytatcatgaaagcaacattacaggttattgaaccggaagaatttccccagagatcttatataacttgcctgactcacttgccatattgcagtgttcagtcaagcccagtccaagattttctgacaagtctggttcagcaatgcctgacttgatgtgttttttcggagaaggagtcaatgagatttaccttccctccctctaaattacttcttatagtgaagggtttgtttgattcccttaatattcatttgatctctgagaaggaacattgttccagggaaaactagcagtaggccccaaaaaggaagactctaaaatttattcaacaaataacttataaatgcctattctgtgttagatgttggagatatagaggagaatctgcagatggccaagggagtttatgctccagtgagaaagacagacacataacaatacgaaacagtaccagaaatgggacattacaaatgtgaaaacaggttcaaccttctttaggctgaaaactgaaggataaaaaaggaatacacgagagagtagcatgacactaaagccagatactatgatgaaaagattgacaaatttgacaacataagaagtttctactttttgatagttaaaatcctagacaaagttaagccaaagactgaggggaaaagttttaaaatacagaataaagacttctcttttttgtattgacaaagttgtggggaaacaggtattctcattcaccatagrtacaggtgtaagttgatgttaacttttttttcttttttttttttttgagrcagggtctcactttctttcccaggctggagtgcagtggaaagatcatagctaacagtaacctcaaactcctaggctcaagcaattcatcctcttcagcctggcacaggccaccacgcccagctaattgtgttgttttttkggggggttttttggtttgttttttatgtttgttgtagagacagggtctcactttgttgcccaaaatggatgttaactctttagagagcaattttccaaatatatgagaaacttttaatgcagcaattccagttctgagaaggtatcctaaagaatgaatggcaaatgtatacaaattttatacaagaatgttgtttgtagtattgtaaaatatgaaccattctaaacattcatctataggggattgaacgaataaattacaatggaatactaactagtatgcagccattatgaaggataatgtacacctatatatattgacacaaaaaagatgtctgaaaaatattgagtgaaaagcagtttatggaatagtattcgtagtatatattttatctataattataaacatgtaaatgggatacactatatttatattataaacacatgtatatgcagggggaagtctataatgattagactttttaacagtggatatgaaattatgagatattttctattttgtagatttctggttgtttacatttctgtatttttttcaagatgtattacttttgcagctaaaagaacagtgatttccattttaagaaagagaaaagaacattctgaaggagcttttaaaagttctgcttttccccttggcaaatatgtactcccacactatttcaagtttcttgtttctttgctaaaccaaaatggcaagcggattaaatgagaagtatatggcaacacagccagtcacctatttacttacattcactagctgtgtgatktgtctatttatagtktgtttcttcmtamtagaatctaagcttcatgaaagcaggactgtgttttggtccctgccatctctmgaggatttagaacagtacctggctcagagttcatgctcaataatattgagtgattgtgtacatgaataagtgaaagaaagagggcttcagcctasgtcttttggtgggttccttctttacccttgattctccgtctcctttgttcttatttcccagtgatctttttgcttccctcccccacctcctttgagaattctcacctcaatttgtttcttcatattgctgtctccatcactgctggaacatcgctgagcctctctttttctcctgacaccaaacttaaaggaagcctgtctcctgggctaccactgatacccacttgtacttacacctgatggcccaacccttagaattcactctacaaccctaattagtagtctagccttttcagtttctcttagcagaagagatgttagtgtggttcctcccttttacctttccttccttcccataatgttatttcaactggtttcatcagctgctgctctgcttgggaattctactcccttctcagtatagttgtttcgagtagtaactgcttgttagtgctattcacattgcctgaagtggattttattgttattgctgctgtagtgtttgtggtttatctgactgctgtacttctagttggccacaaggtcacattttccaaattcctgctactgtatcactttatatcctaggttatcctcttaatcccaccttctccaatcccataataagaagrgaaaagcttgcactgtcttcataatggtggygggggtgggggcaatagagtcctgagatccattttaagtaaggggcacttgcctatctgccttcccacagtatccttgcctcttttgagaaacaacaccagtagtccttctgagatgtaagcaacctctttccaagttttggtcagtcacaggcactatggatgatgtattgtaacccatcatatttgtatttgttattgtagttgtgctacrctgtgggtaaattccttaatgtgtactagacagggaatataaccaccattatagcactatttctttggggaaaaaaaagtgttttgggtccaaaatagttggttgactttaactttcttaccttaagctattcctaagttaggaagtccttatatgagtggtgatatattttaagccacatacttggtgattgataggtggcaggtacacaaagaaaaatagagaaatattttttcttacttaattttcaaaagtagtaaaccgagtcattttaccacattgatgtttttaaactagtataaatttccaagaatataaataagtttgtatctatcttttctcaattttcagcgttacaaagggaaggggtataagcaatttaaaaaaaggacttcctttattaatgatggaatatgatatattcttgattagctatttaagtttacatttggatttataatacaactgcactatacaaagtcagattatcagtcaacagtgattgccctctcagatggtctactaaaaaggaaaccaattaacagtgagtaaacacagacagagccacattcattcatttcgcaaatatgtgttaagcaccgattatgtgctagacattgttgtaggcccygaattgtgggagacagaaaggcataaagggcaggcaaamacctattttcatacagccagcataatacatacacttttaccctctgccctagcaatctaagttctagtagaaatctactaaaaattatctggtgaaaatacgtaatttggcataatttatagggctatttgtaatagtagtagtaaatacgtcatagtaaaagagcagaaacaacccaaatatctattagtaagccatgatatagctacacaatggagtcctatgaggctaaaaaggagtgatgaaaatatccttctatagaatgttcgtgatatattgtcaagtaaaaaaagtaagatgaaaaacagttgatagtaccttttatgtaagggtggagaaagagatgcacatgtatttgcttattttataaagaaaaaatgggaggataaacagaaaattaataaaaatgacaggtagagggagggaacagagtagaagagcaaggatggaagctagacttcttttattatatctggtataattttgcctttggaactatatagatgttttacacaatttcaaaatacattaatcccgccaggcgcggtggctcacgcctgtaatcccagcactttgggatgccaaggcggacgggtcacgaggtcaggagatcgagaccatcctggctaacacagtgaaaccccrtctctactaaaaatacaaaaaaattagccggacgtggtggcacgtgcctgtagtcccagctacttgggaggctgaggcaggagaatggcatgaacccaggaggcagagcttgcagtgagctgagatcgtgccactgcactccagcctgggtgacagagtgagactctgtctcaaaaaacaaaaacaaaaattaaaagaaattaattccccccccaaaatttttttgaatccctgaaacaaataaacgtgtttatcaagtagatagcagaatcacacaggaaaaaatgatttcacatgactttaagacattgtacatcagtgagtgtattcattatttatccttttttaaaattttaaaaaatgtttgtcttactcttcttactatcattcccaattcagtgagtatattccaaggacaaaaagaaaggaatacaaagaaatcctcaactatatttaataattttcttagcagtaatattggcatttttattttacacacatatttaaaataaatatattaatattctcaggaaccaaagcttatagcataaaagaaattaaataaaaacctacaatattaaatttgaattggaaatgtcattatgaactaatgacatattttttctgaaaaaaaaaaaagcatatttcctacttcggtccactggaaagacctaacagcaatgacagtccagtagcaattaacatctcatctcagactatgaactttttaccattttctattctaaggagccagggctccttagagaaatagctgatgtcaagtctcgggcaggaaatgtacaaggagagtctaggacatctttttacaccagagagcaaagaaaccaagaagattatgtcaaaaggatataggagccaactggaaggggctcccactggccaaagatgggtcaagtttgagcatcaaaaatagaaatactaaccaaaacaattgattgaaacattcaaatatataaatatgagttcattatattaaaacatattaattggtcatgtgtgatctctggaccagaagcatcagaatcacctagtaacttgttagatgtgcacatcaggggccctatcctcagttattgaatcacaaggtagagcccatcaatctgtgttttaataagtttccaggtgattctaaagcataccgaagtttgagaaccactgctctggatataattgccagtttacatgaaatacaagggtaaagaaacatgttagatgataccaccaaggctgtaattagccagaatcacgtgggcaaggctacagaattaatgacctttactaataaatcagtaggattggggtggattgtgtatttttagctgctggccttctcaaactaagtggatataggagcttgagggtctcaccatttggaatgcagatttttacttagccatcttccactatccccatttacagtgtggcacttcaacctagccctcttcttggtccctacatctaagcctgtctttatatatatatatatatatatctagggtggattgctttttttctcaccagtatccctgtttgcaaacatttaggattgttccttttctactctgctgaattatttgttgttctatttatttccatctttttatgttgtcatttgctattttagatgacactctgtttatcaaaaaagggctttgagtttttctaatcttggtatctcttttatttaaggggtaggttttcaaaaggagtaggggaaattttgggactcttgaactggaaagtctgtttcccaatttgatttgaccatacaactttttggcatgtcaagcaccttttaatttcctggaaagctagtgtgatctatggaagacttatttgggaagtgtttcctctctctccagtacagtctgcatctgcctccataacctccttcaaacttctctctcaaggtcaccaaatacctctttaatgctaagtccgttgaatatgtctcaattctaaccccacctgcatttcatagagttaactgcctcccgtcttgaatttccttccccttgtggcttctttacttaattttgtgttcccttcaaaccaggatctgagacaaggatttggatacaagtaacttatttgcaaggccacttctaaaagcattagagttgaacagtaagaaagggaaaaaaagaaagtcactaaaaggtgccttaataagctggttaaatgctgtgggcaaacgagctcagttttgccagcagccctctgagagactgcggaacacatcacagagttgttccattgaagagcaaggaagctggggtatttatccaccaatttctcactaaggctcactcctggggagtgttaataactccctggtattttcatcctgcccattatataaggtgaatatggtcctcagaccaagaactgcagaagtttgaagtaagaaacaagcttcatctaaataagctatttagaaagctacagagtaagctgagagaatatggatgaggcatcaatatttactacttttaccaatgccgtttttattatcccctcactttctagaccattctttctcaacatgttgttggttcctgtttttcccttacctcttaaattttggtggtccacatgaagtatctgttcttgacctttggctcttcttctctactatttctctggacaatctcatccttgtcttggcttcagccactacatatacttccagatttccagcactggcctctctcttgagctagacccatggagtcatttattcattcaacaaattatttttcaacacttacataatatgctaaacttgatgcctggaatgttaacagtgaactatacatattcctggcccttggagtttatattctagtcaagccatataaacaaatacataaataataaggattatgaratatgataagtgctacaaagtaaactgggtgttgttcttatgtctggttggaaagatcactttacatagattagccagggaagttctctttaagttattggtcttccctgaagtatgagatttagctagccatgtgaagaactgaaagaaaaagactttccagcagagagctaaaagaggccaagtgaaatacagtgtgtttaaagaacaaagaagctagtgaggttgaagtataataaccaaagcagaaaatgacatgaaatgagattggagaggtcggcagcaattgggtcatttggagccttgttgtgttcttcagaagcagacattgagataaaaggtatttattaggcatccttatgaaaggaagaggaagaaaataggaatggacagaggacaaagtcgaaatgtgatgtaggcccaacaaagcttcagccaatttagtaggaagctctggagcaagtattgcccatcagagtctttgtacatctggttgaaatagctgggcctttatggccctgcctgcctgccttattcagttactggatgtgggctgctctggaaaaccattagaaaggtggctacaagctgtggcacatgctaaaattgttgacagctgcagactgtctgctcacagcattcactgcagctgggaagcaagtccttccttgaagaagggcttatccaaatatctccatatttgccacaggcaagtttggattttgttgcaaggacccatttaaagggttgttagtgagaagtggcatgaaaggtcactctgatttctatgtggacattagatcatagaggaccaaggagacttattaggaggcaataatagtccaagcaagaaatgctattggccatagagataaagagaaatgcacaattcaagataaattttgaaggaagaattgataaaatttagtgctaggtaaatgtaggaggtaaagaaaaataggaatcatttaagtaaatgtatacagttgcgtaagggaaggtgatttagctgctgctggctaaagtgcttcttcccaccatgaggacatcccagtaacagcctcctcccccccagatcgtgcccactggtgtgcatttgatatgtcacagagactactttgagagtatagtaattaacttttaggacttccggttagctggaaggctcctctctatgttcatgaagtagggtgttgccttggagcttgcttttatcttagcatgtgaggaaagggagaccaggccctattgaaacaaggcaaaccttctaggggtcagggaaacactgtagtcaggcagcaggatacctgtatgcaaagccatgtgtgtggcttgctgagaactgtgcaaagagtaataagtagtagaaggaaaatatggtggaggcagaaacttgtttcaagtgtagtctaattgtatggccttaagttagccctctgagcctaaggcatctttggacatatttaatttaacatgtttgttagacatccacctccacccagatagttggctatattattctggagcttggggagcagtcaggcttgaaatgaatttgagcttcttcagcatatgtagacaatatttaaacttgggataagaaatgattactttgagagagaatacagatactccttaacttaccatgaggttatatcccgataaacccattgttaaatcaaaaatrcatttaatacacctaacttaccaaattcatagcttagcctagtcgaccttaaacctgctcaggacacttacattagcctgcagttgggcaaaatcatctagtaacacagtacactgtagagtgtggattgtctacccttgtgatcaaagtgatgactgggagctgctgctcaatgccaccacctagcatgatgagaaggtattgtatggcatatcactagcctgggaagagatcagaattcagaatttgaaaatacagtttcaactgaaggcatgtcgcttttgcactgtcataagttgaatcattgtaagtcagggaccgtctgtatagtaaaaaagagggctagaattgagtccttgaagcatttcagtgttctgaagtttggccaagaaggagctaacagttkgataaaaagatatttggatattttacagacaacttaaatttggtatgtttaaagcagaactctttttctgtttcctaccatggttaatggcattatctgttgatagcgacaggaggcagccaaatgcctaggctaataggggcgggtccctggtgaaaccccaccttcaagccaaaaacagcctggaggctgaaagaccaggctgctggtcccagatgaaacctgcaacccagagtgagaacttatgttcctgtttgcctgccctttcctgattaattttttttgaataatgccttttaacaattgaatgttgccttttccaatactccctacagcctgtccctttcccattctgagcccataaaaggctcctgactcagccatattaggggtactttcccactttcggatagggggaccacccctacatcccctctccactgaaagctgtttcatcactcaggaaaactccctgccttgtacactcttcgaatgttagcacatcctcattcttcttaggtgcaggacaagaactcaggaaccagtgtgtaagccagacttggcccaagtgggccgagtaggtgggctgtctcctgcagcaggtagcgtggtcaagcaaggcctgggcagggcatcgccagccagagttcctcagcttgcaaagtgtcactgtcatcactgattagaaacagggattgtcctcatctccttcacctctacatattggtgactaagacctttttcctattgaatatcttaacaatctttttttgtctgtctcaataccattgtcttggttcctgccctaatgattttcttacttgcatttctgcagtggcctgctatccgatttctctgttccagtcttgcacctctccaatctaatttctatagttgccagagtcatcttttttaaaatatgggataaacatataagtctcctgcttatggttgccagatttagcaaacaaaaatacagcatacccagttaaattttaatttcagatgaacaagggataattttacatgtatgtcccatataatttttaggacataaatactaaattatttgatgtttgtatgaaattcaaatttaactgagcatcctgcattttatctggaaatcttgctcttccttcagagcccaaaaatgtttcaccatcactttcagggtgaaacctaaatatcctaacactgcattacaagattcagcatgttctaacccctgtataccatatgaaccactcagtgtcctgaatttgctttgctgctttactccttcatacctctgatcacatgcttactttttcctagaatgcccctctcttcttagttctctggttgattctgattgattgtttaatactgaagtatcaccttctctaaccctccagtccactctggataataactgggacaccagggctgggtgtggtggctcacgcctgtaatcccagcactttgggaggccaaggcgggcggatcacctgagataggagttggagaccaggctgaccaacatggagaaaccccctctctactaaaaatacaaaattagccggacgtggtggcacatgcctgtaatcccagctactctgaaggctgaggcaggagaatcacttgaacctgggaggcggaggttaaagtgagccaagatcacaccattgcactccagcctgggcaaaaacagcgaaactccgtctcaaaaaaaaaaaattaattaataataataataataattgggacactagcttttcttctgcattctcataacattctttgttttatatgattgcagaatttatcatattataatttaatttttttaaacctgcctctcttccttagattgtgagttctttgagcacagggtaaaagttgtgtcttttaactcaatccttggcacttagtgggctctcagttaatatatgcatgaaccaatcagttagtgaatgggaaagtaggaaaggacccataagcattagccacataattggccattggagcttacccagctcttccctatggtrcctcctttgaccatcctctttgttcctcaaagatgcttcataagaataggaactaggttttaatctctgtatccctaggcccttaaattgtaggtgctcagtatatattaaatgaatgaatgaatgaatgaatgaatgaaaaacacatgaatgaataagtatatctttcagggccacagctcctgttgtcccctgcaacaagtcctagagggtgctgcctctgaccatattttttattctctagggcaggctctatatagcctaagttgtagcttctttatgtcttacttcttctcatccaactcttcttccctctctcatcctaggccagaagaattcttttcccccgacagcagctggcacataacagctcaatgaatgttagcaatcattcacagatggagccttttctttcctccagggctcttgcctttctgccatttctttctctctctctgaggccaagcctggaaagccatggggatctgacattgctttttctcccagggattatggtctttcctcttcccacacaagggagcaaggttttctttgtctcccaccagggtagttcaattaaataggactagcattaagtgactctaattattttttattaatgtttaactgctaaatttctttttcaattaaataattgtgtctttatgcttagaggccctttttgcrtatatatgggagttcatttattttagtaaaggaaataccacctgaaaaactgttaatgacttgagctctgtgattagttcattttagtgacattttgagatttaataattaatctggctcaggttcaaagaaagaaaacttaatgccagaaattcctagccagcaaagaatataaacaaaccatacaattgtcccctcaaataacaggaatcattgagatagccttcttgcaattagaaatgttttgaaaaaatgcatgaggaaggttcaagaaagcatgtcaaaacaacaaaactcagtgtacattctcattattgtaattgatcaaaggatgtttgcaatagatttgaatttgaataaattaaatgtgacattgatttggcagaggcgtactagtgattggcaagaacatgtagcaggagcagcttctgctaaagcataactcacttgcctcttgttttattctaatagatttcttagcaacccagtactatcatactaacctaagctctgtcacttatttactctttgggtttctactcccatccaggcaagattaaatttatttttgattactgatctagcaggtgttctcttgggcctaaatacagaataccttttggtgatctatgcacctccctcttttttcttctttctttcgtagatgaaaaagggtgatctaataacttatttcatcctggcagttcaacttgtagaactagaaaatgtagtttaattaaacaacttggcaataaaattcgagctgagacatcactatagcatttgctaggcttgaattgtttctcagcatgttacaaaattaacactgtaaaagaatattcaactctgaacgttttgaaacaacaaattcccattataattttataattatattgaggattgggggctgtgtggtatattctgggaggctactttctgggcatgactatctaatagtaaacaaatgttactggtatggggtcccaaaacatacttcatgccaaatttcacttataatctacataaatcgttttgtagtctatgaaaaacattttaattgactcaaaggcaatgtactcatactttaaaaattttaatatttattaaaataaaaattattcactagtatatatggtttaaattatggaaagaaattagtggagctgtcaaggtcaaatttatgtctggtaagcagtaaaaaatgtatgcatttgggtatatttagtaattgaaatacttttacatctttatcttatgtgtactttgaaaagtatgtctagctccaatagatattaaagatatatgtacatttagcttttgtcacaaatgtaccgctaatgtataattttaaattataactttttataaatccggtttctcattttttatatgtaatataacttgaacttcataaataagctatggttttgttcccacagaagactgaaaaagaacccagttacatgggcctaagactgactcctgagccttaacttgctcttgaaaatagtraactttctaacaatgaagcactgttgaatttattttaaattatatttagattttgtcttggcatgtgttttgaacttcagtttgaacatagttatatatgatatacttggaattcacaagtacttgaagctaaatggagaccatttataaatactaaactttagaggagcctggagccagaacattaaagatgaaatggcatatttktgtgtgtgtgtgtgtgtgtgtgtgtgtgtgtgtgtgtgtgtgtgtgtgttcaacctgccttttttctacctggattcataacatttttaaagcaaagttctaattccctaataaagggctgagcattaactctattccatttccatgtctatcaatataaaaattattcaaatacttttgaagtctattattatggaattttatgcttaccatgaatattacaccatcagcatcatatatatgtacatataaggtattactgaaacactccttcatagaagaattctcagttgactaggtttgagccttttaaggagaaaaattgggctaagggattgaaatcttgaatgatggtttgaaaacagttattcatttttatttatacacacattacacacaacataaaaaatactagtgacattttacatatcttaaattaataaaaatgggtaatttataatttgcataatttgtatttaccttttcttgttaagtatatgtataataacagataatattcctaaaaaatattttgtatatatacttagatctgcatctaaatatttgattccatttaatagtayagactgaggaatgttcactcccacacctctggtctgagtgtggctccagagaagcagaatggtggatacctgaggttgaaaactctttgggtaacctttgaacctattcagatatctctcagcccttccctttccccaatactcatcaagtaatctaaacttatcttccagtcatgataacttcatcagagagcactggtcatcagctcttagccttccctcagatattagagtgcatttccaaagcccaggtttaaatagctttagttttctttctctctcccaacacatcattgcagagacctctagtatttttctaccatttgttttacctcctctttataattcaaatatccacgcatgttatctaataacttccatagcagtaagtgtatattaaagctgaattccttgcctttatggaaagttaatgtatagtaggattttgcatgagggactgtatgattggagcagaataactacttattatatcatgcctaatatctgtgagtgagctataagtcagcatgttagtagattccatatttaagctttgttttttaaaaaaacaaactttaaatctcttttgtcattactacacatagcaagttgcagcattgaatgcaacaataatacagctaccaaaagggctcttaaccagggctcttagcaaagtaacagcattggaaaggacttgagccacaaccttttgggggcttaagttcacatcactgagtaaatgaatagtgcactataaataaccattaactacattacaaaaacaatgatgagcttgttaaaggcatttagatcttttcgctttttctcttttttaatctaatccttcacaaacaatgataatttatattaaattttgaccagaaaaatatataaattcaaacattaaatacatgcaagttgagcagctcaaattcgaaatccagattgctccaaaatccaaaactttttgagcactattaaggcattcaaaggatttggggatacttaactggtaagtaaaaagcaaatattccaagatccaaaaaattccaaaatcccaaacacttctgttcctaagcatttcagataagggatacttaccctataacaacataaacaactcaagcctaaactaatttgctccagctgaacacccctgaaatgagagagatgctcacagaacattggtcattcataacatatacatttaaggaaagttttgacacaccgattttgatacagctcatgcctttttttaatttgtcagtatggtttctttctcttcttccctgagattggtggagaatgatattcttcaatatttcactccaggagactctttaaatgacccttttagaaggggttgacctcatgcatgactctcaattgtcaactccatgaggttctgcttcaggtggacaagaaggccattgttgatacactgctctatatccctagtcaggggagccaagacagtggtataaaacatggaagctttggtgactagagactttttgttgatgggaataaggaggtaataaggcagagtgttgctaatttgagggctgcacgtggtaacaacagcccttttgtctcaggctgtgcgtctcctgaaccaggttcacaaagcttgagaagtttgcttggcagtatagtcatcactggcctcaaaatccgtattggtattttcaatggacagtgtaacaatgcttctcrtgtgctcagggaacttagatttggtggacgtagagttttagggtatccagcacctggcagagtgtccaaacctctggtgtttttcctctgcaatgaagtccttcattctgatcatttccagtgctatttattctacaaggtttccatcttgtatcattttccttcagttgaagtatgtcctttaatttttcttatagtagatayttgtgacaaattcagcttttgtctgaaaatgttcttataataccttcatttttaagatgttttcactggatataggattctaagttgtttctgatgagaactcagtgttatttcttatctttgtcttttgtataagtgtcttttttcctgtgtctagttttaagattttatcattagtatttagcaatttgatttggatgtgccttggttttatgattatcctgcttggggttgttgagcttcttagatctgtgaatttatatttagtcattattttctcttctccttccatgaccacatgtatatcagactgcatagtattgtccaatagctcactgaggctctgttcattttttagcccttttttaaaactctctcttgcttcagtttatgtattttccattgtcttatattcagattcactgttcttctacaaagaagcactcaatttttttatttcataggttgtttttcaccttgaagttatatttggttctttataacagttcccatttctttcctcatgttgattttttttctttaattctttagacatttttatagtaattgtgataaagtccttgtctgttgatttcatcatttctatcatgtgtaggtctacttctgttgactggtttttagtcatcctttcgtcttcacctcttgattacatgatgaacattgaaatattatgtttagtatctcagttgtgttgtcttcctttaaaaaatactgagttttgttctggagggccattaattgacatgtgaaccagcccaaacttttggaagcttttttttttgagacagggtctcactctgttgcccaggctggagtgcagtggtgtgatcttggctcactgcagctttgacctcctgggctcaagtgatcctcccacttcagcctcccgagtagctgggaccacagctgcatgccaccaggcctggctaatttttgtatttttttttctttctttttttttttttttttgtagcaacagggtttcaccatgttgtccaggctggtcatgaactcctggactcaagaaatccacccacctcagcctcccaacgtgctaggattacaggcgtgagccaccacgtacggctagaatcttacttttaagttttgttagrgtagatctagagcagtgcagtccaatccaaatttttgcaatgatggaaatgttttataactgtactttccaatatagtggccattagtcatatttggctatgaaatacttgaaatgtggctagtataattcagtaactgaattttttatttaatttaaatggtatgtggctagtgcctactgtattgtacagcataggtctccaataagctgtactctcgtgccagtttagtcctacacctaaggagtgacccttycgggatctttacaatgtstcaggtgtkcaacgagctctccctggctggttagaacttgactttttcctagtccagtgcaagctccagcaattttcagcctatagttccccagtattctttagtgagaagttgtccttcctgctttatggagtttcaccgcgcacatggacagcttaatattcagctgaacactcaagtgggttactatgcagatttctaaaacttactctgtgtattctggtactccgcctaacatatcccagcatattccagctttctcaggctccctaaacaaccatctctatctctccataaaccaccatcctctggttgggttcccccaccctgtgtagcaaccagtaatgtgtctccagccagaaagctgggatgatatagggtttatctaatttgttactcattgatgcccttcagggatcacactactgtgctgcctattgtccagtatctgaaaaatgtatttttgtccagttttctagtggtgccatggcaggaggactagcctggtaccagttattccatcttttgtctgaaactagtagattacctcttactaacatctctacccayttcaragagagatgtgtacaagtttgctatgtttattttttaatagaatgaaatcactattttaagatatatttgtaccttctgttgtactatcactgcccagtagccagttctttcccaacctttacaayagcccattgaagaagacaacattatctccatttcacacaacatgaaagtgagacacagggaagttaaataatattcatagagtcacacagctggtaaatggtaaaactgggatttgtattcagtggtctggcttcagagcccaaattctatgccactattgagaaacattcagtgaataacaatgtgaagagtatacatatgagtaatttgaggtataaatatttatacttacatagtcacatataaacaagattcaatttttaaatcaataatgtktggcttacattagaatatggaaaaatctgtaatctgcataaacttttcaatctttaagggaactctakaggttacttaaggggaacaaaaggaagatacttccatttggtattgttggtttattcatttattttttgagacagagtcttgctctgtcacccaggctggagtgcagtggcgtgatctcagctcactgcaacctccacctcccaggttcaagcgattctcatgcctcagcctccagagtagctgggattacaggagtacaccaccacacctggctaatttgtgtatttttagtagagacagggttttgccatgttggccaggctggtatcaaactcctgacctcaagtgatctgcccgctttgacctcccagagcgctgggattacagtcgtgagccaccacactggcccatttggcattgttttataaaagcttactcaccttgtaatacataactatcttaggaaacataatactgttatgagtataagccccattttcagataaactgagactaaaaaagttaagtagctttcttggtgtcacacggctagcaaatggtagatttgggattggaaccctgtctgagtcaaagaattacccatgtggattgtcaccacagtgttattttttttaatgaagaagtgaaatattggaagcaacagtagaggtagttgttaagtaaatcatggtacaatactagtgataaaataacattcagccatcttttttttaaatgttaaagaaaaatatttattggcaacaagataaataagtaaaatgatgaatatttgtttttaaaatacaaacatttatgtgaagaaagatgcccgttcctgctttatccttacacaaacactgaaacatactgttatttgataaacgtatggagatatagggtgatattgttccaaggaattggaaggaaaaatacttgctttttggtagtttgtatttgcaaatagactttcttaaaagtccttaaggtctacaattcctatcctgttttctccacctaactactttcttatcaattccaaatattttcattgttgttgtttgggggtttttttgttttgttttatttgagatggagtcttgctctgtcacctaggytggagtgccgtggtacaatctcagctcactgcaacctccacctcccaggttcaagtgattctcctgcctctcagcctcccgagtagctgggactacaggcatgtgccacaatgcacagctaatttttgtatttttagtagagacagggttttcccatgttggccaggctggtgttgaactcttggcctcaagtgatctgcccgcctcggcctcccaaagtgctaggattacaggcatgagccacagaacctggcccttcaattccaamtatttacaagaccgtatttcctttcataaatgatttatgttctgtttaattttgcctggtaccagttatgtttttggtaccagttttgttttttcagaaaaacaaaaggaaattcttttttaggaaaaactatagtctccatattttttaactctgaaatctttaaccatcttcatatataaaaataattaatatattcagattggcttttcttttgcctcaatagctattataagaaagtcttagaagagtaatgttgaataaagagaaattatgtgaaggcaggagaaacaagaacagatctttgccctccattttcttttcatcaaaaagcatatgcatgtaccaactgtaagactgcaactatagaggtgacataaataaagtaggcaggggcacagcttcaggtgacatgactgatctattatacaaaatccaagcaagctccataccaatttctgagtatcctcttgctgcttgaggtcggttactagtggaagtttaacctggtcctgaacttttcattccgctccaaagaacgaacttccattaagacacagggacttgaatttttgtctacttccactatttccagtatgatattgaggaatttcctttgtgatacatcatcaccttatataagaattctagagggtataggaagaagaaaacctgatttctctactctcaccctcacttggagcaaccatacagaactcgcttactgtggtgattaaactactcatggggaattgctatgtgttgtgaaaattacaagaatatttataaatattgttctttcctgcacatatttgctttgagggagaagtttcattagatgggcccttcttcacatctaaaactaagtcttaacactaaaaccacaaaaacttttccccctttaagtacaaactattattttaaatgttactttaatatcagagcttacctttttaaaggactatacaatcaatattacttgaaattcacttgagaaacagaaaggtgatatcatacatttagatatccagatgttgccctttaagtgacattttttgaaagttttgaaattttaaaaatacttgacagaacttttttttttttgktcagtgttgtcagatattagttacattaacattctaatttcacattacaaataacatattcttaaaaattagataatacaggtaagcaaaaagaacattaaaaaatttcacacatttagaaatgcattgtaaaatcagaaggaatggaccaggcgtggtggctcatgcctgtaatcccagcactttgggaggctgaggcgggcagatcacctgaggtcaggagttcgagaccagcctgaccaacrtggagaaaccccgtttctactaaaaatacaaaattagctgggtgtggtggcacatgcctgtaatcccagctactcgggaggctgaggcaggagaatcacttgaacctggaaggtggagattgcggtgagccgaggttgcggtaagccgagatcacaccattgtactccagcctgggcaacaagagcaaaactccgtctcaaaaaaacaaaaaaaaccaaaacaaacaacaacaacaacaaaacacagaaggaatgaataaagaccaaagatgtaattactgtattgcatttatttttaagatacgtatcttttcaaatattaatatctctgaaactatgtgtggaatttgcctttcttaatgctatagtgatgcttcttaaatgtgatggtcttttattcaaggaaatacagtaacaaaggattgattgtaattttgggtatagatcctcctagataraattctgaggaacagaactgcattgtacaatctgtttgcacagatttgagaaagtatttccaatagcaaagaacctctctgcaacagtgtctagggcatgccaaaccctgattccattcctatcctcctcctttcctgccataccactccagaagagaaagggaaatattaatagatgaggcttggttctggtactacagagggtgacgttagcattcacacatctgaatggcaaagaaaaaaaaaaaagggtagtcagagcacttctttctcaccagtggaaaagtacagtcactgagttttagggcagaaatcagtgttaagcttaggaaatctttcatagagtgtctcaggcttctgtgtaatatttcacatttgtttgtttcattttttgngtagtaaatatttctactgtggggtgcttcatgtctattatagcataaaatcaggacagaactgtttatgtaacattagtatgtaatcatacagctttttcaaacttatatacatatctgtatattatttaaatgcaaagtatgtatgtatatatttatatgtatataatgtattttatttttattggctatttttataaaaactttttttaactagaaatttaataatttcttccatttatatatacatgcaggaaatactaaagaatgaaaaacacagagaagaaatcaaaataaaaagccaagatttttatgaaaaagaaaaactccttagtaaagagaccagtgaggaactcctgcctccaccagttcaaactcaaattaaaggccatgcctctgctccatactttggaaaggaagaaccctcagtggctcccagcagcactggtaaaacctttcagccaggatcctggatgccacgagatggcaagagccacaatcaatgaatgcattatggtcaaatcttttcatgtatatggatgtgactattttaacaaataaaagaagtgaaaagttatttaccttgtattttctgaatgtacaatagtttcctattctattaatcttaagagttcatttttagtatgcacaagaaatgtgagattatgtactatagaaacctaacttcttttagacttaaatccttcatttgacttagtcattgttatttatgaatttgcttagatttgtttttccctctttggattactcccttgagaaggatcctgtagctgtgaatgcttagtacattttggatctttatgatcatttgggaaccactcatagatagaactgggtacaaataatgagggtaaatatttttccctctttggattactcccttgagaaggatcctgtagctgtgaatgcttagtacattttggatctctatgatcatttgggaaccactcatagatagaactgggtacaaataatgagggtaaaatagtgagctctcccaactgatcaaatataggagaaaaaagaatgaagattcttatttctggagaggtgacctgtaagattctaaaagactaatcaaaaatgtgaacttggataaaacatgtagaggcaaagaaaacttagttgataagtgaaaaaaaccactaagaccttgatgagaggatgggacaaaagctagcttatggtgggactctggttggaatttgaagagaggaattaggaccaatagaagtatacaatccataacaaagtctgaaaggacagtagagaaagaaataatgcaataactggagttccatgagaacgaaaattactttgaaaaaatagaaaattggggaaagctctcaaaaagcagaaattaatttcactagaagacagaagacaatgtacatgttaaaacattacatacaaaagtacattaaagggccacacattttctggagtgtacaaccaagtttttgttgttattctaaaagtttttctcacaatgtttggcatacaatagatgctcaatatttgctgaacgaatgacccaaatgtgtgtgtgtgtgtgtgtgtgtgtgtgtgtgtgtgattacaaatgcttttcttttgtatttttttattattatactttaagttctagggtacatgtgcacaacatgcaggtttgttacataggtatacatgtgccatgttggtttgctgcacccatcaactcatcatttacattaggtatttctcctaatgctatccctcctctagacccccaccccgcaacaggccccagtgtgtgatgttgccctccctgtgtccatgtgttctcattgttcagctcccactaatcagagagaacacgtgttgtttggttttctgtctttgtgatattttgctgagactgatggtttccagcttcatccatgtccctgcaaaggacatgaactcatcctgttttatggctgcatagtattccatggtgtatatgtgccacattttcttgatccagtctatcattgatggacatttgggttggttccaagtctttgttattgtgaatagtgctgcaataaacatacgtgtccatgtgtctttatagtagcatgatttataatccttgggtatatacccagtaatgggattgctgagtcaaatggtatttctagttctagatccttgaggaatcgccatactgtcttccacaatggttgaactaatttacactcccaccaacggtgtaaaactgttctatttctccacatcctctccagtatctgttgtttcctgactttttaatgatcaccgttctaactggcatgagatggtatctcattgtggttttgatttgcatttctctgatgaccagtgatgatgagcattttttcatgtgtctgttggctgcataaatgtcttcttttgagaagtgtctgttcatatcctttgcccactttttgatggggttgttttttttcttgtaaatttgtttaagttctttgtagactctggatattagccctttgtcagatgggtagattgcaaaatttttctcccattctgtagattgcctgttcactctgatgatagtttcttttgctgtgcagaagctctttagtttaattagatcccatttgtcaattttggcttttgttgccattgcttttggtgttttagtcatgaagtcattacccatgcctatgtcctgaatagtactgcctaggttttcttctagggtttttatggttttaggtctaacatttaagtctttaatttatcttgagttaatttttgtataacgtgtaaggaagggatccagtttcagctttctacatatggctagccagttttcccagcactatttgttaaatagggaatcctttccccatgtcttgtttttgtcaggtttgtcaaagatcagatggttgtagatgtgtggtgttatttctgaggctctgttctgttccattggtctatatatctgttttgttaccagtaccatgcgttttggttactgtagccttatagtttaaagtcaggtggcgtgatacctcctgctttattcttttggcttaggattgttttggcaatgtgggcaaaaaaaagatttttggttccatatgaaatttaaagtagttttttccaattctgtgaagaaactcagtggtagcttgatggggatagcattgaatctataaattaccttgggcagtatgaccgttttcacgatactgattcttcctaaccatgagcatggaatgttcttccatttgtttgtgtcctcttttatttcgttgagcagtggtttgtagttctccttgaagaggtccttcacatcccttgtaagttggattcctaggtattttattctctttgtagtaattgtgaatgggagttcactcatgatttggctctctgtttgtctttcttggtgtgtaggaatgcttgtaatttttgcacattgattttgtatcctgagactttgctgaagttgcttatcagattaagatttttgaatgacccaaatttttatgctctgaatatcttggttaagcattaacaatgaatgcctaaaaacacataaattaaaatttttacttaatagcaggtaaaaattttaactgcctaagaaatacactacagaaacataaaactgcataaaacatttatactaaaacaagtaatcaaatgacaaaatcaccacacttaatgacaaaaagcccaacattccagcagccctgttatataatatcaggttaaatattttatcttattacatcattacaaagtgatactacattttaccacagaggcaaaaaaggaactagtcactaggtaatatgaaaggagatctatacagccagcagggttgctcagacctgtaattccagtgctttgggaggcaaagatgggaggattgcttgaggcctggcatttgagaccagcctgggcaacatagcgagaccccatctctataaaaaaaatttttttttttttgagatggagtgcagtggtgccatctcggctcactgcaaccttcacctccagggttcaagtgattctcctgcctcagcctcctgactagctgggattacagatgggtgcaaccacacccagctaatttttgtacttttaatagagacggagtttcatgaccccattcgagaccatgttggccaggctggtctcgaactcctgacctcaggtaatccagccgcttcagcctcccaaagtgcttggattacaggcatgagccaccacgccctgcggcaaaatttttttttaattagctgggcatgatggtgtgtacctgcagtcccagctacttgggaggttgaggtgggaggatcacttgagcccaggatttcaaggctgcagtgaactatcatcaggccactgtactccagcctggtgacagagcatgactctgtctcttaaaaaaaaaaaaaaggagatacaatttgtgatatagttgggactgtgaattgagattaagatgttcttaactcctagactggattgtagagaaaactgtaaatgttttaacacactagtgtttctactgccaaattcctgttatctcattaattgcattccatatacaccttttgcaaatgtttaccatatagtctgtgtttcccaaactttgggtatttgaccatgtgatcccttttaatatgtttgagaaatgcagaatttgtccttaaatatttattccagatatgaagtaaatcagcatgattctataaccagtagcaaatataaaagcaatcattcctaaataggatcaaattgcctccaacttagaaccatataaaatataaggtctatttcaacattaggtttccagcccacagcttcctgtgcttttttttgagacagagcctcgctctgtcgccaggctggagtgcagtagcatgatcttggctcactgcaacctctacctcctgggttcaagcaattctcctgcctcagcctccccagtaactgggattacaggtgcacgccaccatacccagctaatttttgtatttttagtagagacggggtttcatcatgttggccaggctggtcttgaactcctgaccttgtgatctgcctgccttggcctcccaaagtgatgggattacagacatgagccaccgcacccggcctcctgtgcttatttctagtttgcttattataaacaagtaaaatttaaaatgtccttatatatctgataactagtaatatgctgaaagttatcatggatactatggctcaagttctgacatacaaacttttatttatttgctgatttttgataaaatgtttgttagaggcagccaggggacagctttctttctcccccaagaccagctttagaatggtaattgattgtacttagttctcagaacttcagaaacaatgtaataagtaaacaatttcttaaaagtattctagataatagcaaatgggattctttaacaacagtactctgttgcagtgagaggtgatttttctgaagaatcccaaacctcacaatattctctatactccagccccttacacacacacacacacacacacacacacacacacacacacactgtaaagtatgaatctcacatatatagaaaggctctctaaatgatggaaaaaagtggaaaaaaaaagcatatgtcaaacaaatacaaaactggcatgtgttaagactaataaattatagaaaaacagacctttaaatacctttaagttgttacaacagaactgatgaaaccataactttagtaggtaactgagaattatgactatatcctttgcttcaatacttttactctaaaatgtgaccctaagtaaaacatgtacataaattctttccatgaacagcttgattgcagaaaaccaaacatattatagatatatcttaacactgaataatttcagtgccttgagttataatgtgttgctcacactggcaccaagtagagactgataatctaaaagaatagcattaagtgttattcaaactggtccataaacattctcagtggtccttaggttctgagagatacagtcctgaaattttacaagtatgcttagctgtaactgaaattctaacttgcataacataatgtaacttaaaatgttagttcctccaaaaaaaaaaaaaaatccaggacctctttataaaaaattatcaaatttattttaatgtctagtttcatttttaaactgtagctgctagacaattttttgtaatttaaaattcattaatgggtacagaaaacattaataagctgacagtgaattaaatactaacagtgaataaaattattggaccatgcatttataaaagccatgtttaatagtaaaacgttccagttctactaaactgaaagaaacatcctttagctccctacttccaattacagcacattctcattttgatataatttatccttttcacccaatcactactatgcccaacaaaatgtttccaaattttatacctttctttaccacttatgaagtatggcgtaactgttacactttaagagttctttaaaagaaatgtgaaatttaacgttttactttgaacctgtttgatcagaaagtat

SEQ ID NO: 95982 - DNA, 30292 bp, Homo sapiens
  misc_feature (1)...(30292): n = A,T,C or G
nnnnnnnnnnnnnnnnnnnnnnnnnnnnnnnnnnnnnnnnnnnnnnnnnnnnnnnnnnnnnnnnnnnnnnnnnnnnnnnnnnnnnnnnnnnnnnnnnnnnnnnnnnnnnnnnnnnnnnnnnnnnnnnnnnnnnnnnnnnnnnnnnnnnnnnnnnnnnnnnnnnnnnnnnnnnnnnnnnnnnnnnnnnnnnnnnnnnnnnnnnnnnnnnnnnnnnnnnnnnnnnnnnnnnnnnnnnnnnnnnnnnnnnnnnnnnnnnnnnnnnnnnnnnnnnnnnnnnnnnnnnnnnnnnnnnnnnnnnnnnnnnnnnnnnnnnnnnnnnnnnnnnnnnnnnnnnnnnnnnnnnnnnnnnnnnnnnnnnnnnnnnnnnnnnnnnnnnnnnnnnnnnnnnnnnnnnnnnnnnnnnnnnnnnnnnnnnnnnnnnnnnnnnnnnnnnnnnnnnnnnnnnnnnnnnnnnnnnnnnnnnnnnnnnnnnnnnnnnnnnnnnnnnnnnnnnnnnnnnnnnnnnnnnnnnnnnnnnnnnnnnnnnnnnnnnnnnnnnnnnnnnnnnnnnnnnnnnnnnnnnnnnnnnnnnnnnnnnnnnnnnnnnnnnnnnnnnnnnnnnnnnnnnnnnnnnnnnnnnnnnnnnnnnnnnnnnnnnnnnnnnnnnnnnnnnnnnnnnnnnnnnnnnnnnnnnnnnnnnnnnnnnnnnnnnnnnnnnnnnnnnnnnnnnnnnnnnnnnnnnnnnnnnnnnnnnnnnnnnnnnnnnnnnnnnnnnnnnnnnnnnnnnnnnnnnnnnnnnnnnnnnnnnnnnnnnnnnnnnnnnnnnnnnnnnnnnnnnnnnnnnnnnnnnnnnnnnnnnnnnnnnnnnnnnnnnnnnnnnnnnnnnnnnnnnnnnnnnnnnnnnnnnnnnnnnnnnnnnnnnnnnnnnnnnnnnnnnnnnnnnnnnnnnnnnnnnnnnnnnnnnnnnnnnnnnnnnnnnnnnnnnnnnnnnnnnnnnnnnnnnnnnnnnnnnnnnnnnnnnnnnnnnnnnnnnnnnnnnnnnnnnnnnnnnnnnnnnnnnnnnnnnnnnnnnnnnnnnnnnnnnnnnnnnnnnnnnnnnnnnnnnnnnnnnnnnnnnnnnnnnnnnnnnnnnnnnnnnnnnnnnnnnnnnnnnnnnnnnnnnnnnnnnnnnnnnnnnnnnnnnnnnnnnnnnnnnnnnnnnnnnnnnnnnnnnnnnnnnnnnnnnnnnnnnnnnnnnnnnnnnnnnnnnnnnnnnnnnnnnnnnnnnnnnnnnnnnnnnnnnnnnnnnnnnnnnnnnnnnnnnnnnnnnnnnnnnnnnnnnnnnnnnnnnnnnnnnnnnnnnnnnnnnnnnnnnnnnnnnnnnnnnnnnnnnnnnnnnnnnnnnnnnnnnnnnnnnnnnnnnnnnnnnnnnnnnnnnnnnnnnnnnnnnnnnnnnnnnnnnnnnnnnnnnnnnnnnnnnnnnnnnnnnnnnnnnnnnnnnnnnnnnnnnnnnnnnnnnnnnnnnnnnnnnnnnnnnnnnnnnnnnnnnnnnnnnnnnnnnnnnnnnnnnnnnnnnnnnnnnnnnnnnnnnnnnnnnnnnnnnnnnnnnnnnnnnnnnnnnnnnnnnnnnnnnnnnnnnnnnnnnnnnnnnnnnnnnnnnnnnnnnnnnnnnnnnnnnnnnnnnnnnnnnnnnnnnnnnnnnnnnnnnnnnnnnnnnnnnnnnnnnnnnnnnnnnnnnnnnnnnnnnnnnnnnnnnnnnnnnnnnnnnnnnnnnnnnnnnnnnnnnnnnnnnnnnnnnnnnnnnnnnnnnnnnnnnnnnnnnnnnnnnnnnnnnnnnnnnnnnnnnnnnnnnnnnnnnnnnnnnnnnnnnnnnnnnnnnnnnnnnnnnnnnnnnnnnnnnnnnnnnnnnnnnnnnnnnnnnnnnnnnnnnnnnnnnnnnnnnnnnnnnnnnnnnnnnnnnnnnnnnnnnnnnnnnnnnnnnnnnnnnnnnnnnnnnnnnnnnnnnnnnnnnnnnnnnnnnnnnnnnnnnnnnnnnnnnnnnnnnnnnnnnnnnnnnnnnnnnnnnnnnnnnnnnnnnnnnnnnnnnnnnnnnnnnnnnnnnnnnnnnnnnnnnnnnnnnnnnnnnnnnnnnnnnnnnnnnnnnnnnnnnnnnnnnnnnnnnnnnnnnnnnnnnnnnnnnnnnnnnnnnnnnnnnnnnnnnnnnnnnnnnnnnnnnnnnnnnnnnnnnnnnnnnnnnnnnnnnnnnnnnnnnnnnnnnnnnnnnnnnnnnnnnnnnnnnnnnnnnnnnnnnnnnnnnnnnnnnnnnnnnnnnnnnnnnnnnnnnnnnnnnnnnnnnnnnnnnnnnnnnnnnnnnnnnnnnnnnnnnnnnnnnnnnnnnnnnnnnnnnnnnnnnnnnnnnnnnnnnnnnnnnnnnnnnnnnnnnnnnnnnnnnnnnnnnnnnnnnnnnnnnnnnnnnnnnnnnnnnnnnnnnnnnnnnnnnnnnnnnnnnnnnnnnnnnnnnnnnnnnnnnnnnnnnnnnnnnnnnnnnnnnnnnnnnnnnnnnnnnnnnnnnnnnnnnnnnnnnnnnnnnnnnnnnnnnnnnnnnnnnnnnnnnnnnnnnnnnnnnnnnnnnnnnnnnnnnnnnnnnnnnnnnnnnnnnnnnnnnnnnnnnnnnnnnnnnnnnnnnnnnnnnnnnnnnnnnnnnnnnnnnnnnnnnnnnnnnnnnnnnnnnnnnnnnnnnnnnnnnnnnnnnnnnnnnnnnnnnnnnnnnnnnnnnnnnnnnnnnnnnnnnnnnnnnnnnnnnnnnnnnnnnnnnnnnnnnnnnnnnnnnnnnnnnnnnnnnnnnnnnnnnnnnnnnnnnnnnnnnnnnnnnnnnnnnnnnnnnnnnnnnnnnnnnnnnnnnnnnnnnnnnnnnnnnnnnnnnnnnnnnnnnnnnnnnnnnnnnnnnnnnnnnnnnnnnnnnnnnnnnnnnnnnnnnnnnnnnnnnnnnnnnnnnnnnnnnnnnnnnnnnnnnnnnnnnnnnnnnnnnnnnnnnnnnnnnnnnnnnnnnnnnnnnnnnnnnnnnnnnnnnnnnnnnnnnnnnnnnnnnnnnnnnnnnnnnnnnnnnnnnnnnnnnnnnnnnnnnnnnnnnnnnnnnnnnnnnnnnnnnnnnnnnnnnnnnnnnnnnnnnnnnnnnnnnnnnnnnnnnnnnnnnnnnnnnnnnnnnnnnnnnnnnnnnnnnnnnnnnnnnnnnnnnnnnnnnnnnnnnnnnnnnnnnnnnnnnnnnnnnnnnnnnnnnnnnnnnnnnnnnnnnnnnnnnnnnnnnnnnnnnnnnnnnnnnnnnnnnnnnnnnnnnnnnnnnnnnnnnnnnnnnnnnnnnnnnnnnnnnnnnnnnnnnnnnnnnnnnnnnnnnnnnnnnnnnnnnnnnnnnnnnnnnnnnnnnnnnnnnnnnnnnnnnnnnnnnnnnnnnnnnnnnnnnnnnnnnnnnnnnnnnnnnnnnnnnnnnnnnnnnnnnnnnnnnnnnnnnnnnnnnnnnnnnnnnnnnnnnnnnnnnnnnnnnnnnnnnnnnnnnnnnnnnnnnnnnnnnnnnnnnnnnnnnnnnnnnnnnnnnnnnnnnnnnnnnnnnnnnnnnnnnnnnnnnnnnnnnnnnnnnnnnnnnnnnnnnnnnnnnnnnnnnnnnnnnnnnnnnnnnnnnnnnnnnnnnnnnnnnnnnnnnnnnnnnnnnnnnnnnnnnnnnnnnnnnnnnnnnnnnnnnnnnnnnnnnnnnnnnnnnnnnnnnnnnnnnnnnnnnnnnnnnnnnnnnnnnnnnnnnnnnnnnnnnnnnnnnnnnnnnnnnnnnnnnnnnnnnnnnnnnnnnnnnnnnnnnnnnnnnnnnnnnnnnnnnnnnnnnnnnnnnnnnnnnnnnnnnnnnnnnnnnnnnnnnnnnnnnnnnnnnnnnnnnnnnnnnnnnnnnnnnnnnnnnnnnnnnnnnnnnnnnnnnnnnnnnnnnnnnnnnnnnnnnnnnnnnnnnnnnnnnnnnnnnnnnnnnnnnnnnnnnnnnnnnnnnnnnnnnnnnnnnnnnnnnnnnnnnnnnnnnnnnnnnnnnnnnnnnnnnnnnnnnnnnnnnnnnnnnnnnnnnnnnnnnnnnnnnnnnnnnnnnnnnnnnnnnnnnnnnnnnnnnnnnnnnnnnnnnnnnnnnnnnnnnnnnnnnnnnnnnnnnnnnnnnnnnnnnnnnnnnnnnnnnnnnnnnnnnnnnnnnnnnnnnnnnnnnnnnnnnnnnnnnnnnnnnnnnnnnnnnnnnnnnnnnnnnnnnnnnnnnnnnnnnnnnnnnnnnnnnnnnnnnnnnnnnnnnnnnnnnnnnnnnnnnnnnnnnnnnnnnnnnnnnnnnnnnnnnnnnnnnnnnnnnnnnnnnnnnnnnnnnnnnnnnnnnnnnnnnnnnnnnnnnnnnnnnnnnnnnnnnnnnnnnnnnnnnnnnnnnnnnnnnnnnnnnnnnnnnnnnnnnnnnnnnnnnnnnnnnnnnnnnnnnnnnnnnnnnnnnnnnnnnnnnnnnnnnnnnnnnnnnnnnnnnnnnnnnnnnnnnnnnnnnnnnnnnnnnnnnnnnnnnnnnnnnnnnnnnnnnnnnnnnnnnnnnnnnnnnnnnnnnnnnnnnnnnnnnnnnnnnnnnnnnnnnnnnnnnnnnnnnnnnnnnnnnnnnnnnnnnnnnnnnnnnnnnnnnnnnnnnnnnnnnnnnnnnnnnnnnnnnnnnnnnnnnnnnnnnnnnnnnnnnnnnnnnnnnnnnnnnnnnnnnnnnnnnnnnnnnnnnnnnnnnnnnnnnnnnnnnnnnnnnnnnnnnnnnnnnnnnnnnnnnnnnnnnnnnnnnnnnnnnnnnnnnnnnnnnnnnnnnnnnnnnnnnnnnnnnnnnnnnnnnnnnnnnnnnnnnnnnnnnnnnnnnnnnnnnnnnnnnnnnnnnnnnnnnnnnnnnnnnnnnnnnnnnnnnnnnnnnnnnnnnnnnnnnnnnnnnnnnnnnnnnnnnnnnnnnnnnnnnnnnnnnnnnnnnnnnnnnnnnnnnnnnnnnnnnnnnnnnnnnnnnnnnnnnnnnnnnnnnnnnnnnnnnnnnnnnnnnnnnnnnnnnnnnnnnnnnnnnnnnnnnnnnnnnnnnnnnnnnnnnnnnnnnnnnnnnnnnnnnnnnnnnnnnnnnnnnnnnnnnnnnnnnnnnnnnnnnnnnnnnnnnnnnnnnnnnnnnnnnnnnnnnnnnnnnnnnnnnnnnnnnnnnnnnnnnnnnnnnnnnnnnnnnnnnnnnnnnnnnnnnnnnnnnnnnnnnnnnnnnnnnnnnnnnnnnnnnnnnnnnnnnnnnnnnnnnnnnnnnnnnnnnnnnnnnnnnnnnnnnnnnnnnnnnnnnnnnnnnnnnnnnnnnnnnnnnnnnnnnnnnnnnnnnnnnnnnnnnnnnnnnnnnnnnnnnnnnnnnnnnnnnnnnnnnnnnnnnnnnnnncacctttcccccagagcataggctatccccatttcgtccctccccagccctggtggctcttgggctggcctggacagcgggcccccaccccaacacgggtgagcatgggtgctgagtacccccctctagggctcccagccacctccatgccccggctttgggaccctgcctctccatttctttgatggcccttagcaggctggccacctgaggccttgtccccatctcaggtgaccctgcctgctcctcactgtgagccccctggtgccctagggatggcctgggacaagctccaggagccttggaaggctgagactcaggcgagtggaagccgacacaggcgcagaaaccagtaactgctggggaggccagggctgcagggctccagtggggtaccccagccaataccctgaactgaatgggtcagggcccagaggcgggcctgttcccagagcacgcagcccctcccagcgagagcggggtcagggcccaggaactggccacatgaggaagggagccgcaggagccagggcccgcacggaccctcagggtggtgcttggccccatgggtgtccacctgttctgggtgccgaggctgttgacgggggtgtcgtggccgggatgtgtggggcactcacaccgcccgccctgcagagcagccatggaggaggtggtgattgccggcatgtccgggaagctgccagagtcggagaacttgcaggagttctgggacaacctcatcggcggtgtggacatggtcacggacgatgaccgtcgctggaaggcgggtatgtggctgcggggctccccgtgcctggggtgtgaagctccatctccacctttgtcctcacagcagcctccctgctgtgctgtgtcctcaccacccaggcactggcctgaggccggtcccagctgcagagccactggtcacccatgggcgaggcctagctgcagcctccttcctggacattgcaccagagtggcctagaaaatgcgcccagcctgccaggaggttccctcaacggctgcaaggccaacaggaggctcccccaatggctgcaaggccgagggctggcccaggcagggcccatctgcttgttacggaggagccaagctcagaggatgggtgacgggctggggtctctcacccatgcagggggtgcggggggccagagcccttccggccaggctgcccctgcctgtgtctgtcctgagctgggaggttgcataccagatgtgctccgggaggctggagcaactgccccacacccagtaggctcttccacagagcagctctacctgacaggcaagctgtgagtcagcatggtagagccgaggcaccagcccggcagatggtcccccagcctcactcccgccgagctctctgctctgcggcccatctcaggattggggcttggggcttggggcttgtgcagcagatctggtcgtaccagtccccgctttggggccatggtcttcccctcctggggagcctgctccattgtttgggcctcccaggcatagcagagagtcctcagttccaccatggcccctccaggggcctgcagcaccccacagggcccccacctctgggcagcttccgtcagagatttaaacacccgcctgtcccacagggctctacggcctgccccggcggtccggcaagctgaaggacctgtctaggtttgatgcctccttcttcggagtccaccccaagcaggcacacacgatggaccctcagctgcggctgctgctggaagtcacctatgaagccatcgtggacggaggtgggtcgggcattcgcgactgctgcgccgagggctcctgctgctcacgtggaataggcagtgttttctcttcttggttctggtagaaccaggtgctggcaccacctaccctccccggctgtgcccctggcctggccaacgggctcagggaggtgtgggccacggggtaggccgcagtttcccaactgcaccccagaggtgtcgcgggtgtgccctgaccnnnnnnnnnnnnnnnnnnnnnnnnnnnnnnnnnnnnnnnnnnnnnnnnnnnnnnnnnnnnnnnnnnnnnnnnnnnnnnnnnnnnnnnnnnnnnnnnnnnnnnnnnnnnnnnnnnnnnnnnnnnnnnnnnnnnnnnnnnnnnnnnnnnnnnnnnnnnnnnnnnnnnnnnnnnnnnnnnnnnnnnnnnnnnnnnnnnnnnnnnnnnnnnnnnnnnnnnnnnnnnnnnnnnnnnnnnnnnnnnnnnnnnnnnnnnnnnnnnnnnnnnnnnnnnnnnnnnnnnnnnnnnnnnnnnnnnnnnnnnnnnnnnnnnnnnntcccctcccaccctccccactacccttgcccacgtccccccaccccaggcatttcaaccctctcccgccagcatggccctcgctctgactggcatttgacctcggacaagcgccacgccgtttttttatttttatttttatttatttatttatttttaagacggagtctcactctgtcaccaggttggagtgcagtggcgcgatctcagctcactgcaagctctgcctcctgggttcacaccattctcctgcctcagtctcctgagtggccgggactacaggcgcccaccaccacgcccggctaatttttgtatttttagtagagatggggtttcaccatgtttgccaggatggtctcgatctcttgacctcgtgatccatccatctcagcttcccaaagtgctgggattacaggcatgagccaccacgcccagccatgccatttcttaagatccaggtgctccctccccgggcrgagaaggacctcctgagggggaggctgagccctgggctgcccttgggtgtgagcggttcacacacccacccaccctagggcagagccagcccaccaggggcgaggaggggccctgctggccgagaggtggaagcccttctcctgcgcccttcctgctgccagaccccaccccaagactamggttatgctccccgggggtgaccggtgtccctctctccttcccgagcctggacacttggcctttgtctcctcggttccttatcacggcctgtyctggtgcaggctgcccttggcgctggagaggccactggccgacgggctcatcagagctgccggtgacaccaggggccaaaggcgtcgcctggggacaatgctgccctctgtccttcctggagccactctggccgtgcctggtgccctcccctgggcccgcytgycccctccgcctcgttccctctgtgacctggttcctgttccaggcctcacctgggctggctgctggccacaggctctgttctggcccctctgcaggacacctcaccctccttaggccccttccagggtcccactgggatggaccccccctcaccccaagccagtgaggccaagatgggaccttcgccccagagccgggtgggtgggtgggctggctgcgctgtggggcccggccgtggcaccttgaccactgtttgtggcaggcatcaacccagattcactccgaggaacacacactggcgtctgggtgggcgtgagcggctctgagacctcggaggccctgagccgagaccccgagacactcgtgggctacagcatggtgggctgccagcgagcgatgatggccaaccggctctccttcttcttcgacttcagaggtgggtcctgcccagcctcctgcggaggtgggtggccttcaggtccccacatgctgagcagaaaccacgtggcgtgggctcactccgtgcagtgtgtgtccagcctggtggcaggaggtgtgctcaggggtctcgtgtgctcacagccccacctgagccgcagcacccttccttgcagggcccagcatcgcactggacacagcctgctcctccagcctgatggccctgcagaacgcctaccaggccatccacagcgggcagtgccctgccgccatcgtggggggcatcaaygtcctgctgaagcccaacacctccgtgcagttcttgaggctggggatgctcagccccgagggcacctgcaaggccttcgacacagcgggtgagtgtgcggctgcgcggccagggcaggcgggacagtggcacaggacggccccccgcacagtccccacgctgagcaggatcctgccagctccggggatcccccacccaagcacccaccccacaccccagagctcctcctggtggggtgggggccggcgtggggctgagccccgggcctgaggtgctgctctacccagggaatgggtactgccgctcggagggtgtggtggccgtcctgctgaccaagaagtccctggcccggmgggtstacrccaccatcctgaacgccggcaccaatacagatggcttcaaggagcaaggtgggctctgccggggttccggggtgctggggggcaggtgggagccggggctggggctgcagcactgagccgagccctccgcaggcgtgaccttcccctcaggggatatccaggagcagctcatccgctcgttgtaccagtcggccggagtggcccctgagtcatttgaatacatcgaagcccacggcacaggcaccaaggtgatgccccccccccgccccactcaccaccccatgagcctaacctacgcccatgcctggagaggtgacctggccagagcccctcaccccccatgtttcccacaggtgggcgacccccaggagctgaatggcatcacccgagccctgtgcgccacccgccaggagccgctgctcatcggctccaccaagtccaacatggggcacccggagccagcctcggggctggcagccctggccaaggtaggtggggctgggcttgggggtccctcaggctcctgctccctgggactgggttgcgccatggctgggcactgctgctttctctttgccaagtggaggcgggggcttccccaccaggagcctctgtcccccgggctatgctgcaggtctgagcagaggcactgaggctgacagcagggagagctcgtagccaggctcgctgggccttccctggaggcctgatgccctgcagagcgtctgccggacacggagccgagctggaggagccgcttgggtgggaagagcgaggcaggagcaggcctgggggggtccacggcaccatcagggtctcccgtgtcgcccacccgtccctacagcttcctgacccactagcagaggcctggggacctttagagagaccaggcacaggagccccaacacccatgatcactcacgccctctgccccccaacttctgcagcctctgagatgcaacatctgggccaagggggccttagtgttcaggccacagccaggctttggtgggtccacatcaggctgggaggcagcaaggccggaaggggaggtcttggaccaagctgagggcagggccatggcggctcagtcctcggacccctgtgccatggcagaattaggttggggacaggaagtgcatcggagagggmcctggaaccctggccccacatgagagtctcggggaggtgcctgcccccagctcaggcagtggtagagggagtggggcggctgcccatccaccacgtacccccgcaggtgctgctgtccctggagcacgggctctgggcccccaacctgcacttccatagccccaaccctgagatcccagcgctgttggatgggcggctgcaggtggtggaccagcccctgcccgtccgtggcggcaacgtgggcatcaactcctttggcttcgggggctccaacgtgcacatcatcctgaggcccaacacgcagccgccccccgcacccgccccacatgccaccctgccccgtctgctgcgggccagcggacgcacccctgaggccgtgcagaagctgctggagcagggcctccggcacagccaggacctggctttcctgagcatgctgaacgacatcgcggctgtccccgccaccgccatgcccttccgtggctacgctgtgctgggtggtgagcgcggtggcccagaggtgcagcaggtgcccgctggcragcgcccgctctggttcatctgctctggtgagcccacactctgcccccaaggtggtcccttccctggggaaaggcaggcgaactggagctggtggtcccctgaggtgctctctgggacggggatgggcacacagtggcacgggatggggctgagcctcgtgacrtgctctctgggacagggatgggcacacagtggcgcgggatggggctgagcctcatgcgcctggaccgcttccgagattccatcctacgctccgatgaggctgtgaagccattcggcctgaaggtgtcacagctgctgctgagcacagacgagagcacctttgatgacatcgtccattcgtttgtgagcctgactgccatccaggtagggcccagcctgccagcgtgtgagcaacgccagccccagggctctggctttccctggagcccaggagctgcagtgttgagtccggggcccctgacagcccctttgctaggcagagccttgtgctgggggcaggacgggaggggaggaggggtctcagtggggctgtgtgggggccataggggcttctttcctatcaggagacctgggagggtcgatggggcgcgggrgtggagatggcctagtggggccgggggccgcccccaacagctgcacctgctggaggttgcaacctgagtgtcctgttcccaccccagataggcctcatagacctgctgagctgcatggggctgaggccagatggcatcgtcggccactccctgggggaggtggcctgtggctacgccgacggctgcctgtcccaggaggaggccgtcctcgctgcctactggaggggacagtgcatcaaagaagcccatctcccgccgggcgccatggcagccgtgggtaggtctcccggaggggcccccagcacctccaagaaaggaggctgccttctcgctgtggggtcctcacctgcagccctggcctggcccccgtaggatagagtggcccccgctggcccggggacacccagctcggacacagccgtgcgcgagtcccctgcagctgccccactggccccacacctggcagccttgggcctaggcacgtgtccatgggcatcaggcctgcgtggagcccccgtgtgatgagcacacagctgcagcatagcaagaacccaggggctctggtgaagccaacacacgggtcatcagggttccctcagactggtgccctctgttggcacccatctctgagccccatgggccacatgtgggcaggacctggaaagaaccttggctgcagaggactgagggggccaccatctggggactgggctcccaggagctgcccctggagtggcagctctgtaatgacacctccacccacgggtcaaacacagcagggggcgaacctttctcatgaaggctccaaggctgccattaccacacttgtcattactgcccccagctgcaggcagtgtctgggtgggtgggtggctgggagtggctcrgtgtccacgctaagcctctgaggctggctctgccataggcttgtcctgggaggagtgtaaacagcgctgccccccgggcgtggtgcccgcctgccacaactccaaggacacagtcaccatctcgggacctcaggtgggtgctgcggcctgggcgggctcctctgtcccctgcgcctgccattgcaagtctggcagggacacgcggccacggtctacgccccaccaagctctgacgggcctggggcatggggcaggtttgtcctcaggtcccttgcccattccctctcggttcccttggggtgaggtgggtgcgccctacctctccgagcctgaggtgggtgcccagccaggatgcttatccaggctcccacgatgtccaggcyccggtgtttgagttcgtggagcagctgaggaaggagggtgtgtttgccaaggaggtgcggaccggcggtatggccttccactcctacttcatggaggccatcgcacccccactgctgcaggagctcaagaaggtggactaatacggcctggggggtgcggggcgggccaggggacccacaacccagcactgacctggcccctcatgcaggtgatccgggagccgaagccacgttcagcccgctggctcagcacctctatccccraggcccagtggcacagcagcctggcacgcacgtcytccgccgagtacaatgtcaacaacctggtgagccctgtgctgttccaggaggccctgtggcacgtgcctgagcacgcggtggtgctggagatcgcgccccacgccctgctgcaggtaggcccagcctgggggcagcaggcgccgggagcctgggatgggcgcctcagctgagcaccaagagagcccacctgccctgccgcccccaggctgtcctgaagcgtggcctgaagccgagctgcaccatcatccccctgatgaagaaggatcacagggacaacctggagttcttcctggccggcatcggcaggctgcacctctcagggtgggtcccttcccagcccgggtctcgtctcccggagtcggggacggcgtggggtgggtgagcggggctgcgggcccctcactgacccaggccggtggcagcagccctggatggtccaccgcaggcagtgggtgggctgaacccagagcccctggaccccggtgacgggtgtgctacccatgcctcccttctccgtagcatcgacgccaaccccaatgccttgttcccacctgtggagttcccagctccccgaggaactcccctcatctccccactcatcaagtgggaccacagcctggcctgggacgtgccggccgccgaggacttccccaacggttcaggttccccctcagccgccatctacaacatcggtgagcaggggcccggcgggtgggcagactcttccctccccacagacgcccgctctgtgctgaggcctgtgccctcccgcagacaccagctccgagtctcctgaccactacctggtggaccacaccctcgacggtcgcgtcctcttccccgccactggctacctgagcatagtgtggaagacgctggcccgcgccctgggcctgggcgtcgagcagctgcctgtggtgtttgaggatgtggtgctgcaccaggccaccatcctgcccaagactggtgaggggtaccccaggaccaaggcgggggtagctggggggcgggtgctgccctctgatctccaactytcccgctctgcagggacagtgtccctggaggtacggctcctggaggcctcccgtgccttcgaggtgtcagagaacggcaacctggtagtgagtggtaagcagggccggtggcacgggagctgcggaggctgtgcccgctggccatgccgcccgtcctcaggcccttccgcacctccctttccacagggaaggtgtaccagtgggatgaccctgaccccaggctcttcgaccacccggaaagccccacccccaacccyacggagcccctcttcctggcccaggctgaagtttacaaggagctgcgtctgcgtggctacgactacggccctcatttccagggcatcctggaggccagcctggaaggtgggtactgactacactgctgcccaagccaccggggagggcggtcgtcattgtggggaccacagagggcacccacagctaggcatgcagcttgggagggagcagaggggcccggtgggctctgggaggtggccccagggacctgggagttccacagcaccaaccaggccctgtgtgcaggtgactcggggaggctgctgtggaaggataactgggtgagcttcatggacaccatgctgcagatgtccatcctgggctcggccaagcacggcctgtacctgcccacccgtgtcaccgccatccacatcgaccctgccacccacaggcagaagctgtacacactgcaggacaaggcccaaggtagccccgccccagccccagcccagtgcccccacccaagtatgccgcactcayccagcctgtccccacagtggctgacgtggtggtgagcaggtggctgagggtcacagtggcsggaggcgtccacatctycsggctccacactgagtcggcsccgcggcggcagcaggagcagcaggtgcccatcctggagaagttttgcttcactccccacacggaggaggggtgcctgtctgagcgcgctgccctgcaggaggagctgcaactgtgcaagggtgaggtcccagccctgctggcttcggacacctctggcgatgaggagcgatcgcctcccctcacgttgaccccagacttgcttctccacggggccccctttggggtcagcaaccctagcccaaccctccggccggagctcacgatggcggcctccctccctcccccagcccccagccttcctcgtccctggtcactgttyctcagtcttgaaagggtacttgggggcaaagatgacagattcagcctaaggtcacaccttggctaggcacagagtagcccctgcagctgaatgcggcccctcactgcgtccacagtgggcaggagtcagcctcccagtggtgggcagccccttcctcaaccctcagctatttctcatcctgtgggcagagcggggtggtggccccagaaggacagagtgggtctgagagcccatgccaggcagatgccctggggctttgggaacaccaggcctgcctccctccctccccagggctggtgcaggcactgcagaccaaggtgacccagcaggggctgaagatggtggtgcccggactggatggggcccagatcccccgggacccctcacagcaggaactgccccggctgttgtcggctgcctgcaggcttcagctcaacgggaacctgcagctggagctggcgcaggtgctggcccaggagaggcccaagctgccagaggaccctctgctcagcggcctcctggactccccggcactcaaggcctgcctggacactgccgtggagaacatgcccagcctgaagatgaaggtggtggaggtgggtgcctcctgggcagccaggcctctgccccggacatggtaggacccaccctgacatcagttgcaggagacagcacagacacggggcgggccctgggcggtgggtggggccggccagttccctgtgtggttctgtgcacgtgtcctgtgcggtccacacagccaccgtggagggtccgcccgtgggctccaagaggtgcagcctaggcaggaccccagggacaagaccagtggcatccatgcgtgcccatggctggcaccgtcatcaggttgacggggaagcctttctgccagactgaggcctcatggacattttgcccagccccaggtcaggggcacctgcctggtgtggggctgattccagaattcaccccctacaggtgctggcyggccayggtcacctgtattcccgcatcccaggcctgctcagcccccatcccctgctgcagmtgagctacacggccaccgaccgccacccccaggccctggaggctgcccaggccgagctgcagcagcacgacgttgcccagggccagtgggatcccgcagaccctgcccccagcgccctgggcagcgccgacctcctggtgtgcaactgtgctgtggctgccctcggggacccggcctcagctctcagcaacatggtggctgccctgagagaagggggctttctgctcctgcacacactgctccgggggcaccccctcggggacatcgtggccttcctcacctccactgagccgcagtatggccagggcatcctgagccaggtgcggccrccgggcagggggacagggtgggggccgggtgagggccaggcgggcagggtgctgaccaccgcccccacaggacgcgtgggagagcctcttctccagggtgtcgctgcgcctggtgggcctgaagaagtccttctacggckccacgctcttcctgtgccgccggcccaccccgcaggacagccccatcttcctgccggtggacgataccagcttccgctgggtggagtctctgaaggtcaggccctgccccacctccaggccccaccccacctcccaacttgccgagtgtggcctgaccctccccgacccgctgtagggcatcctggctgacgaagactcttcccggcctgtgtggctgaaggccatcaactgtgccacctcgggcgtggtgggcttggtgaactgtctccgccgagagcccggcgggaaccgcctccggtaggagcacggcccctcaccacttccccttccccaccagcctccccatccccagcctgagctccccgcctctgcccccaggtgtgtgctgctctccaacctcagcagcacctcccacgtcccggaggtggacccgggctccgcagaactgcagaaggtgttgcagggagacctggtgatgaacgtctaccgcgacggggcctggggggctttccgccacttcctgctggaggagggtgagcccccgacactgccctgcccctcccgggagactgcacccgaaggccccgcagcagccccacctccctgtttccctagacaagcctgaggagccgacggcacatgcctttgtgagcaccctcacccggggggacctgtcctccatccgctgggtctgctcctcgctgcgccatgcccagcccacctgccctggcgcccagctctgcacggtctactacgcctccctcaacttccgcgacatcatgctggccactggcaagctgtcccctgatgccatcccaggtatgggtggcatggggccrtgggagtggactgggccggggagcagagaccccagcagctaggacctgcctgggagcccctcgggagggaagggcaggcggtgaggggctcagtgccgtctcccccagggaagtggacctcccaggacagcctgctaggtatggagttctcgggccgagacgccagcggcaagcgtgtgatgggactggtgcctgccaagggcctggccacctctgtcctgctgtcaccggacttcctctgggatgtgccttccaactggtgagtgtgtcgagggtgtgagcctgggccccacgtggatggcggccaggcctgtgctgacccacctgctgcatccccaggacgctggaggaggcggcctcggtgcctgtcgtctacagcacggcctactacgcgctggtggtgcgtgggcgggtgcgccccggggagacgctgctcatccactcgggctcgggcggcgtgggccaggccgccatcgccatcgccctcagtctgggctgccgcgtcttcaccaccgtgggtaaggccccgcccccggtgcctcccgctgccctcctggccccgccgccctggctcaccagccgcgcttcctctcttcaccagggtcggctgagaagcgggcgtacctccaggccaggttcccccagctcgacagcaccagcttcgccaactcccgggacacatccttcgagcagcatgtgctgtggcacacgggcgggaagggtgagtggcccccacagcccccacctgcctcctgcctagcctccggcccagggagaagcagggtctggccctctggactgtggtggctgggcttgcagtgggtgtgattgtctggcccctctggccccctaggcgttgacctggtcttgaactccttggcggaagagaagctgcaggccagygtgaggtgcttggctacgcacggtcgcttcctggaaattggcaaattcgacctttctcagaaccacccgctyggtgaggccggcagcgcctgggcgggggtgggcatggatgggtgtgggtggacctgtggaaggccctgggtgagcacggcccctgcccgcaggcatggctatcttcctgaagaacgtgacattccacggggtcctactggatgcgttcttcaacgagagcagtgctgactggcgggaggtgtgggcgcttgtgcaggccggcatccgggatggggtggtacggcccctcaagtgcacggtgttccatggggcccaggtggaggacgccttccgctacatggcccargggaagcacattggcaaagtcgtcgtgcaggtgaggggaggagtcccggcrcctcgggcaccccaggctctggtccccaggcagtgcctgagccggtgggtgctgcttggacgcaggtgcttgcggaggagccggaggcagtgctgaagggggccaaacccaagctgatgtcggccatctccaagaccttctgcccggcccacaagagctacrtcatcgctggtggtctgggtggcttcggcctggagttggcgcagtggctgatacagcgtggggtgcagaagctcgtgttgacttctcgctccgggatccggacaggtgagtcggcaggggtgcttgtggaccagcctgggccaggcacagccccgggcccctgagcccttctctgcagcccaccattgtgggctgtcacggtgcctggggtctgtccccctccatcttgtggggggcttgctggatggggctctgyrgctgctccccacttccccagcccggcgtgtrgggaagagaccgtaccctggcccagtccagcccacagtcctgtgtcccgcaggctaccaggccaagcaggtccgccggtggaggcgccagggcgtacaggtgcaggtgtccaccagcaacatcagctcactggagggggcccggggcctcattgccgaggcggcgcagcttgggcccgtgggcggcgtcttcaacctggccgtggtgagggaaggccccaaatggggccctcaaaagccccaagaccaagggggggaccctgggtggacgggtgaggccctggagctgcagggagtgctgaggatgcctcccccaggtcttgagagatggcttgctggagaaccagaccccagagttcttccaggacgtctgcaagcccaagtacagcggcaccctgaacctggacaggtgggtaccgcayagccctgctcccgcctctgccgggctctgggctcagggccgtgggagccaaggtggtttgttgacagccctctctggcgtttcctggggatgggacgttgggggctcctggggatgctggccaatggggagtgacacgcgtgcccacagggtgacccgagaggcgtgccctgagctggactactttgtggtcttctcctctgtgagctgcgggcgtggcaatgcgggacagagcaactacggctttgccaattccgccatggagcgtatctgtgagaaacgccggcacgaaggcctcccaggtgggccccaccctctcccctcgaccctgcccaccctgccctctcccagtggccactccccacccccaccttctccccgcagccctgcccaccccaccctctcccagtggccactccccaccccgacctccccgcagctctgcccacctgccccctcccccacaggcctggccgtgcagtggggcgccatcggcgacgtgggcattttggtggagacgatgagcaccaacgacacgatcgtcagtggcacgctgccccagcgcatggcgtcctgcctggaggtgctggacctcttcctgaaccagccccacatggtcctgagcagctttgtgctggctgagaaggctgcggcctatagggacagggacagccagcgggacctggtggaggccgtggcacacatyctgggtgagcactccyagtaggagccgcgccaggtgtttcccctgctggcatcagggtcttgggacatagcagtcgtgcccctgtgcgcctcagtttccccatctgcagagccagggtgcgggcgcaggtgtcactgtggtggtggtgctttgggagatgcacagcccacgcacccctgggtgtcagccctgccgcatacaggccgtccccatgccccctctggagttgccgacccggcgcatcccttccaggcatccgcgacttggctgctgtcaacctggacagctcactggcggacctgggcctggactcgctcatgagcgygsaggtgcgccagacgctggagcgtgagctcaacctggtgctgtccgtgcgcgaggtgcggcaactcacgctccggaaactgcaggagctgtcctcaaaggcggatgaggccagcggtgcgtgtgggyggccaggcgggagtggggtccccgggcctccccagcccttcctccttgttgtctggaccgtgtcccggcaggcatmccgcccttcgtcacgggtgccattctgagcgttcccaccccgactcccacctgacgtagcaccgtggggacctgcgtgcgtgtctgtgtgtccttgcgtgggtgccagggctctgcacccagaccagcctggcatctgcccctgtcttcacagagctggcatgccccacgcccaaggaggatggtctggcccagcagcagactcagctgaacctgcgctccctgctggtgaacccggagggccccaccctgatgcggctcaactccgtgcagagctcggagcggcccctgttcctggtgcacccaatcgagggctccaccaccgtgttccacagcctggcctcccggctcagcatccccacctatggcctgcagtgcacccgaggtactcccgggccctcctctggaagcggtggtcagtgctggccatcacggggcccgtggctgccgcctgcacatgctgagtgcccggcactgccattgcagctgcgccccttgacagcatccacagcctggctgcctactacatcgactgcatcaggcaggtgcagcccgagggcccctaccgcgtggccggctactcctacggggcctgcgtggcytttgaaatgtgctcccagctgcaggcccagcagagcccagcccccacccacaacagcctcttcctgttcgacggctcgcccacctacgtactggcctacacccaggtgagagccaggctggtcctagaggcctacrgcaaacgtctgggctccccacytgtrccctggctttgggggaccgtcgcttaggaggccccgccccttccatctgctcagcagtccctccttcctctcagagctaccgggcaaagctgaccccaggctgtgaggctgaggctgagacggaggccatatgcttcttcgtgcagcagttcacggacatggagcacaacagggtgggtcctggacacccctgaggccgcaggacccagagtactgggcaggaacggaagggggaagggaaggatgggatgggacgcgaagagcgttaaaggccccccaacttcacccctttaatagccgatcccggccggatgcggttgctcatgcctgtaatcccggcactttgggaggctaaggcgggcagattacctgaggtcgggagttcgagaccagcctgaccaacgtggagaaaccccttctctactaaaaatacaaaaattagccaggcatggtggcactcacctatagtcccacctactcgggaggagaatcgcttgaaccgggtaggtggaggttgcggagggaggagaatcgcttgaaccgggtaggtggaggttgcggtgagctgagatcgccccactccatctagcctgggtaacaaaaatgaaactcgtctcaaaaaaaaaaagcccacccgcagtgtagcacagggcaggccggtgctgtgggtgctgccagcacctgctcagagcccgaccccacaggtgctggaggcgctgctgccgctgaagggcctagaggagcgtgtggcagccgccgtggacctgatcatcaagagccaccagggcctggaccgccaggagctgagctttgcggcccggtccttctactacaagctgcgtgccgctgagcagtayacacccaaggccaagtaccatggcaacgtgatgctactgcgcgccaagacgggtggcgcctacggcgaggacctgggcgcggactacaacctctcccaggtgcgcaaggggcctgacgggaacggggacagggacaggagyggggtgggacggcagctgatcgcatcccctgcaggtatgcgacgggaaagtatccgtccacgtcatcgagggtgaccaccgcacgctgctggagggcagcggcctggagtccatcatcagcatcatccacagctccctggctgagccacgygtgagcgtgcgggagggctaggcccgtgcccccgcctgccaccggaggtcactccaccatccccaccccaccccaccccacccccgccatgcaacgggattgaagggtcctgccggtgggaccctgtccggcccagtgccactgccccccgaggctgctagacgtaggtgttaggcatgtcccacccacccgccgcctcccacggcacctcggggaacaccagagctgccgacttggagactcctggtctgtgaagagccggtggtgcccgtgcccgcaggaactgggctgggcctcgtgcgcccgtggggtctgcgcttggtctttctgtgcttggatttgcatatttwttgcattgctggtagagacccccaggcctgtccaccctgccaagactcctcaggcagcgtgtgggtcccgcactctgcccccatttccccgatgtcccctgcgggcgcgggcagccacccaagcctgctggctgcggccccctctcggccaggcattggctcagcccgctgagtggggggtcgtgggccagtccccgaggagctgggcccctgcacaggcacacagggcccggccacacccagcggccccccgcacagccacccgtggggtgctgcccttatgcccggcgccgggcaccaactccatgtttggtgtttgtctgtgtttgttyttcaagaaatgattcaaattgctgcttggattttgaaatttactgtaactgtcagtgtacacgtctggaccccgtttcatttttacaccaatttggtaaaaatgctgctctcagcctcccacaattaaaccgcatgtgatctccaccaccgtcctttcttccctcctccctgacctggcagctgcaagctctccagctccaccccacccagtcacggggccgtgaaggggatgccctctgtcctctggtccccagttcccacacacccctaggccatgtcccagagccggggctgggccggggagtgaggaaggagcccgcgtggcagccccgggcttcccgggaaagcgctgggactggcgggggggggtaccgaggctctggccaagaaacaccaccagtgagaaacgtgtaggaggtacagacactgggaagttggcttcagctgaggagaggcccctcgtggagaatagtatttgcttgaagtcagtggattgcaggcattcgccctgccaaagatgccgtcacagcctcaccaagacggtgtcaatagcgccactggctggccaggttgacccagaagacttgggtttaggcaaaggagtggaggctgggagggagcaagggacagggagccctgggcacctggacccccggcatcgaggggtggggtggacacagcctccaggacccataagggcagcaccccacgggtggctgtgcggggggccgctgggtggacatgagcttggggtagaggcatgggcaggagcgagagccaggattggatttcgggaatgggcaaagcaggccagcccggggttccggaaggcacagcatgcccacagaagaggccctttcagtgtgagtgccaaggcacagaggtgggtgggggctgggagagcccctgctggagaggcaggggagggtgtgggcgcaggggccatctcccagggcagggtagtgggccaggactacagtgaacaccacgggcctgctgggggggtgggcctggtgcagcggctgcaggtgggcagtgtccaggcgtgagtgtggacagcaggcgggcatcggagcgaggctcagccacacccctcctgcggtcccccaacactaggcagctgctcccttcagccgtggtcccctctggcctctctccacccctcctccggccactcccaccccagccgtgcacacaggctcagggccaccagggaggacagaggctcacaggcctatctgggggtggcctcagaactaaactgctttagctccacagcctcaggccctgcagggcaaggcgggtagtgcccagcacatgggctcttgtcacccctcctgcttctcccggctctccggtaccggaatgtggtgtccaggggtctctgaagttcctggctcagctgctgccaggggaggaggcgctctgatgggcctgaggtgcatccaagttgcaaataagcttcagggagacctaagagaaaccacgtatctttgttatgaagatacagttaccttaagtcacacaattatcttcacttcagttattttttctttcgaattaaaatgaaaattaatgtaacgaattggagttctgatccagagagtagcgaggcctggattcaccctcccaccggaaacagctgaaaatccaggcaaaggacaggaggtgctggctgtggggataccaggcctccgccaaagaaggacggtgacccctgggtgggaacaaggtgccaggagccctagggtaacctcagccttctgcctggcagcttccaggccgggcacagtgagaggtggagtccagcagaccccccgagttgaggaagtggagctgagagtccggggggaaaatgaggctgaggattgcaggacagagcacccggggggagctggcagacagtggcggagtgcaggggctgtcccgggaccgccaggcaggaggctacgggggctctcctgtgagcaccaggccaagcaccttcaatgcgtgcgagcaggaaaccagcaggaggattagacggaacagtgccagatactgcacaggtctggaaaccagtgcctgttcctaccaaccagactagaaaacctcagaattcgtgagacattgaatactcagatgggtgtgtctcaaggcccaagatctattagctggttactagttagcgctggtacacctaaaacaaaacaaaaatcttacaaacaagaccccaaagcataaattttttttttcttttgagacggaatcttgctctgtctcccaggctggagttcggtggcgcaatctcagctcactgtaacctccacctcccaggttcaagccattctcctgcctcagcctcccgagtagctacgattataggcacgcgtcaccacgcccggctaattttcgcatttttagtagagatggggtttcaccatgttggccaggctggtctcaaactcctgacctcaggtgatctgcccaccttggtctcccaaagtgctgggattaaaggtgtgagccactgtgcctggcctcaaattgtttccaagtaaacttactccatcccagaacaaagcccaaaaatatttaggtaaaattcacaatccctggggcaactagtgaaaaattagcagccaaagaagcaggaaaacaagacccacagggagagaaaatcaatcaaaaccgaccctggccggacactgatgttggaatcagcagccaaagacattaaagtacttattataggccgggcgcggtggctcacgcctgtaatgccagcacttcggcaggccgaggcgggcggatcacgaggtcaggagatcgagaccatcctggctaacacagtgaaacccggtctctaccaaaaatacaaaaaattagccgggcgtggtggccggtgcctgtagacccagctgctcgggaggctgaggcaggagaatggcgtgaacccgggaggtggagcttgcagtgagccaagatcgcaccactgcactccagcctgggcgacagagcgagactccgtctcaaaaaaaaaaaaaaagagagaccaggtgtctgaaaccagcctgggcaaaacggcaagacctcatctctacaaaaagtaatgggccgggggtggtggttcatgcctgtaatcccagcactttgggaggccgaggtgggtggatcacctgaggtcaggagtccaagaccagcctggcgaacatggtgaaaccccgtctctacaaaatacaaaaattagtcgggcatggtggcgggtacctataatcccagctactcaagaggctgaggtgggagaattgcttgaacctgtaaggcgaaggttgcagtgagccgagatcacaccattgcactccagcctgggcgacaaagggagactccatctcaaaaaaaaaaagaattaagaaataaaatataaaaataacaaacaaaaaataaggagaggccagcacggtggctcacgcctgttatcccagcactttgggaggctgaggtgggtggatcatgaggtcaggagttccagaccagcctgaccaacatggtgaaatcccatctctattaaaaatacaaaaattagccaggcgtggtggcgggcacctgtaatcccagccactcaggaggctgaggcaggagaatcacttgaacccaagaggtggagcttccagtgagccgagattgcaccactgcactccagcctgggcaacagagcaagactccatctcaaaaagaaaacaaacaaacaaaaaagataaggagaaataagagtatgtatgtgtgtgtgtccttatttttgcagaaagaaacacaggaaggataagtccagtgtgagtggaaaggagtcgaagaaatagtagtaaaagggacctttctctgatatgcctttcaatacagttttgatgttttggaaagtcaaaactaaccctaaccctcagcttatatatgtgaaaaaaaattaaatctacaaacggggacaaaactaaagttgaggataaacagaaacaaatgaaccaaactgcacattaaactgatgtggtaaccacacggaagagaaaacctgaaccaccttccgtgggcatgttctaaagatagaaagaattccaaaaacatctagttttttttttgttgtttttttttttcgagacagagtctcgctgtcacctaggctggagtgcactggtgccattttggctcactgcaaaccttgactcccgggttcaagcaattcttgtgcctcagcctcctgagtagctgggattacaggtgcctgccaccatgcccagctaatttttgtatttttagtagagatggggtttcaccatgttagtcaggctggtctcggaactcctgacctcaggtgatctgcccaccttggcctcccaaagtgctgggattacaggcatgagccaccgcccccagccaaatcttgatcttttttagaagatgtattgtaaatgggacagaagagaaatacagaatgggagaaagagaagatagcggaggtgatggactgtaactgaaggcatcagtcatcagtacacgcatgcctttaaaacgatatacgcatgcacatgtgtgcatatctgtattaacgtcattttaaatttggtctgctaaaaaagcctgaaaataacaatagccccaaagtaatgaggacacctgttactaaaatcgtggtctctaaacaccactaccactgacaaaaccagggctccctacaaaacatgcttgattccagggttgggggagggaaagtacagaaaacgaggaagcgctcagaaaacaaaaacaacaaaaacagtgatgtgaacacaagagccagactgcatgcaggggcttgcaccggccaaatctaggacgattcgagcgtcaaaatgaatcatagcagtaatgagttaaacatacatcaaattggctgggtgcaatggctcacgcctgggaggtcgaggcaggtggatcacttgagctcaagagttcaagacaagcctgagcaacatggtgaaacccatctctacaaaaaatacaaaaattagccaggtgtggtggtgcgtgcccgtagtcccagctacttgggatgctgaggtgggaggatcgcttcagtccaggaggtagacgttgcagtgagttaagatcatgccactgcactccagcctgggcaacagagccagaccctgtctcaaaaaaaaaaaacaatcaaaacatcacatccggctgggcatggtggctcacgcctgtaatcccaacactttgggaggccaaggcaggaggactgcttgagcccaggagttccagaccagcctgggcaacatgatgaaatcccttctccacaaaaaaaaatttaaattagctgggtatggcggtgcttgcctgtggtctcagctacctgggaggctgagatgggaggatcgcttgagcctgggaggtcaaggctgcggtgaaccatgactgcaccactgtacaaaaaaagttttgtagggtggcctttgtaactcttgtagctgtaaaatatacgtcaacaaggaacaaggaaatgtatgtcaccgagggctcaaggaaactatactcatacatttattacatttctgcagctggaagtatgatagaaagagggaagtgtccggtatgaattgtatgatattaattctaaagacatttggaaaacttaggatatatgttgagtagccctagaacaactacaaagcaatacaatgaagaatcactaagaagccaatagaggatataaaatagaacactaaaacaatactatttggccgggcgtggtggctcacgccagtaatcccagcactttgggaggccgaggcgggtggatcacgaagtcaggagatcgagaccatcctaaagaacacggtgaaaccctgtctctactaaaaatacaaaaaaaaaaaaaattagccaggcgtggtggcaggcgcctgtagtcccagctactcgggaggctgaggcaggagaatggcgtgaacctgggaggaggagcttgcagtgagctgagatcgcgccactgcactccaatctgggagacagagtgagactccatctcaaaaaaaaaaaaatccaagaaaacagtaagaattaaaaagcaggtgtaattatattgttaatggaaaaagcagacttcatgataaagagagggtcttggaagctt

SEQ ID NO: 95983 - DNA, 75031 bp, Homo sapiens
  misc_feature (1)...(75031): n = A,T,C or G
ggcccagctaaagtaacatgacaacttcatgggtgagataaagcacttaagatatacttccctaaccctctcactaggcaaaaactatggtaacctctagtgaagcagctcaggtgagggaacacttgttacttgggttttcaactgcatagtccttttgcctgttccctgttccccctggcccacctgcattttgagatttggacataccctgaatttgtaccttgctcaggctaaacatgcaaatgggcattgtgtaacagtgttagaaagcacgtgggtgacagcgtctgacagatgcaggagaaaattttggttactaaatgtgagactttgggcaagtgattttccagacttcattttccttatctgaaaattgggataatataatgtacctcttagatgtgttacgaagactaaacaaaaggaaataatatttgtaagacatttaggaaaacatctgatacacaggcaatctatatacttatattcatatacctattacaatattattagtatagatacgaaaagatgacattcattttctttctttctttgttcttttttgagggaggatcttgctgtgtcacccaggctgaagtgcagtggcactatcatggctcactgcagcctcgacctcccgggctcaagagatcctcccacctcagcctcctgagtagctgggactacaggcatacaccactgtgcctggataattttttgtactttttgtagagatgggttttcgccatgttacccaggctggtctcgaactcctgggctcgagcaatctgcccacttctgcctcccagagtgctgggattacaggcgtgagccactaatcactaaaaggctgatattccttttctaacgaggtttatttttgaagcatacatagctttaatttacttcattcaggcccaataaatacagaaacaaattattctctgtagaaaatacttccatctcaccttacttgcttcattgatgatttggaacctggtgctgtcttcatctgttgtgactgaatccaataatgccygataggtggacttcttggaaagccactgtttctgacgcctatagatacggagtatgcagatgcttgataattatttgtgattgtcagtatccaaaagactatattatcatgtggaagtcattaaaattcactatgatattcagtgaatttcagggcacaaacagtattagtactataataaagtgctaatcaggaactttattattagaatgctaataagatgagtattagtaagaatactaatacaattgattattataacgttgctcaaaggatgacatcttatctttcttgagatggtggggcaattttcatagatgacatttgtgaacttgttaatttccctccctctttccataaaatggactttaatagtaactaaataatttctagtggatattaaatataatctagtggtttaacaaggttaccaggcattcactgtagacttccctctagatacctgttcagaattaacataatacgcttttcttcctattaaacagagagggaatacgttagaaagctatactgtataatacaatttttgattatttcagtttcaagatcacgtaaagactgtttttttttttttttttttcaaatgaagattatggccaggcgtggtggctcacgcctgtaatcccagtactttgggaggccgaggtggatggatcatctgaggtcaggaattcaagactagcctgaccaacatggtgaaaccccctctctactaaaaatacaaaaaattagccgggcgtggtggtgcatgcctgtaatcccagctagtcgggaggctgaggcagaagaatcgcttgaacccaggaggtggaggttgtggtgggcagtgattgcgccactgcactccagcctgggtgacagagggagactccgtctcaaaaaaatgcataaaaataaaataaaatgaagattttaaaggcatattttttgtagctctggagaaacaggcaatctttttttttttttagacggagtttcactcttgttgcccaggctggagtgcaatggcacaatctcggctcaccacaatctctgcctcccaggttcaagcaattctcctgcctcagcctcccaagtagctgggattacaggcatgcgccaccatgcctggctaattttgtatttttagtagagacggggtttctgcatgttggtcgggctggtctcaaactcccagcctcaggtgatccgcctgccttggcctcccgaagtgctgggattacaggtgtgagccacctcgcccagccaggcaatcttatataatgttgataggagtacaaatggtataattcctatggagggaaatctggtaatagttaacacatttcaaatgcatttactctttgacccagtaatctcactcctagaaaggtatcctataaatacacctgcatgtgtagaaaatgacctatgtatagctcttcattgtggtagtgctattttagcaaaagattaaaaacaacccaagggtctagcaataagagacagactgaataaattatattaatagtatatctaccccatggaatattatgcagctgtaaaaaggagaaacaatctccatgcactcatatgaatttctcctcagaacaaactataaagcaggaaaaaaaacctatttggtataaaaaggggtgattaaaaaaagagaaaagcaataatataaaaatacatgtatttacaaaaaaatactggaaggataaataagaaatgaagaaattcggttattcgggacaagatgaggaatgggtagaaggggacaggagtggaagcaacatttttcaatgtatagctctttatattatttttgaaccatgtaaaagtgttatctattcaaagcgtcaaaatttaaaactagtttaaaaatattttggcttttaaaataaaatagctgtttattgaaaaatttaaatacttcaggagtaaatgtataaagttaaaagtgagtctcctgtctgatgatttccttaattattaaattatcctttccttggaaagtctatcagttccaaaaatttaataagcatcaattttgaaatactgtcagagatgttttgatctagttactatatttattttccttacctgtaaaatgcgatcytgttacagtctctgaaaatgtttttatctacagcttcatcttcaasactaaataaaaagacattttgagaaatttatttcacacagggcttgtgaatccaacttttgtaccttctctaacgacagtatgaacatgcaaaataaacctttggagtctattctgcaatgcaaaattgtgtcacggccacagtataacataatagcacattatgttgcagaacaatagccttttgtaaaccctctgaggtaaacaacaaaacatcaggttctgggattactccaaaagtaatgggaaaagatcactgtcacttatgaggacatattcttttgaaataatgactgaaggctatgaccacaaaagtaaaatctgaaggaggaaaaccaaaacagcatcccaaaacgaacaaaccaaaaccaaccaaccagacaaactaagaaccataacccacccaccgatttattcaagaaaatattttcagaatattcttcctgagagctgggctctgaggaagatatgaactgtgttcaagctatcagttagggttttaccagcaatcacaatacaagctgacaaatgctttaatagaggtgcaaggtgctagaataagaacagaacagacgtagaaggggaatttcttgctttttaagatgaggtgacaaactaggggccatgttttttaaaaccaagtttccagaagagctgtttctgggataaaacatgaatgagatatatgtatattgaagtttgagtatatgtatttaaactagcctccatctgattaaaacaactacagattataaggagaaaaaaaaaattacaccggctttcatgcactagtgtggccgaatgcatctgtagtcagcatgtccatgattatgtagaaagctatgactgaacacaaacgtcgaaatattatgaaaacaagcccaggcagatatacttggccatactaaaaaactgtttgtccttcactgaactcagtctttgtccgtttattttaatttattaaaaaaattttttttgagacaggatctcgctctgcctcctacgttggagtgaagtggcacgatcttggcttgctgcaactgctgcctcctgggctcaggctatcttcctgcctcagcctcctgagtagctgggactacaggcccacatcaccacgtctggctaactttaaaatttttgtagagacagggattcagcatgttgcccaggctggtctgaactcctgggttcaagcaatctgcccacctataggcctcccaaagtgctgggattacaggcatgagcgaaccggcccagtttattttaatcaagtgtacaaagattggagaatcttttgtttcctctttacagcttcgaagaattaactctgggatgatataggaaggggtgattatagatgaatttggaaagcaacatgcctgaaattcacgtgttaagagttctgattgcaacttttccactgttaatgttatttaaccatcctttttttttggagacagggtctcactttgttgcccaagcagtggcaagatcacagctccactgcagcctccaaatccatcctcccagtggtctcccaagtagctgggactccgaggggacggggagggggtctcgaactcctgaactcaagcgatcctcccaccttagcctcccaaagtgctgtgggattacctgcgtgagccactgcacccggcctatttaaccatcctgaaagtattttatgagaggctattaatatcaactaacttcccgcgaattgagagaaaagataaaggtcagcaaataccaaatacgcaaataagaaatgcaattaaaacactattccctgtttctagggaccctggggtcactcgctacagaagcacttggcctttaccttatttcctctttcactgctgcttccatggcttctctgtcactccgaccagctcccagctctcaggacaagggccctgggcgatcttttaaaaaagccgattgggtgtctttctaaaattacaaccagtacttcatcgtcaagtttctgggaagggagtcccctccagattctcatggagtgacaaatcttgactcttgctcctggaatttttcaggcccaaactagcgtttctacaatgatttatttggcaaatttgtcttgattatgggtggctgatgaggaacgtgcttttgttaggaaccgaaactgggcggcggtgagggcgtgtacgcaatgagtcctagagggtaaaaatcaagagcgttaagaacctggaaatgccgagacggcctccctgactgggacgaagcatctgcagatctatctcagtggcggggtcacgccacagattttgaaaactgaccctctctgtctccgttttcggttaagggtgggaagtgccggccgggtctttgctggaggctaggtctccagccagattgtactgcagcatcgtactcttcagggctagaaggggcctttgaaggttgttacactacccagtctaggaatcgcgtgtactccaccaccgccgaattccagcctttgcttaaataccacccaaaccggagaactcactactagacgccacttgggcagccaggcttagggcttttccagactttctggccccaaagtctgacattgacttagaagggatgaagggctggggcgagcggaagtagagagccaaatcctgcacggggtgcctgcctggtcctaaaacctttaacggctgggagacagaaaagactcaggccaggctggcatgtagcgatctctctaacccagctgaccaggttccaacaggatgacgcctgcgcagtaggtccaaagtctcacggcgcacagacgactgtctgagagaggggccgctacgccgcacagcaaacaagctccgcgacgtttccaggacccggataatcccgcccttagagcagagccggaagaaggcgggacgaaccggaagagggtgaaatgctttcggtaggcactccacggctgtgaagatggcggckgctgcgtggcttcaggtgttgcctgtcattcttctgcttctgggagctcacccgtcaccactgtcgtttttcagtgcgggaccggcaaccgtagctgctgccgaccggtccaaatggcacattccgataccgtcggtgagtattcacttcactaacgtctgaacctagaggagcaaggggtggggctacggcggcccaaggggtccatgaaggttccgcaaaagtctcttcaaaaggggtggggttgctgggatggtctgtgtggctagccaactgggacccacctccctggagtggaaagccgcgcacttctgtgattaggctagcgggaatgtaagggccacttcagcaacagaaaggagtggtggagcggcttctcatcagaaaaacagaactttcagtgcctgacttgagatgtaaacttgatgtacaaacggagagttgtttatctttcagatgtttcacagaatccagtgtccccgggttggataagaaagatatgtaaataggagtcttcatttctttctttctttttcttcctctgcacttcttggtccctgggtaattctgcttacgagatggttcgacttcgcttcaactttggaatggctattctaagctttactgtgtgactagaaagcatagagatttaagaaatgtgttttaacatgggaatggttaaaatggaagaaatagtacttaaaatttaatgtggtaaggctagtctttcatttggataattaactacatgggttgaccctttctgccccttacccattttaaaccttatttcagtaacaggtatagtcctgtgagcagacaaaaaccagatgcagggaggaaatgctgaaaagcattagccccattaaacctacgttggcctttttgtttcattctgctctgctcactgactgtaatgtccaaatcttatttgggcttttattatggtaaacgttataccttttgttcagtggtgaagattttcaggtgttcagttaggtttttacttgttactaaaatggttaatagttaagtctttttagatttgaaaataaaactctggttatttgcacacagaatagttcattagaaaaaatgattggttattctgagcagtgattggtgagtaaagggaatgaactgattaaggggtacgtcccataaagatttaagttaagttggaatttctagcagtcttagatagttatatgatgcttyrgtaattgaagccatctgaggctaattatctttcctttatgtttgcaggggaaaaattattttagttttggaaagatcctcttcagaaataccactatcttcctgaagtgtgagtttttgaatttcatgaagttttaatttgaattttaaaaatttataggtaatgttttaaattacctattttataagttctgaaatctaatagtctggcattatctaggtataaatatttttagtattactaaggtccttttactgaatcatcttcaaagtactcgtgtgaactttattttcttctcttgtttttctggtgtttacattgcatatatacactatgtagacattatatattagtatatataatgtatwtattaatatatatgctgtatatactacattgaatattcagtcacatctcagtcgaattacatttacagttgatactttctgagaaaagcatccttaggtgattttgtcattatgcaaacatcatagagtatacttaaaactggatggcactacacgcctagtctgtatggtacagcctattgctcctaggctataaacctgtataacatgttactgtactgaatgctataggtggttgtaacacaatggtaagtttttgtatatctaaacataggaaagtagagtacaaatacgatattacaattttatgggacccccgttgtatatgtagtctttcatttactgaaatgttatgtagtgaatgactgtgattatgttggggttgattccctgcatggtggttttaatctgttctgtgtagattaaagaggttttactcttgtgtgcttgttaaatgtttactgcaaacatgacctaggtttgtcaggccgttggctgtgaaggaatatatttagtagatcctttatttacaaaaggagtattttactgctttggaagaggaagctcagatattatcaagaaatagggattatgtagaacaaaactagtttgtctagtggaaaaatgactgtatctgaatctaaagtatcccattgtgtgttcagtaaaagcttccttttagttctgaaaccggctttaatttagagaacgattgatcgtgggcagctttatttctagatgagggataaaaatcctgatgatagatgtgtgattctatgcatactgtcttcacggaagtgcaaaattttaagtcatagttggataattttattcttttcaattgtttagtgagtaattattacttattgcatagactgtggggaagtaatagaaaaatgttcttccctcatcgagcttacattctagtgggagtgaaaacagcaggtagaatttctctgaagaatatatactgtatccatgaatatgtaatcagtctcctgaccagtgacttatatttgatttagatcaaatctactctgacactggccttgtgagattggtttactgggtaacctagtaacccttgtcttttggaatagcttgacagcctgtttgctgttttattcttttattaggtccagtctttttttctcttgtagtttgatctagtggtgttttgccaagttaaaccaactgcattttttttaagatggtgtctcactctgtcacccagactggagtgcagtggtacgatcttggcttactgcaacctccacctcccaggttcaagcgattctcctgcctcagcctctggagtagctgggattacaggcatgagtctctatgcccagccctaactgcgtattttgaagtgtttatatttcattgtttttggaggatttgaggcactttattttttgttgttgttttttgagacggagttttgctgtgacgcccaggctggaatgcagtggcacgatctcggctcactgtaacctctgcttcctgggttcaagcgattctcctgcctcagcctcccgagtagctgggactataggcgcgtgccaccacgccggctaatttttgtatttttagcagaggtgggggtttcaccatattggccaggctggtctcgaactcccgacctcaagttatctgcctgccttggcctcccacagttctgggattacaggtgtgagccaccgtgcccggcctgagacactttaacattatctttttctttgttatttctgtgctttctcatatttaccagttgtctttgattttgtactttttgggggatggtatatagctttccatggaatagctgggaccattttttttttttttttttttttgagacggagtctcgctctgtcgcccaggccggactgcggattgcagtggcgcaatctcggctcactgcaagctccgcctcccgggttcacgccattctcctgcctcagcctcccgagtagctgggactacaggcgcccgccaccgtgcccggctaattttttgtatttttagtagagacggggtttcaccttgttagccaggatggtctcgatctcctgacctcatgatccacccgcctcggcctcccaaagtgctgggattacaggcgtgagccaccgcgctcgaccttattgtctcttaaagcctttcatttaaagttctaaatattgtcttgtaacataaacagcagtatttttgctgccaaatttccttacaagtctcctgtttgggggatgtgttcttactggctttttattagttaatcctgtccctgtatggattattttgaatagttcatagcccaattgctttttatcatttccataaattctatccaacaggtcaaatttttgaacattctaatagagtcctttgaaaatgtgttggtcatctaaaaattagtttgagaaaacagtttaaaagaaaaaaaaaggaagcttataattaggttgcgtcttttgttatgaatgaaaagtagattcctaaatgcagtcatgtttatttttgtcatgtttattattacatttatataaagtagggagtctttagtatatttttcctttcatagctagaatcaaagataaaagcgaatactgacttcctccagctaatcagtcatatagtcagatttaccctcccaagtcttcagaataatgtcttgatccattagaatactgtgttccaaactgtgtttaatgagctttatgaagcttccatgataacatgagcttccttgaggcctcttttaaggtaggctttgaaaaaaaaaatctgatactcttatctttgcttttgctatttctaccttccacagccatgtttgcttttcgttcattgctctttctgttctatcttgatatctttcaaggtctgagatagcaattttgctctcagtggaactattatgtatatcatcatttaacaccatttaacagttgtgaatattgccctgtgacatgcattcctaattttattattgcttgtctcttcaactagccttttgaagggtcttaataatttgtttccactcgtttccctctttagcctaacagtgtgccattatacctttgtaatacttgtgctatttatttatttatttatttatttatgttttttgagacagggtctcgctctgtcgcccaggctggagtgcagtggtagcatcatggctcactgcagacctgacctcctgggctcaagtgatcctcctgcctcccttgcctgagtagctgggactacaagcatgtaccaccacgcctagctttttaatcattttttgtagagatgagttctcactatgttgcctagggtggtcttgagctcctgggctcaagcgatccccctgccttggcctcccaaacttctggggttataggtgtgagctaccgcacctagcctgctcaataaatacttaaataatagaagactggcttgaatttagagtgctttatcactcccaggtttttctcaatagagatccagaagttaggactttatggcataaaaatagatccacagtttccagaggttaaaaactgcttacctgctatttttctatgaacaacaatacttttatcttaatatccagctctttttgcatgtattatttcaataccttatgtttggagaaaggatggtctttgagtatctcagtttagggtacgaaatraatrggatataggttaacagcttaggaaaaatgctttgttggggaattatcttttgttaacaaagatttcttcttttgtagttgatggagaaccttgtgacctgtctttgaatataacctggtatctgaaaagcgctgattgttacaatgaaatctataacttcaaggtaaggaacataaaattacagagtttttttggaccttagtgattatctggttccagtctcttaatttcatagaggaaagagtatcatgtagctatggaggaggagagctgaaactagaatgcatgcttcccaatttgcagaccaccaattctcaaactttttggtttcagaactcttatatttgtaaaaattattgtggactccagaaagcctttgagcatgtgggttatgctattagaaattacaactgagaaaatataaaaatatttattagtttattttaaagtagcaataataaacttattgcatgttaatataaataactgtttttcccagaaaaccacacagaagrgtaggattgttttgtatttttgtaaatttgtttactatctggcataacagaagatcactgtattcttatattccctccttcactcagtctgttgcaataatttggcttaagtacatgtagaaaataatgacctcatacagatatatagttgggaaaaggaatggtattttaatggccttttcagataactgaggatattcttttttgattctataccaaaactcaacaagtggaagtttttaaaggttagttgcaatgtggaatctgaaatattaatgaactttttttgtactctgataagaaatccactgatatgaatgtatcttttacctgtgtgtgatcttgtagcatcatttattggtcatttagaaaatagcagttgactgaattatatacatttttataaatattaactcatttcacacttagctaaaaattacattgtttataactataccctgccctcttcatctcatcagtaggttcttaagttttggaagccgttaaattcagtgtagcagatacaagttcttcaaaattccagtttttgcttgaaatctcaaattttattttggcagtgaatactgtcagttgtcttccttgaggggacagcctctgttgcccatttccagagaaataactctcaaataaccaagtctgagtaatggtagtttttcagtcattctttcaagtaaatatggtgtttcgtggaaaaaatgattagtttaactcacaagtcaaagcaattgcagagtgctttatctcaagacaataatttattgtattttgcatgctttccattttgtcacctagattatttaaaaagtcaggtactcaaaaggtccagatttaataacattaataatttttactgctttatctaggatattcttacataaaagtggcatttttaaaaactgccagtttgtgactatgaagaatatgactgctagtagaattaaatgccactgccttagttcctgataaggggcaacagttttacccactattgcttttgtaatatcattacaagtcaaatagcatactattattattatgaaaatagtttttttttttttgagatggagtctcactctgtcacccaggctggagtgcagtggcgcgatctcagctcaccrcaacctctgcctcctgggttcaagtgattstccagcctcagcctcccaagtagctgggattacaggtgtctgccaccacacccggctaatttttgtatttttagtaaagatggggttttgccatgttggccaggctggtctcaaactcctgacctcaggtgatccacctgcctcagtctcccaaagtgctgggattacaggcgtgagccattgtgcccagccatgaaaatagttttgwctatggttcaacggccacacttttgagaattgccataatctagaatacttgagcgttgaaaatayattgctcaaagaataaagctggaagcatcacattacctgacttcaaactgtactacagggctacagtaaccaaaacagacacaaagaccaatgaaacagagaagacagcccagaaataaggccgcacacctacaaccatctgatatttaacaaagctgacaaaaaacaagcaatggggaaaggactccctatttagtagatagtgttgcggtagcgtgctggccatatgcagattgaaactggaccccttcctcacaccatattcaaaaatcaactcaagatagattaaagacttaaatgtaaaacccaaaactataaaaaccctggaagacaacctaggcaataccattctggacatgggaagtggcaaagatttcatgatgaagatgccaaaagcaattgcgccaaaagcaattgcaacaaaagcaaaaattgacaaatgggatctaattaagtttaagagcttctgcacagcaaaagaaactatcaatagagtagacagcctacagaatgggagaaaatatttgcaaactatgcatccaacaaaggtctaatatccagcctctataaggaacttaaacaaatttatatgcaaaaaacaaccccatagaaaagtgggtaaaggacatgaacagacacttttcaaaagaagatatacagccaacaagcatatgaaaaaaaaaaagctcagtatcgttgattattagagaaatgcaaatcaaaaccacaatgagataccatctcacatcagaatggctattatgagaaagtcaaaggataatagatgctggcaaggttgtggagaaaagggaatgcttatacattgttagtgggagtgtaaattagttcaaccactgtggaaagcactgtggcaattcctcaaagagctaaaaacagaattaccatttgacccagcaatcccattactgggtatatatccaaagtaatataaatcattctaccgtaaagacatatgcacatatatgttcactgcagcactgtttacaatagcaaaaacatggaatcaacctaaatgcccatcaatggtaaactggataaatgtggtacatatgcggccataaaaaagaatgtgatacatatgcaaccataaaaaagaatgagatcatttcctttgcaagaacacagaaggagctggaggccattaaccttagcaaactaacacaggaacagaaagcgaaataccacgttttcacttataagtgggagctgaatgatgagaacacatkatcacaaagaggggaacggcagacactgggcctacttgagggtggagggtgggaggagggagaggatcagaaaaaataactcttgagtactaggcagtacctgggtgatgaaataatctgtaaaacagttccctgtgagttcagtttacctatataacaaagttgcgtatgtataccggaacctaaaataaaagttaaaaaaaaaaaaaaaaaatatatatatatatatacacacacatatatatagttctgagttgaatttttcagaccttttccattctgtttctatctctcaatttgcatttttaagaagattatcctagttctgtgcttgcaacaattttctgctctatcttagcttatgagcatgaatatttttttgttgatgttgttaatttggtcaagtaaatcttttaagtatattttaatgtgacaaaaccctctacactctggcagtttcccagtctactcagaattgttagtagaactatgccttgtgagccaaagactagagtctaatagtccttgagtctgatagtgtttgattcttagatatttttatatagagcctttatctgatgctgttcatttttaaaatagcaaactcaaaattgtatctgtactgcaggtgaactgtttgttgtgctgtgctcttagtatcttattttttggaaggtgagttaactactctgtattatctctttttccaggcagaagaagtagagttgtatttggaaaaacttaaggaaaaaagaggcttgtctgggaaatatcaaacatcatcaaaattgttccagaactgcagtgaactctttaaaacacaggtaatctttgaaagtgattggagataaatagaataggcaaaaattggaatgtatatatttttggctgtatccacttccgacttctcaagtatttcttttggcagaagtaagtggaagcatgttctgataggtacatagtcagccacttatacatactcatcaaagagaggttgtactttgctttgtgtgtaaaaagcaaacccccatttttttattgtggtaaaatatacactacataaaatttaccattttaaccatttctaagtgtataatacagtggcattaaatatattcacattgctgtgcagccatcgacccatctccagtactttttttttccccaaggcagattcttgctctgtcccccaggctggagtgcagtggcacaatctcggctcactgcagtctccatcacctggatctaagcaattctttcacctcagcctcccaagtggctagggctacagattcacaccattacgcctggctaattttttttgtattttctgtagagacaggatttcaccatgttagccaggctggtcttgaactcttgacctgaagtgatccacccaccttggcctcccaaaatgctgggattacaggtgtgagccaccgggctgagccccatctctagtacttttatcatcccaaactgaaacatcatacctattaaacaaaaattccccaccttccaaccccaagaccatggtaaccactcttctactttccatgaatttgactattctagatacctcatataaatagaatcatacaacttttgttcttttttgtctgacttcttccacttagcataatgtttttaaggttcatccatgttatagcgttatcagaatttcattcctttttaaggctaagtgatgttctattgtatgtatgtaccacattttgtttttccattcatctgttgatggacatttaaaacgtcacatttttaattctttggtctcctcatctaattaatatgttcccagaaaaatcagggtttttaaaatttacttctatagatctgaaatcagaagggtatcatcattgtcttagagttcaatttcacaccttaattttgtagaaagagggagatgtgaataatcatacatttttcgtgcttacacatatgcaatcatgtaagtggagattctgatatcaaattttgttgtcttagaaatagtaatctcagttttttgatagaaaaattttatatgtgttgaaaatagttatagtaattatcatctatacttgtccttactatatttaaaaattattttggaatatttagcaacttgccttgaactgtcaaattactagaagtaaagtttattattaagaagacaaatttagtcattggtaattgaggccagatgcggtggctcaggcctgtaatcccagcactttgggaggccgaggtgggcggatcacctgaggtcaggagttcaagaccagcctggccaacatggtgaaaccctgtctctacaaaaaaattagccgggcatggtggcgggtacctgtaatcccagctactcgggaggctgaagtgggagaatcacttgaacccaggaggctgagatagtgtcartgcactccagcctgggcgacrrgagtgaaacttggtctcaaaaaaaaaaaaaaagggataattgatgagcagatgaattaattggtaattgaaggaagagttccgcttttattataacttagattttatggtcttggagggaaaagaaaatagctttaagatggtgaaagaatggtagagaaagctagaagcaatgtgatgttgtgtagtttgtatgttttctgttggttttccaaatttatcccttagactaggaggattggttggtcttttcttggatttgattatggaaagctacctgatgcatctggttgctggaggctgactacttttagatgtgctgtaatctttccagggtcttggcttattggtaaggtttcctctcctcctccagtctaatgtaacagggttgaattacacagtctcattactcaggaaggacaatgcctcatctactgataactggtaagaaagataattagtgtagttttttacaggcataaaaaatgtagtatggtggaagggacagcagacctaagcatcaagaatattaggtttaggccgggcgcggtggctcacgcctgtagtcccagcacttcgggaggccgatgtgggcggatcatgaggtcaggagattgagaccatcctggctaacacggtgaaaccctgtctctactaaaaatacaaaaaaattagccaggcatggtggcgggcacctgtagtcccagctattcgggaggctgaggcaggagaatggcatgaacctgggaggcggagcttgcagtgagccgagataacaccactgcactccagtctgtgcaacagagcaagactccgtctcaaaaaaaaaaaaaaaagaatattaggtttaaatcctatttctttgtctaaagctttgtagttttgagccacattttactcatctgtagaatgaggggaaatgatctaagcttcttctatcctaagcatacatcctatatctaaagctttgtcattcttaaatgtttattattctgatagaaaaattgaatggccattttggtttgatactattttctagttcccagcagggttttattcacttgtttgtggttaattggaaatgttttgtctactgatgctgtgttattatatttactagttagggtgtggtgttttgttctaaccatttctttgtattttgagctacacttttcttctagtatttacacacctttaatgttttgttttgtgtttcttttatagaccttttctggagattttatgcatcgactgcctcttttaggagaaaaacaggaggtaattgttttcattatatatttctgagagtgcagtaaaaactttggtggtgcaggagatacccgtgctcactgcatctctaaggagggagtgctgcacctggggagcaggcttccccagtggctacaggaacttgggcagctaaaaacaagaagttctgaattaattattattwttttttaatgtttaaaggctaaggagaatggaacaaaccttacctttattggagacaaaaccgtaagtatatttggggatttggggcattgaacacatattttagttttcttaaatttgtgtatttctgaattgttctcccatactatgctaatatttgaaaagaaagttaaatctggaagctatagaccaaaatgttaaaaatggttggatctctggatgatagtatgagtgatttttagtttctttgtgttttctgaattttctactgtacacatgtattgcttttataattatccccccataaatatctgtaaacaggaagaaacttattaaaaataagaactcttaaacttcatctaaaattatctgtgataaaatataattgaaagagagtttggaaaaattgaaataaggtctaaagctataaatatgccttaagttttcataaatatgcattgtatggatactattttcaaattcataattaattcctcaaaacatcaccagttaaaaatttagaggaaggatgacagctatcaatgttgggttatggtttttacaaagctgattaaagtttttaattttataacaactttatgaaggtataatatacatattacagaagttaygttttgtttcgttttttgagacaaggtctcactcttgcccatgctggagaacagtggtatgaasatggctccctgcagccttgacgtcttgggctcaagtgatcctcctgcctcagactccaagtaactggggccacaggcacataccaccatgcctggttaattttaaaaaattttttgtgggggttgggtctcaccatgttgcccaggctggtatagaactcctaggctcaagtaatcgtctcacttcagcctcccaaagtgctaggattataggcgtgagccactgcacctagcctaaaagttgttattaaagttattaaagcatataattgagtggtttttagtattctcaagttgtgcaagcaccaatcgctgtctaattccagaattgttcatccccaaaagtagccccatactcatcagtcactccgcatttctcctgcccccagcctctgacaatcagtaatctattttctttctctgtacttgccttttctggacattttatgtaactggaatcatataatacatggacttgtgtctggcttctttcacagtttacactctgtctcaacttttacttcctgcttgcacagaaccttaagatcagccagtgaatgattagggcctcctcaggtctctcctggacctgtgcacagccctgggcatgtgtgcacagccctgcacatatggccttctagatttccaggaatattttggagctttccaaaattcctatggacatctcattctccaatttttccttttaagtttccaatcagcctcttaatagcctcagttggtaaggtcacctcaggcagctgtgatcttgaaggattgctgttcaatgtttttgacaaatgctttgagtacagggttgttgacactgggtgatctctgagtcaggtcagataaagacaagccctgagaatggagcttttcagcaatttgccagacagctcaggtgatcagtcttttagggacctccaaatgtattttttcctttgggaggcctaggtgggcagatcacttgagagccaggagtttgacaccagcctggccaacgtggtgaaaccccgtctctaccaaaaatacaaaaattaggcaggtgtggtggtgcacgcctgtaatcccagctacttgggaggctgaagcaggagaatcacttgaacccagaaggtggaggctgcaatgagccgagatcacaccactgcactccagcctaggcaacagagtgaaactctgtgtttgcttcccctaccccctttgcctagtggctgctaagctgttgtttttatcagctgttaacagtttcagggactttggttttaaggagcttgggagagaggaatgggaatagggtgaacacagacatctcaagcttgcttttctttcctagattcagatgcctttcttgaagaaacatttcttggattgttgaaagactttaataatttccaaagttccaaaagttgattttgatagtttttgccagtgttttcgttgcttttatggatgagtagattttcagagtttcttattctgccattctgaaagtgttctcactacctaaaccccagttttatttgtacagaattttaactgaatgtaagttaggcatgacagtctttgttaatttttttaaacaaaagatagccattaggactgggtacagtggctcacgcctgtaatgccaacactttgggaggccaaggtgggcagatgacttgaggttgggagttcgagaccagcttggccaatgtggtgaaactttgtctttactaaaaatacaaaaattagttgctcatggtggcaggcacctgtaatccaagctactcaggaggctgaggcaggagaatcgcgtgaacttgggaggtggaggctgcagtgagctgagatcacgctactgcactccagcctgggcagccagtgagattccatctcaaaaaaaaaagaaaaaagatattcattggattttctcttactaataggtatatattcactgtgaaaatggagacgatatacataaatgaaaagaagaaaatagtaatctataataccatgcagtgatatatttatcttcctattcttttgtatatgggcatgtttatattattttaaaaagggaatcttagagtatgtrttatatgacttttttttgtagcttagcaatataacatggacatgtcgtcagtttggtaaatattgtattgcatcgttacttaaatgcttgtrtagggtcttattgtatgagtacattgcaatttgttcaattctctgttcttgaacttttatgagtttcattatcttggaattttatgcagtgttgtgattaatattttaactacatttgcttttaagtctttattttctgatctcagaagaattgtatattgggataagtttttaattctataacttaaaagtaaaaatcctttgtaattttatgttctaatagttttagcagtttggtgtgattacacagagcacatgcatattaaccaaaataagatcatattatataccattgtataattttttctttttattaccaaattggtacattgaatactacttcacctttttatggctgcttagtgttccattttattatgattttaataactcccaattgatgaacattggggttgttcccaaatttcccctattatggataaagttatgttcataatgtctagctatatttctgtgtacatttataatctttaggctaaattcctggaggtagaattgctagatccacatgtatgcacagtttaaaggtgctttttcatagcaatttatggccccaagaaagtgagagtgagtgtctttgtttatgttgctatgaaaggacacctggagctgggtaatttataaagaaaagaggtttatttggctcactgttctgtgggctatgaaagaagcatggtgccggcatctgtttctagtgagggcttcaggctgtttctactcatggtggaaggtgaaggggggagcctgtgtgtgcagatcacctggcaagagaggaagaaggaaagagggaggaggaggagaggaggtagtgggctttttttttaataatcaaggaaccaatagagggataactcattactgaaaggacagtggcaccaagccattcattagggattggctcccatgacccaaacacctctctctagaattcacctcaaacattggggatcaaatttcaatatgaaatttgggaggacagatatctaaaccatagcagtgagtttccatctttcctcacaaaaacaatggctgtcatcatttaaaatagattttatgcagtttgtctagttaagcaacaatttgttcttgtaaattgtatttaaaaagttatcgttaagccaggcgctgtggctcacacctgtaaccccarcaccttgggaggccacagcaggcagatcgctagagcttacgagtttgagaccaccctgggcaatatggtgaaacctcgtctctacaaaaaatggaaaaattagccagaaggtggcacgtgcacctgtagtccccgctacttgggagactgaagtgggaggatggcttgagtctgggaggcagaggttgcagtgagccaaagtcacaccacttcactctaggcgatagagccatacctcgtctctaaaacaaaaacaacagcaaaaaaattattgttgagggtgaaccttcatttatatggatattggcacttgtgctttcttcagttgtcttctgtgcacagcatactttgagttctactcaaggcttgagtcttgttacagtgattaaaactggctgaaaggtgagcctgttgaataccacaagtaatatttaggaatacttagtcaaaatatagtcaaaagaaatgaaagagttatctatcttttgatctttcttcctgaaaatttggtccaaggcaaataccttataatcctatttaaagaatattcacaggctgggttcagtggtaatctcagcactttttaaggcccaaggtgggtgaatcacttgaagccagggtttgagactagtctggtcaacatgacaaaaccctatctctactaaaaatgcaaaaattagcttggtgtggtggggtacacctgtaatcccagctacttgggtgcatgaggcctgagaatcacttgagcccaagaagcagaggttgtagtgagccatgattgcaccactgcactccagcctgggtgacaaaatgagactctgtctcaaaaagcaaaaaggatactcacaaattcagtacctccatcctatttcattaaagctctgattaaacatatatgtttatgggccgggtgtggtggctcacacctgtgatcccagcactttgggaggccaaggtgggtggatcacctgatgtcaggagttcgagatcagcctggcaaacatggtgaaacctcatctctactaaaaatacaaaaaaaaaaaaaaaaattagctgggtgtggtggcgcacgcctataatcccagctacttgggaggctgaggtgggaggatcccttgaacccaggaggtggagattacattgagccaagatcgttccgttgtactccagcctgggcaacagagcaagactccatctaaaaaaaaaaaaacaaaaatctatatgtttatggaagaaaggtcctctgcatgtcccttcttctaaggaaatattgataaaagagaacactttaatattttgattaactcagttttttggatttaagcaataatgtgatacatttaacataatttaaaaaaattaatagagtttattgtttagagcagttttaggttcacaacagaattgagtaaaaggtacagagagggcagtgcagtggcttatgcctgtaattgcagcacttcagaagccagggtgggaggatcacttgaacccaggagttcaagagcagcctggaaaacattagagacactatctctacaaaaagcaaaagttggccgggtgcggtggctcacatctgtaatcccagcactttaggaggcccaggcagacagatcacctgaggtcacgagttcaagaccaacctgaccaacgtggagaaaaccatttctactaaaaatataaaattagctgcgcatggtggcacatgcctgtaatcctagctacttgggaggctgaggcaggagaatggcttgaacctgggaggtggaggtagcggcgagccaagatcgtgccattgcattccagcctgggcgacaagagcaaaactccgtcttaaaaaaaaacaaaacccccaatttacccagcatggttgtgcatgcctatagtcaccgctacaggggaggctgaagtgaggatcacttgagcccaggaggtcaaggctgcagtgagccatgatcatgccactgtactccagtctaagcaataaagcaagactctgtctcaaaaaaaaaaaaaaaaaggagacctcccacatgctgtgtctatacctgtacacttagcctcccccatcgtcaacatactgcaccactgtggcacactgttaaagttgatgaaccacgttgacatgttattatcaaagtctatagtttaaggttcactctgcattgtacattgtatgaattttgataaatgtgtaaagacatcttcacctttgtagtatcatacagaatagtttcagtgcctaaaaatcctctgtgctctgcctgttcatctctcccttccccttsaactcctggcaatcattgatctttttactatcttcatagttttgccttttccagaatgtcatctagttggaattgtacaaatatgtgacctctttagattggcttctttcagttagtaatatgcatttaagtttcctccatgtcttctggtggcttgatagttcatttctttttagtgctgaatcatattccattgtttggatatatcacagtttatccattcatctattgaaggacatcttgattgctttcaagttataacaattatagataaaactgttgtaaacatttgtgtccaggcttttatgtggacataagttttcaactcatttgggtaattatcaaggagcatgactgctagattgtatggtaagagtatgtttagttttgtaacaattgcatttttgacaatgcagtgcttaatcaaaaacaatgttttgggaacaaaactactcttgtaggctgtctgtctgacagcatcaataactggattgtcacttgtagctttaattaccttactcatggggttaaaaggttcttttgaagggcacttacaattttgagatcataccatgaagacagtgctttaaaaacagttctgttcacaagctagtggtagactgtgaaaaagagaaaaaaaaaaagaaaaaaatagttttgttatggagaacaaaataattaatagttgagatggtagttaagagcccaggctctcgggtcagatgtcctagactttgaaatcccaacttcacaacttaatatttcccttggaaatgttattgtgcttcagtttcttacataataaaatggagctaataggaatgatattaccaagaattgtggagtagtgaggtccaggtctccatgcctccacaaaagcaactagtaagctgatgaaarctatcacattcarctttcacagaactttgaaatctaaccaaaacttaataaggaaaaagttcaacaaagaaagaagctgctacattacattaagaaagtgcagtgatattgtaatttgtttaccataccctccttcccagttcagaggcaggaagatggcaactcgcagtcgtggtgcaggttgctggtgccaggggaactaatacagacctttttcttaaagacttgccattgtgtgttttcacctgcctggaggctccctgaaggaaccttgccaggacttaactttgttttccccaacttagagtgttcccagggctggagtggcttcctgggttgtgtttgccaaaagcatttgaatgcagaagtattatgtgcatagggaaggggataacagtggggataagcaatagagagactgtcaagcatgagaaggaaagggtccagaaaggagatttgtgggagaacaaggctttttaaggcttctgtgtatattgagctatgaagaaagccatatatattctcaagactggacatacgatcagaaaagaccttagatgaccctaagctttcattctggctctgtacaagcaaaaagtgaagaataaggaatggctttaattggcccagctaagcattgaaggattgcgccagggtgcaaagactgggaggatattctgttcttttttgtctttggctcctggtgtttaagaaatctttgtcaaaacactagctgaccactaagctaaaggaatatagattccagtagccacacaggtctaagaatgcagactttacaaaaatggtttagaaaacttactaagcaaaagagacataacccatattattattaccagctaacaaaccccaaggagggggcagattgtggtttccagagttgccactttataacattcagttttcagtggaaaattatgaggcatgcacagaaacaacgtatggcatatttacaggattaaaaaaaatacatgctttgaagaggaagcctcagcattagacttaccagaccaaagattttaagtgaactgtcttaaatatactcaaagagctaaaaataaaaaaaccatggatgaagaaactaaaggaaaccaggagaacatagagataaaaatgataaaaagaatgaagatgagcctgagagacctatgggacaccctcaggtgtatcaacatccacataataggaattcatcagagggagaagagagggagaaaggtatgggaagaatatttgaaggaataatgcccagaaacttaccaaatttgatgaaagtatgaatttcagaaagattgagaggctcacaaatctcaaactacaagcaggaatgaaaaagtaaaatgttgtatgttcataaaatggaatatcattcatctgtaaaaatgaatgggagctggattccaagatggccaaataggaacagctccgtctacagctcccagcgtgatcgacacagaagacgggtgatttctgcatttccaactgaggtacctggctcatctcactgggaatggttggacagtgggtgcagcccacggagggcaagccgaagcagggcaggacatcacctcacccaggaagcgcaaggggtcgggggatttccctttcctagccaagggaagccgtgacagactgtactgggaaaactgggacactcccgccttaatactgcatttttccaacagtcttagcaaacggcacaccaggagattatatcccgcacctggctcagcgggtcccacgcccacggagccttgctcactgcaagtgcagcagtcccaaatcgaactgcgaggtggcagccaggctggggaaggggcatcgccattgctgaggcttgagtaggtaaaaaagcggccaggaagttcgaattgggtggagcccaccacagctcagtgaggcctgcctgcctctgtagactccacctctgggggcagggcatagctgaacaaaaggcagcagaaacttctgaagactaaaacgtccctgtctgacagctctgaagagagcaatcgttctcccagcacagtgtttgagctctgagaatggacagactgcctcctcaagtgggtccctgacccccatgtagcctaactgggagacacctcccagtaggggccaactgacacttcatacagctgggtgtccctctgagacgaagcttccagaggaaggatcaggcaacaatatttgctgttctgcagcctcctctggtgataaccaggcgaacagggtgtggagtggacctccagcaaactccaacagacctgcagctgagggacctgactcttagaaggaaaactaacaaacagaaaagaataacatcaacatcaataaaaaggacatccacaccaaaaccccatctgtaggtcaccaacatcaaagaccaaaggtagataaaaccacaaagatggggagaaaccagagcagaaaagctgaaaattctaaaaaccacagcatctcttctcctccaaaggattgcagctccccgcgagcaacggaacaaagctggacagataatgaatttgacgagttgacagaagtaggcttcagarggttggtaataacaaacctctctgagctaaaggaggatgttcaaacccatcacaaggaagctaaaaaccttgaaaaaagagtagatgaatggctatctagaataaacagtgtagagaagaccttaaatgacctgatggagctgaaaaccatggcacgagaactatgtgatgcatgcacaagcttcagtagctgattcgatcaagtggaagaaagggtatcagtgattgaaaatcaaatgaatgaaatgaagcgagaagagaagtttagagaaaaaaagagtaaaaagaaatgaamaaagcctgcaagaaatatgggactgtgtgaaaaggccaaatctacatctgattggtatacctgaaagtgatggggagaatggaaccaagctggacaacactcttcaggatattatctaggagaacttcccccacctagcaaggtaggccaacattcaaattcaggaaatacagagaacatcacaaagatactcctcaagaagagcaaccccaagacacataattgtcagattcaccaaggttgaaatgaaggaaaaaaatgttaagggcagccagagagaaaggtcgggttacccacaaagggaaggccatcagactaacagacaatctgttagtgggggccaatattcaacattcttaaataattttcaatccagaatttcatatccagccaaactaagcttcataagtgaaggagaaataaaatcctttacagacaagcaaatgctgagagatttttgtcaccaccaggcctgccctacaagagttccggaaggaagcactaaacgtggaaaggaacaaccagtaccagccactgcaaaaacatgccaaattgtaaagaccatcgatgctaggaagaaactgcatcaaccaacgggcaaaataacccactagtatcataatgacaggatcaaattcacacataacaatattaaccttaaatgtagacgggctaaatgccccaattaaaagacacagactggcaaattggataaagagtcaagacccattggtgtgctgtattcaggatacccatctcatgtgcagagacaaacataggttcaaaataaagggatggaggaagatttaccaagcaaatggaaagcaaaagaaaaagcagggttgcaattctagtctctgataaaacagactttaaaccaacaaagatcaaaagagacaaggccattacataatggtaaaggggtcaattcaacaagaagagctaactatcctaaatatatatgcacccaatacaggagcacccagattcataaagcaagtccttagagacctacaaagagacttagactcgcacacaataataatgggagactttaacaccccactgtcaatattagatcaatgagacagaaggttaacaaggatatccaggacttgaactcagttctgcaccgagcagacctaacagacatctacagaactttccaccccaaatcagcagattgtacattcttctcagcaccacatcacacttattccaaaattgaccacatagttggaagtaaagtactcatcaacaaatgtaaaagaagtcacaaccgtctctcagacgacagtgcaatcaaattagaactcaagattaagaaactcactcaaaaccacacaaatacatggaaactgaacaaactgcttctgaatgactgctggataaataacgaaatgaaagcagaaataaagatgttctttgaaaccaatgagaacaaagacacaacataccagaatctctgggacacatttaaagcagtgtgtagagggaaatttatagcactgaatgcccacaagagaaagcaggaaagatctaaaatcgacaccctaacatcacaattaaaagagctagagaagcaagagcaaacaaattcaaaagctactagaagacaagaaataactaagatgagagcagaactgatggacatagagacacaaaaaacccttcaagagaatcagtgaatccaggaactggttttttgaaaagatcaaccaaatagacctctagcaagactaataaagaagaaaagagagaagaatcaaatagatgcaataaaaaatgataaaggggatatcactactgatcccacagaaatacaaactaccatcagagaatactataaacatctccacacaaataaactagaaaatctagaagaaatggataaattcctgtacacatagaccctcccaagactaaactaggaagaagttgaatctctgaatagatcaataacaggttctgaaattgaggcaataattaatagcctaccaactaaaataagtccaggaccagatggattcacagctgaattctaccagaggtacaaagaggagctggtaccattccttctgaaactattccaaccaatagaaaaagagggaatcctccctaactcattttatgaggccagcatcatcctgataccaaagcctggcggagacacaacaaaaaaaagagaattttagaccactatccccgatgaacatcgatgcgaaaatcctcaataaaatacttgcaaaccgaatccagcagcacatcaaaaagcatgtccaccaagatcaagttggcttcatccctgggatgcaagggtggttcaacatatgcaaatcaataaacgtaatccatcacataaacagaaccaaagacaaaaaccacatgattatctcaatagatgccgaaaaggcctttgacagaattcaacagcccttcatgctaaaaactctcaataaactaagtattgatggaacgtatgtcaaaataataagagctatttatgacaaacccacagccaayatcatactgaatgggcaaaaactggaagcattccctttgaaaactggcagaagacagggatgtcctctctcactactcctattcaacatagtgttggaagtaatggccagggcagtcaggcaagagaaagaaagaaagtgtattcaattaggaaaagaggaagtcaaattgtccctgtttgcagatgacatgattgtatatttagaaaaccccatcatctcagcccaaaatctccttaagctgataagcaacttcagcaaagtctcaggatacaaaatcaatatgcaaaaatcacaagcattcctgtacgccaataacaaacaaacagccaaatcatgagtgaagtcccattcacaattgctacaaagagaataaaatacctaggaatccaatttaaaagggatgtgaagaacctcttcaaggagaactacaaaccactgctcaaagaaataaaagaggacacaaacaaatggaagaacattccatgctcatggataggaagaatcaatattgtgaaaatggccatagtgcccaaggtaatttatagattcaatgccatccccatcaagctaccaatgactttcttcacagaattggaaaaaatacttcgaagttcatatggaaccaaaaaagagcccacattgccaagacaatcctaagcaaagagaacaaagttggaggcatcacgctacctgacttcaaactatactacaaggctacagtaaccaaaacagcatggtactggtaccaaaacagacatatagaccaatggaacagaacagaggcctcagaaataacaccacacatttacaaccatctgatctttgacaaacctgacaaaaacaagaaatgggaaaaggattccctatttaataaatggtgctgggaaaactggctaggcatatgtagaaagctgaaactggatcccttccttacacctcatataaaaattaattcaagatggattaaagacttaaatgttagacctaaaaccataaaatccctagaaggaaacctaggcaataccattcaggacataggcatagggaaggacttcatgactgaaacaccaaaagcaatggcaacaaaagccagaatagataaatcagatctaattaaagagcttctgcacagcaaaagaaactaccgtcagagtgaacaggcaacctgcagaataggagaaaatttttacaattcacccatccgacaaagggctaatatccagaatctacgaagaacttaaacaaatttacaagaaaaaatcaaccccatcaaaaagtggacaaaggatatgaacagacacttttcagaagaagacgtttatgcagccaacagacacatgaaaaaatgctcatcatcactggtcatcagagaaatgcaaatcaaaaccacaatgagataccatctcatgccagttagaatggtgatcagtgaaaagtcaggaaacaacaggtgctggagaggatgtggagaaataggaacacttttacactgttggtgggggtgtaaactagttcagccattgtggaagacagtatggcaattcctcaaggatctagaactagaaataccagttgacccagccatcccattactgggtatacacccaaatgattataaatcatgctagtataaggacacatgcacacgtatgtttattgcagcactgttcgcaatagcaaagacttggaaccaacccaaatgtccgtcaatgatagactggattaagaaaatgtggcacatatacaccatggaatactatgcagccataaaaaaggatgagttcatgtcctttgtagggacatggatgaagctggaaagcatcattctgagcaaactctcgaggacagaaaaccaaacactgcwtgttctcactcataggtgggagttgaacaatgagaacacttggacacagggtggggaacatcacacagtggggcctgtcgtcgggtcgggggctgggtgagggatagcattaggagaaatacctaatgtaaatgacgagttaatgggtgcaacaaaccaacatggcacatgtatacctatgtaacaaacctgcacgttgtgcacatgtaccctagaacttaaggtataaaaaaaaacaacaaaacttgggtctcagtacttagaaaatagttaaccatgatcaataaaatatttgccaattccttcaactcaaaaagaaaaaaataaatgaagcactgatacatacagcaatatagatgaaccctgaaaacattatgttaagtgagagaagctagacccatttatatgaaatgtccgtaatagatgactccatggagacaagaagtaaataagtagttgcaagtggtgacagaggaagaaatggggagctactgcttaatgagtacagggtctccatttcggttgatgaaaatgttttggaactagatagaggtgatatttgcacatcattgtgcttgtaccacataccattgatttatacgcattaaaattgtgaattttatgttgtgtaaaatttaccttagtttacaaaggagttaatacctatctgatagggctgctgtgaggatgtaaaaatgtagtaaatgggccggggcgtggtagctcacaccttaatcctagcacttagggaggccaaggtgggtggatcacctgaggtcaggagttcgagaccaggctggccaacatggcgaaaccccgtctctaccaaaaatacaaaaaaaaaaaattagctgggtgtggtgtcatgcacctgttatcccagctacttgggaggctgaggcaggagaattgcttgaacccgggaggcggacgtcacagtgagccaagattgcactgctgtactcctgcctgggcgatggagcgagactctgcctcaaaaaaaaaaaaaaaaaaaaaagtaataaatgtcatatgcttaacagagttatctggcatataaatgttatttttacagggtcagaatctctgcattccagagttaagtataaactttctcaaatcctggaatatgagaattgatcaatttattttagaatttgtaagaggtggttttaagacatatatgattaatagagcaggttattacaccagcattttataggttgatgagtaagtaagttcaggaaaggttctgtaattatggctaagcagacatgtattacccataactttgaagctgcaaagttttctcacaaattggttgtgagtctcgtcagagactattaggtggagataaatcaatgtatgattaggaagacatttatattcttaaattttactaagataacctagtaaatggatatctggagaattgtttagtctgctttgtttgacatggatttttatcatggaatataatttttgaactaagccttttcttggttgtaggatattttaaccatttgaggagaactatggctccacaggaaaatgcataaacataaaaaatcagctattcattttggggggttcacagaacctagaagcttacccagagatctctggataaacgtttctccttttaagaacagatggtagtaaattgcaattccaaggaagaagaaaccagttattttctgtgttcctctttatcattgtgtcttagtcttctgtttgtgaagactctagtctatgtgaaaagcaagagtcactacccctcaaagtcaaggacttggagactgttaatttgtcttccttgactttgaggggtagtgactcttgcttaccacatagactagctcaaggttaaatttttgatataaatgtgagaccatgtcagcagaaattctgatattcttgggaagcatgttgaacaaagggattagatttaggaattggtgattagaattcattttactgataccatcattaagttttgtttaaggtgatttaaataatcatttaaattcctttgtaatgtctgcataaaacacaaactagtatcctagtatggcttagttaaacagagattaaattagtgattttagttgggggtttcctcattaaaaaaatatgttaaatgtgatttttgtgtacaagacatggtatcttgcctttcagtaattcataatctagcctactttatgcactaggcttgtttggtttgttgtgcctaatgtttcaatgaatgaaagagaaggactttaccatatttctgggcacattctggagcaaaatttgcatattgtattattaatttgtgctcttaattcttaagatttatagatgtgatgcccttttccctttctaggcaatgcatgaaccattgcaaacttggcaagatgcaccatacatttttattgtacatattggcatttcatcctcaaaggaatcatcaaaagaaaattcactgagtaatctttttaccagtaagttcagttttttttttaatggttatgttattatctggttatgtcattcatgtactttacatatgcttttttattaggtattacaggtatcagatttctatttccttcatttgacactcctgctgttaaaatttttagttagtaacatgttttcagtattctgaactagaattgtcaaaacttggtcaccaagccagagataaggaaattttaaattaattaacattggccgggcgcggtggctcatgcctgtaatcctagcactttgggaggccgtggcaggcagatcacatgaggtcgggagttttaagaccagcctgaccaacatggagaaaccccgtctctactaaaaatacaaaattagctcggtgtggtggcacatgcctgtaatcccagctacttgggaggctgaggcgggagaatcgcttgaacccgggagatggaggttgtggtgagccgagatcacgccattccactccagcctgggcaacaagaactttcgttcttgttctcaaaaaaaaaaaaaaaaaaaaattaattaacattggtagtttttaatgtctcaagaatttaagtgttctcctttccaaggttgctgcctagttcatagagtcatcatcttttacgtggaatttccaagaacttcctaactggtcttatttcctgtggtttcccccttgtttcttctttgtgtttttgcaatttcctttcctcccctgctttctttttatttatttatttatttatttatttatttatttatttatttttgagatggaatctcactctgtcgcccaggctagagtgcagtggcgtaatctcggctcactgcaagctccgcctcctgggttcacgccattctcctgcctcagtctccgaagtagctgggactacaggcgccygccaccacacccagctaatttttttgtattttttagtggagacggggtttcaccgtgttagccaggatggtttcgatctcctgaccttgtgatccgcctgccttggcctcccaaagtgctgggattacaggggtgagccgccgtgcctggccctttcctaccctgctttcttaagcagaatatggaatagaaacaatgatggcagccaccgttacttcgctcctgactttactggctgtattggtatatttcaccattaagtactgtgtttactgtagaacttttgaaatattcttcatttggttaaagatgttcctttctattcctagtttaatgagaatagtttccttttttaaaaaaaatgttaagaatgaatacttagctttatcaaatagtttaattgtactgatttaaatgatcatatgggctttctcatttaataagttaatgtcatacattaaattaactgatcttctaacattaaatcattgttgaacttctgggataccactacttggttttgacacacacacgcatattctctctgtctgtctgtctctctctctctttctcttcctctcctccctccctccctctccctctctccctgtcccctctccccctcactcatacatgtgtatcctcctgtctttttaggcccatgactttctaatggattatagtctcaaggcacagttaccagtgttcattttcaaccttctttctttgaaaaggctggaagagaagctttattccaccctacttcagcttcttcatgcatccagcctggctctggtccctcttctttttctttgaaacctactagcttcaatgatcccatgtactaccgtagtacattggtagtgtacttccaactaccatagatcccatagggacagcacttccaactaccatagcctgcttttggcccaagagcccaacatgatcatggagtcggcctcgtgcactgttttgagtttctgttttgattcttggaaatgtctgtcttgtttttgagcttatatccttttttgtttttttctttttctttttttttttctttttttttttgagatagagtctcactctgtcacccaggctggagtgcagtggtgtgatcttgactcattgcaacctctgactcctgggttcaagtgattctgctgcctcagcctcccaagtagctgggattactggcctgcaccatcacacctagctaatttttgtatttttagtagattgtgtttttacaacctactaaattattatttatctgctaaattattaaatctactagatttttatttagtagattgtatttttagtttcaccatgttggccaggctggtcttgaactcctgacttcaagtaatctgcccgccttggcctcgcaatgtgctgggattacaggtgtgagccsccgcacctggccttgttttttcattttaaaaataccygtctttttttggaatggagaagatacatcatcactaatacagttttatcatttttcttcccttcatcgaaacctttaatggatggctccccattgcctataaaatgtctacattttgcagcaaggtttataaaactctttacaactggtcccagtttaccttttgctgccttatgtcaaaacaccactactatatggtattatatgcagtctcagactatatttgttctttaaatataccacacattttcacagctgttttgttcatgttatttcctctacctagaaggctttttactttgttctggaaaatacatacttatccttctagtctggctgagagggatagttctctacttatccttctagtctggctgagagggatagttctctatgtagcttgtcaactccctctcccctgcaaggtggttacccatttgatggcagaaaacatcttactcatgtttctgtctgctgtgttttccataggcctgtcaaataataagtgcttagtaaatgtatattttagcatagagcaggggctagcaaatttttttcttaaagagtcaggtagtaaattttttctctattataactacccaactctgcgaggtggtgcagaggcagctgtagacaatatgtaaatgagtggatgtggctgtgttccaataaaactttattaacagaaaaagctggtggccagatttggcccatgtgctatattttgctgaccaaggcatagagtaagcaaagaatatgatccaagtatttactaattattttgtttactcttttattgaattaggaaggtatagatttaataatagttctgctctgaaatttttataattgctcttatggaatgctctttttttcatgtaagtattggatgtagtttactttaaataatggtatatcagaagctagtagggaattgttgaatgaacagttattagtctgtctctagggatgatcaccactcaagtcagatttttatttattaattatgcctagaatttatccaaattattttatcaatacaataataaaatagtccatcttgaaatagtttttaaaattacagataatcttaaaattagtcaatgtttgctttactaaggcaaatatgtctttcagatatatgttattactgttactttatctgtctcattaaacactttgttattaacaaattctttgaaaaatgttaactagcaggttttggggaagttcaattctatgtttattggatggagctttgccttgaagcatctgaacttttgagttatttttattttggagtgagcatctagggtacctgattgtgaagctagatttcaatcttgtatgagggatggtatatttttttgtgtgagttaatttaaatttttgagtttttttccaatgccttcattccgaaaatgatacatgaatgtagcaataaaagaaaattggagtccatgaaaaaatagtaaagcaataggaaaatacaggtgaggaaagatagaaaacaaagaagatggcaatatgtaaaaaggaagtcctgtaaggcatattttactgatgtgttgtaaggaaaagtatatatgaagtatgtttagaatttagagtatgtgtagagttgttccagatgggcagccagagaaggctgtgtggaggaaatattcaatctagtcttttttaagatgtgagtatggaaacaaaagagccttcccacttcagactatggtggaggcatggaaacctgtgcaggacacagcatgaactatgaggacacttaatgactttccaagtgctgtacaaatataatgtaatattgaccaggattgaagtgcctaaaagtaaatgacccaatgaaattcttactaagttcattaaacaaatattaggcaatatttttgtttaatttctgcatcctgtaaattaattctgaggactctgttttggcagtgactgttgaagtgaagggtccctatgaatacctcacacttgaagactatcccttgatgattgtaagtgactttatattatttaacctcagtattggatggttttgggttcaaagattgtcccatgttttgtggcagtattctttttaatgaattgttcctrtgcaattcagaaaatgttgcttgtagtcctggatttatttcttattagactgggactttgagagagtcagtatacccttgtgtgcctcattttcttatccatataatgaaggggtcagtgacctgtggaaatacctcaaagatcatctcacattctctctaggatgcatagtggggcactttttactacaactctattgtttctgatcccacttacattaactaaatgaggctgggtgccctggctcatgcctgtaatcccaacattttgggaagctgaggcgggcagatcacttgaggtcaggagtttgagaccagcctggccaacatggtgaaaccccatctctactaaaaatacaaaaattagctgggcgtggtggtaggcgcctgtagtcccagctactcgggaggctaaagcagaattgcttgaacccaggagacagaggcttctgtgagctgagatcttgccactgcactccagcctgggcgacagagtgaaactgtctcaacaacaaaaaattaacaaaatggtgaagctcccttctcttcattttgtgtgtgtatgtgtgtatgtgtgcacatacatgtatgtgtgcatacgtctgtgtctcagaatatccttaatatattttcaattttctttgttcatgattattctcttcttcctttccctttaatagttttcctgttttgttgtgtttccttgcctctagatgtatcctaatcatcatgccatttttcttcttcagtgttgtcttcatctatataattttagatcgtgagctgaaatagctccttctttaaaaaaaaaaaaaaaaaaaaagagagtctcactctgtctcccaggctggagtgcagtggcatgataatggataatggctcactgcagccttaaactccaggctgaagctaccctccacctcagcctcccaagcagctaggacaacaggcgtgtgccactatgcctggctaatttttattttattttattattttttatcttgaaacgtagtctcactctgtcacccagactggagtggaatggcacgatcttggctcaatgcaacctccagctcctgggttcaagcgattctcctgcctcagcctcctgagtagctgggactacaggtgcgcaccaccatgcctggctaatttttgtatttttagtagagacggggtttcaccatgttttggccaggctggtcttgaactcctgacctcaagtaatctgcccatctctgcctcccaaattgctggtattacaggcatgagccaccatgcctggcctaatttttattttttgtagggacagagtcttgctatgttgcctagactggccttgaactcatgacctcaagcaatcctcctgcctcggcttcccaaagcactattgcaggtgtgaattaccacgcctgaccagaaaaagctcttttactataggagagcaggctgagtgctctctatatataccatatatgtgtctgtgtgtataatagagagcaccttttatatggtatacatatgtgatacatacatatacacacacacacacacacacacatatatatatacatatgagagcattcgctcttgaggacaagttcatatgtagtcttctctgctcaagacaagataatgctttcatattagttartgttaagctccaaaggaagaattatttcttaactagaaggtagaatatatttttgtaacttgttaagactgtatattgattcaggacaggcgctgtggcttatgcctgtaatcccaacactttgggaggcagaratgggaggattgcttgagtccagaagttcaagaccatcctaggcaacatagcaaatccccatctcttaaaaaaaaaaaaaaaagtatatattgattctaaatctacagacttggctcttggccctaattctcctttttatcttttacccaatttgataacagtttttcatggtgatgtgtattgtatatgtcctgtttggtgttctgtggctggcatggtctgcctgctactggagagatctcctgagaattcagttttggattggtgctgtcatcttcctgggaatgcttgagaaagctgtcttctatgcggaatttcagaatatccgatacaaaggagaatctggtaagtaaccagaaaatctttgccagttcgagtggttggaaggtgagatgtatgaaaatattcctaaggtcagcagtcactacataggcttaacttttcaattacttaattattacaatatcttaagcagaatcactatgactctgacttttgtttttaatcttatgagttcagtgatgtaagactaattttactgaaatatgctcacaaaagtcacaacagtagtgrccattttgggaatgattattaacatcaaatctcaatttctgttgatttctaaggcaccattatacatctaagaaaaaaagtaaagctgtmaatttaattgtaaaatgtcactgattgtaagacacaccttgatttaaaaaacctcaaaatgtggtgggaaagtgcatctaactgataaaatatagtcatatcaasaaaataggagagtgcttatggtttagtaaggtgaactggtaatgacagaagttgttttatactgtagttttttgtgattgcttcagttttttcttgtcagaccatttaatttagtcataattattattgtgagataaactgataagattttccctggtctttgaaaggtcttgaaaatagtagatctgaaaaaagttaagctgtacatgccaacaagcgtgtacrcgagtgtgttttgtgcttttctatgtgtagctgtatttcacagtttttaaaaatgggggaaattgtctcgatgctacaaactgtccatatagggtgaggtattctgttaaagttttagtgaatttggggccaggtcggggagggagctgagttgagcgcacccagattgccatacatagacatgagtaagattgtgagtggcatcagcttgtatcctgtaaaaactgtggaagaggtattctrttttagcaggactaatatcaatgcttattctgaagagtgtagaaagcagcagtctagtattgrcatctggcctgttgccaaacctagattatggtgccatttcttcccttctttttcatagtccagggtgctttgatccttgcagagctgctttcagcagtgaaacgctcactggctcgaaccctggtcatcatagtcagtctgggatatggcatygtcaagtaagtattaacttcctgtatggaagagcaaattaaaatgctgattaaattaaaacagtattgcatgttcccaatgtagtagttctgaaatagttgataaaagaaataattctgaaacaagaaaggtatttgaaattttgtagcattgtaaatgttgggaaaatgtgtttcattttccatacttccaaatatattccatacttccaaatatattccatacttccaagtccaaatgtattccatacttccaaatccaaatgtattccatacttccgaatatatttccatacttccaaaatattttttgcaaattagattttttatgggaaacgcattcttgctgtaactgtctgaaaatatttttctatccaaaaaattttatttttattgaggagtgtcttctataggcattctttgaggcattgttctaggccctggggatatggcaagtaaacagaagattttgagcttacatttgtggagggaggggacaaagacaaaatttaagtgrgtaaaatattttaatatgtcagtggaaagtgcagtggagcaggtaatgcaggagctagagcttgcagttgtacatagggtgatcaaggagggcttcacttaatgacatttaagcagagacttcaaggaggtgagggagctatatgtatacccaagggaagagatgctgaattgagatcagattctatatatattttgaaggtggaaccagtggaatttgctgatggatcagatgtatgataggaaagagaagaggaattaaggatgatgccaattgttttgatctgataaaatggcaggatggaattgaagatttactgagttcaggaagaccttaggtgaaataagtgtggagcaggggcaagattggagttgaattagataactaagtaggggaaacaaaggggagaggttggggcagagataaaagtttgggagtcatgaagataaagatattatttaaagtcatgaaggccaggcgtggtggcttacgccataatcctcacactttgggaggccaaggcgggcagattgcctgaggtcaggagttcaagaccagcctggacaacacagtgaaaccctgtgtctgctaaaatacaaaaaattagccggctgtggtggcatgcacctgtagtcccagctacttggaaggctgaggcaagagaatcgcttgaaccctggaggcggagattgcagtgagccaagatcatgccactgcactctagcctgggtaacagaacgagactccatctccaaagttaaataaataaataaataaagtcatgagackggatttggtcaccaaggaagtgagtatatatagagaagaggtccaagggctgggcccttgaatatttaatattatttagaagtctgtaagatgaagtagttagcagaagaaattgaggagagaccagtgaggtgggtagaaaactgaagaatgtgtttcaaggaggaagtgattgtgtcaagagatcctgataggtcaagtgagaattggccattgagtttacctatatggagggtcatagtgatagttttggtgaagagatagggacaaaagcctaattggggagagttccagagagtataggaggagaggaattagaataattgtatagacaattatttaaaggaattttgctttaagtgggattaagtaatgctatagcatcactttatagtgctttaagtaggattaaggttagttgttttaagtttgtttattcaattaaaggagttttgctttaaatgggattagagatatggggaattttaattcttaaaacttatttatttaacaattatttgagtgcctcctatatgccaggaagtattctaggtttccaagatgaatggggagaaaattccctgctcatatggagttttccccaatgtataacaaaaaatataagaacaaatattggtaaggcctatgcagacatgatttaaggcagcacatcttaaactacactacactaaggaatcacctaaggattttgttaacatgtggattctggttgtgtaggattttgaatctcaaggagttaagactttttctccttcaaacagaagttgctcagaagacttttcatatattaggtttcgagcttgcaaatatactatttaatgaaccgtaataggatatttgattatattaaggaatcgttagaatttttagatttgatggtggtatcttggtgatgttttttaaaagtttcttttgtgggccaggcacagtggctcatgcctgtaatcccagcccttggggaggccaatgcaggagaatcgcttaagcctaggagttctagaccagcctgggcaacacggtgagaccttgtctctacaaaacatcaaaaaaaaaaaaaaaaattagcctggtgtagtgggacgtgcctgtagtcctcagctactcgggaggctgaggtgggagggttgcttgagcccaggagttcacggctccagtgactgggccactgcacttcagcgtgggcgatagagtgagaccctgtttctttaggggaaaaaaagaaaggcccttttgtagccattgaaataccaaagaaaaataaggtcctcatttattaaaaacacatactgaaatatatcaaagatatactgtctaggatttgcatcaagagaatatgaaagggtggaaaggggatggggtatgcatgggacaaaactgaccataggttggtggttgttgggccttggtgaagggtttataagggtgcattatactacttgtgaatatgtttcaaaactctctgaggaaacattttttaaaatgtggtaaccagacacaagatctcaagttgtagtgttccctatcttgttttaagaccataaggtcttagtttttttctcttaggtgaatcaagtgtatrttatttattgctttaaattgttggcctatattaattaacacaagttcctgttacttagcttgtttcggcatttgtcccatatgtactcaaatatctccttgcttcctctttaggccacgccttggagtcactcttcataaggttgtagtagcaggagccctctatcttttgttctctggcatggaaggggtcctcagagttactggggttagtactgcttaatctcattttctgtggtcagttcaattatattgtttacatcttgacagtgtggattggaaatgtctgtgggcttctttctgtttgctttaagtcacttttgggctctgattttcaaaatatatgtatagttcatgttctcttttaaatctattagagctttgtaaatttagtgtgtgcccgaatgaatgcttttccacctgtctccaaattgctaattgttttagttcctcctcccaagcagtagacttgcatttttttttctttttctaatcaatggaatccagactgaaatccagactgaaattcttgtgtaaatggcagactttggagtcatacacttactagttaatctaatctaaagtaactgttgtttcttaacatttcagtttcaaaaacttccttaaaatgcagctaatgaggctgggtgtgtaatcatgcctgtaatcccagcattttgggaggccgaggcaggcggatcactaggtcagaagatcaagaccatcctggctaacatggtgaaaccctgtctctactaaaaaaaaaaaaaatacaagaaattagctgggcgtggtggcaggcgcctgtagtcccagctacttgggagactgaggcaggagaatggtgtgaactcgggaggcggagcttgcagtgagccgagatcgtgccactgcactccagcctgggcgacagagcaagactccgtctcaaaaaaagaaaaaaaaatgcagctaatgaagtttcacaccatttttgagaattgtataattattccctttgccagggaaggaaaccaaagaatctaagtgataaagaaatttatggctgggagcagtggtgggtgcctgtagtcctggctacttgggaggctgaggtggaaggactgattgagttcaggctgcggtgagccatgatcatgccattacactccagcaacagagtgatacctcttccttaaaaaagaggagaaaagaaatttatgttaccactggattaataygaagaagtataaggttctctaggccatttcaattaattttcttattttttaaaaaaagactccacagcaacctattagattcaatattgtaaaaactataaacttggctttgcccacaagaaaacggctcaatatgttttgcaataaattgcctcttaaatcaaacactttgtggatgcacatttgcttttcaaatcacactgtcctctgtatgtaattctcttagacttctarcaactttaaccctctgtcaatttcattttctttcttctgctgttgctatagtatttttcttatcccttgactctgatagtaaacctggccctctcagcarttgacgcctgtgttattttatggatatcctttcagtaatgcctgttgattgggtaattagggttatataaaaaacatactctatataaactcctggaaacatgcagcatagtttttcagacagataattgccttacattttattttggggtgagctcttatttgtaaaatattataattttagaaattaataattctttgtatatgatgcagtaattttttttaaatacgagaaaagtcttttcagacttgtagccaaaattgcaataataggaaatgatagattaaggatggggcttataaacattagaacttttttggaatatggtcacttgttaacatggatctttatatatgaaaaactcgtacttagcagtatgtttcgagattgtaaatgacaatttatgtgaaatgcttatagctgtatattctatgtgatggtttataagaagggaagaatgattaggtgtcaaatgttctttttattttctttcagttcaatgcaaaaactttccagtgattatgtaaatgcagaatcatgtggtggkttcttctctgtgcctctctagacatctgtttttcaccacttctttttctttgtctgcaggcccagactgatcttgcttccttggcctttatccccttggctttcctagacactgccttgtgctggtggatatccttctcattggcttgtttgatgatggtccattttctccccttggagatgggtttccattgatctttctgcaaagagtttttatcagttttgttaattactccttagtgtggggaacagtgcatgctaagtcttaacaacctgagggttcaggtaagcagttttttttgtttctatttttttaattttaaaaatcaaattggaaattggtgactgkggaccgagctcgagataaaatcttttggcttttttcttttaagtgagcatttcatcttgattttgcacttcttgtttgtgtacctaatcatttagtgttagagtcactggctgtgctggtcctgctctgccttttagcctctagcaattcttaaatgctttgaaacttatgaaaagattttgatccttaaaatttgatttcaggaactatgtaaggtgctttgacttttctgaaactctgtatgttcagcaggttttaacccttatggagtgagtgttttcttgcctcattcaaaagctggcttggaattgtttgaagatttccacccttcagaataaataattgattcatttacaggcagagtcaaccagcagataacaaacaagcttctatttgagcaatctttttctcctgctctttaaaattaaatttatatattaggggcttggcctgatggctaaaggattcaagtttttggactttatcttattgaatttgttttggtttttatatatttggtcctattagcagttttcattattactgacctgatagattgtgactgttgaaaaactgtgaatgtaaacaaaattgttttgtgaatttgagtgggttgctgtataagagttttcagttaaagtgtccttggactaaatagccaaagcttttctagattagtatctttctaagtgttttgtgaacctctgcaagcgttgagagaagagggaggtgggaatggattgtacagtaagataacccaatgactaggtaacagctacggctctgtaagggcagagcaagtgccaaatcccttatttttgtatctgcttctcattctgaaaattgagccgggtgcagtggctcatgcctgtaaccccagcactttgggaggctgagatgggcagattgctttaagctcaggagtttgagaccagcctgggcaacatggcgaagccctatctctacaaaaaatacaaaaattcatcaggcattgtggcttgcacctgtagtcccagctgctcgggagcctgaggcaggagaattgcttgagccctggaagcggaggttgcagtgagccgagatcgcaccgctgcactccagcctgagtgacagagtgagaccctgtctcaaaaagaaaagaacattgaacgtgagagcagrtaccatttttagtagtcaccaattcccctcctgtttttctctggcaacttctacttgagaataatgttctgaaaatggagagtcattgcttttggaagcaaaccatatgagcttctcaaccaattgtaaggtcctcttaattcaggatagtgcaggcaactgatggcaggttccttaagatggcatgaggggactgagtgtagatctctgggagattataggcacgagtataattatgaccctcaactagatttgctggacagatgagaacagagctacccaccttaaagggagagagaagatgatgttaactctttgtcccttgcctgttactcatgttcactttatcttctgccatttctctatttattttctgtcttttttttttgtttctctagaaagcctcttcctttctcttttttatattttttctcttgtgattttgtacattcttactttattctggttctgtcttctctttaatgtctcattgaaaatgatgacttccggccaggtatggtggctcgtgcctgtaatgccagcactttgggaggccaaggcaggaggatcagttgaggtcaggagtttaagaccagcctgagcaacatagcgagaccttatctctacaaaaaaatttaaaaattagccaggcatggtggcacatgcctgtagtcccagctgcttgggaggctgaggtgggaggatcgcttgagcttcagtggtcaaggctgcagtgagccgtgattgtgccactgcactctagcctgggctagaccttgcctcacaaaaaaaaaaggaaaagaaaataaaatgatgactttsttattcatcttgaggtgtttgtgagattaagtgagaataagagagctataaggcctctgagagatctataagtttattggcatgaccccagatccttaaagaaacctgaaaactaattggctagcttactgttttttcctgaatgttgaattccttgacctgcaaacacatatttattagcctgactcaaacaatgaagctattaaaacttcggaggaacattgtaaaactctctttgtatcggcatttcaccaacacgcttattttggcagtggcaggtaagtctgggactttcttcttggagttcaaatgtgatctgtttagaatggacattcttaacctgaaaggccatgggtggrcatagaaagttttgtatatttcacttggaaaagggttcttagctcttgtcaaattctcagaaggatctrtggtttttaaaaagttgagaaccatttattttatgtacagtagctggaaatcaacctcatatttcagctcttcatttatccctcttctatttgcattctttcttgaggcattctttttcttgaggttagttagcttaagtgccagagagtactccttttagaagacattaccacatgtttgtttagttttattaaatagttgtagaattttagggtgcattgctattatagtgcttttacatatgtcagcaagcatatgtaaaaaattgacattaggtggactgtaaccaaactaggctaatttgcctacctcctgacccttgtaccaggaatagtgaggtctgatttatgattggaactagctcttctgtttgtgttacagtcgttttatcagccattttttttcatctgaccagccaaagaaaaattagcattactatactaaggataaaaggagaaaaaaattatattgataatgctggaaagagctatatttccaataccttattttccaaccacactggttactgatgtagccagatggcaaataacattattaccaaattattctttaaatagagaaaggattggccagagtatgtatcatgagccttgctgatagcaggtatacagtccttttgtattgaatacatttgttaaaataactgatagagttgtgatgtatttgggggttcggggtgtgtgggattccacttaaccggaaatgggggaatgtaattggggatgtaaaccagcattcrtactctgacctggtttttcatttactgttagcatccattgtgtttatcatctggacaaccatgaagttcagaatagtgacatgtcagtcggtragttataagcacatttatgaataatgtactgtcttataaacaactgatggtgttgatgacagtggtaaggttcttctaagttatataccttataaaaaattagagctaggtctctactctgagggttgtgatacttccctcctcctaagtattctgtactatcatggtgcttggtatagtagttttttgtttgttttttctgactgtattctcccagttttgggagagaattttgtaagttataactacagtgtgctataacccagtcttattttaactaaaaatcttaagaagtccagagtactaaatattaagtaccatatgtgtaaataatactaatctgaatagaagccacatccttaagatctgagctcaacgactgtgacagtaggatttcttcagaagcagctaaggctcttattttgttcaataaataatgaaaatgaaaattataaagtataccaacctaatgtaactttctcttacactgtataaggtaactttctcttaaccctgtataaaaccctttcttaaagcttctcagagggatgatgaagctttgacaaatactctgttccgttgatgcattttctttaacaacagtaagcactacaagggcaaaaactacattcattcactttgtttccccacacttaccacagtactgagcacgtagcaggctcttagtaaacataacttgaatgaacaaataagtgatttttgttctatgccaaaggctttatgaacaaggggttaagataatgtgtatnaatgttgtacttctcccctgtattgtaggactggcgggagctgtgggtagacgatgccatctggcgcttgctgttctccatgatcctctttgtcatcatggttctctggcgaccatctgcaaacaaccagaggttcttggactcttctgtttactctgctaacatgagatgaccatgtcatcaattaggggtggtgcattgggggacagtatcagggctgtgtcatatagtggaaggaacactgggcctggaatcagaagaactgggttcctatctcagctctcctcttaacttcatgatttttggcatgcngcctctccacctctctggccttagtttcctttctatatactgagggggaattaaacccagcaacatgaagttcctttcagctctgacattttgtgataaatacacaggcatactatggaaataaattgcaagtttggtttcagaccatcacgataaagcagatattgagttacatacatattttgttttttccagtgcatatcaaagttatgtttacactattctgtagtctactatgtgtgcaatagcattatgtctaaaaaatatatgcacgttaatttaaaaacactttattgccaaaaaaaaaaaaaaaataccgacacaggggctgggcgtggtggctcacgcctgtaattccagcactttgggaggccaaggcagttggatcacctgaggtcaggagttcgagaccagcctgaccaccgtggcggaaccccgtgtctactaaaaatacaaaaattaactgagtgtggaggtggatgcctgtaatcccagctacttgggcaactgaggcaggagaatcgcttgaacctgggaggcagaggttgcactgagccgagatcatgccactgcacagcataggtgacagagcgagactccctctcaaaaaaaaaatgctgacacacaaagtgagcacattactgttggaaaatggcaccaatagacttccttgacatagggttgctacaaaatctgggaagcacagtaaaatgaagcaccataaaaccaagtataactgtaagtatttgtatagtaaacaagggagatagatatataatctattgtgtcaaccaggcacggtggctcatgcctgtaatcccagcactttgggaggccaaggtgggcagatcacatgaatccaggagtttgagccaacatggtttcggccaacatggcaaaaccccacctctactaaaaatacaaaaattaaccgagcatggcagtgcacacctctaatcccagctactcgggaggctgaggcacaagaatcgcttgaacccggagacagaggttgcagtgaggcgagatggckccactgcactccatcctgggtgacagagtgagactgtctcaaagaaaacagaagatataattgtatcacttacactgagtctctcctgtctagtgtctagaaggaaagaaaatttctgtaaccagcagcccagctcactttgtaatgatagaaagggtaaaattaaaacttacataaccaactttgaaattaaaaatgtatgtgtaaatctgatttgtccaactataggcaaatttcagtcatttaggaactgcctagctttattttgtgattatgccttyccccccmaccycatttgcatttagacggttaagagcttatattaaacacccataccaccaaagaaggaaaagggtagcatgatataaatgactaattttataaccagacccaatgaaagattgaaatagaaaataggtgaaatccttttactccatgaaaatggccttgctgtcatttcaaactatgcactttatatgtgtttatcaaaaaaagtcagaatagagaaaagtaatgaaagaaaataaaggagatctgaaatcacactattgagaaagaacttttacattctggagacccttcttttatatccgtctgttgatctactggttactcactagctatatttgtatttaaatattttcccttcctcagtcattaaaaaatttttgcgttaccttccctcttctttttttcccccttttcttttaaaacattgccccctttctctgtgacttcagtgttaactgcatattataatgtgtcttttccctgttcatgtatggaatcttacattactcttgtgacagtacattgtggagattccttccagtgtaacaggtttaactgaactcattcattttcatggatagcwtaaatatgggacatgtgtagtacagttaaattaacatattctcttattaatgggcatttgggatatttccagtttgaggtgtgtcagggtcctcaagaccatcctgatgttcagtgatttactagaaggcctcatgggatgcagcgtacagttatactcacagttaaggtgtattacaacaaaatggtgatagcaggtagagtctggggaaatctgtattttctttcctggtgttcggtctctcttctgaggaagtacatcaagtcagttcttttccccagcaacaaaaatgtagtaacacattgtttctgtctgggaaagcccattaatgttcagcactcaagatttttattgggcagtgttacctcctcccagccaaatatgtgacagtatgcacagactattgccaatgtgggaaacccatttgagctttcaatgtccagagtttttactggggctcaatcacatactgtctctgttgctgacttttagtttccaacccctcctggcagtcatgctaataccatttcctctggaggtcagagctgatatggcatggcccaaagcccctatcataaaccatactgttacactgtcagccaaagtccccaggcaaataaagacaggacatgttatgggtgtcgggatcacctcacattagtcaatgaaggttaggttctcactacacactggcacatgctcaagaaatatttaatgagtgggcttggatttgctaggttgaaggatatgtgtagattgtaatttttaaagtatttccagattacgttcccaaaaaaaacctgaaagaaattgcatatttaacaacaatggtatgagagaggttttttcttcttcccttgttttatgtcccatcattttatttaatttctgcagatttggtggatgagaattaatattgttactttttgcatttaaggttggatctttagcttattttttattggcttattgatcattgtctctgtccattttcagctgctataacaaactaccacagactgtttgtttataatgaacagaaatttgttggctcgcagtgtcagcatctggtgagggccttcttactgggtcgtcacatgacagaaggtggaagggcaaaagggagagcccactccagaaaaccctttatgtaacagcattaattcattcatgagggtggagccctcatgacctaaatgccttccattaggcccaactcccaacactgtcaccctgggaattaggtttcaacatgagttttggaggggacagacattcagactgtaacaatcacttatgtattgattcgtaggaatttatttattttgagatggggtctcgctctgaagccaaggctggagtgtagtggagcaaccttggcccactacaacctccacctcctgggctcaaatgatcctcccacctcagcctcctgagtagctgggaccaccggtgtgcaccaccacactgggctaatctttgtattttttgtagagatggggttttgccatgttgcccaggcttgttataaactcctgagctcaagcgatctgcctgccttggcctcccaaaacgctgggattacaggcgtgagccaccataccaggcccaatttgtaggaatttctgatatattttgtatgccaatattttgtttgttctaagtattgcatatattttctgccagttaataatcttaygatttttatgctgtttttaatcatacaaaatctcagaaatatggagtagtttttcccttcaaggattgtacattttgcatcttattttgacaaattcttatctagcctaaggtgatttcaaaaaattattctctaatgactttttaaaaatttcacaatcaggccgggcgctatggctcatgcctgtaatcccagcactttgggaggctgaggcgggtggacaacctgaggtcaggagttcgagaccagccggaccaacatgatgaaacctcatctctactaaaaataacaacaattagccaggcgtggtggcaggcgcctgtcatcccagctacttgggaggctgagacagcagaattgcttgaacccgggaggcggaggttgcagcgagctgagatcatgccgttgcactccagcctgggcaacaagagagaaactctgtctcaaaaaaaaaaaaaatcacaatcaagatgttcatccaccaagaattacttgattctaggctctctactctcttctgttctgctcctgcatcagtagcacactgtctgaattaccctaggcttctgataaactgtggtatctggagggcctgaacccctaatcatatttataagtgcaggctcagctgcatactacctggctcttttaaaaatagcctttgggccaggcaccgtggttcatgcctataatcccagcactttgggaggctgaagcggacagatcacctgaggtcaggagttcgagaccagtttgaccaactagaaaaaccccgtctctactaaaaataccaaattagttgggcatgatggcacatgcctgtaatcccagctatttgggagactgaggcaggagtgcttgaaccccaggagggggaggttgctgtgagctgagatcgcgccattgcactccagtctggacaacgagtgaaactctttctcaaaaaaaacaaccaaaaaaacatttggccaggcrtgatggctcacacctgtcattccagcactttgggaggtctggccgggaggattgcttgagcccaggagtttgagaccagccctggcaatatagcaagatcccatttctacaaaaaaaattgttttaggttagctgggcatggtagtgcatgcctgtaatcccagctacttgggaggctgaggtgggaggatcacttgaacctgggatgtcgaggctgcagtgagccgtggtcataccactgcactgcagcctgggcaacagagcaagaccctgtctcaaaaaaattttttaaaagcctttggtgttgaatttttgccctttatttttaaaatttttttattttagatggggtcttgctatgttgcctaggctagactcaaacttctgggctcaagggatcctcctacctcagcctcctcagtagctgagactactggtacatgtcactacacccagcttttgttttttaataaaaattttagattgcttaattctaggaaaacctattaagattttgattggaacttaattgaattaataaattagggagattatatatatatttttgataattccttgagtatggcatctctccattttttagtctttgaattacgttttgtaacttctgatttaaatttgtgactcttacgaatgcaacttttaaaaatatatacagcttttccaaatatgtaggaatgctgttgccttttcctctgtctctctctctctctgtctctctctctctgtctctctctctctctctctctctctgtctgtctctcctttcttttcttgacggagtctcgctgtgtcgcccaggctggagtgcagtggtgcaatcttggctcactgcaacttctgttccccggggtcaagggattctcatcagttgatggacaaagttgttttcggccaggcgcggtggctcacacctttaatcccagcactttgggaggccgtggcgggcggctgaggcaggcggatcacctgaggctgtctcagcctcccaagtagctggaattacaggcgtgcacctccacgcccagctaatttttgtatttttaataaaaaaatgcaaaaaattggccaggcatcgtggcgggcgcctgtactcccagctattcgggaagctgaggcaggagaatggtgtgaacccgggaggcggagcttgcagtgaggtgagatcatgccactgcactccagcctgggcgacagagcgagactccgtctcaaaaaataaataaataaataaaaaataaaacaaataaataaaagctaaagcattctaggaattacatgtctgggagctrctttgctgaatctcttggaagttgttaaggaaaggcatctgagatataccagatcagaccttcatcttctgagcttcccacttgtaaactgaaattttaaattacctggaataggcctcccttctcttaactcccaatttgaaggctgcgattttaaattagatgagaatttacttaactctatttgatacatatccttatgaatgaacatttgttgactgtctactgaatgtgacaggtattgttctaagcactttatttgtaaygacttacttttacaaaacacccctatgagtaatgttctattgtccccttatttacagttgaggaaactgggtacagagagattaagtaactagtctgatgtcacaggtagtattcagctgagcctgcactcataaatatgatactgtcctgcttctcccttgctaatataggcaataaagagctttctgaaggggaagaaatattattattaaactgatttaatgaattactataattgcagtttcaataattagttttgtaaaatgcaactggtatagcagtttttgaagttttctaattttttccttctgttcactttggttctgttaggtttgccttttcaccattgtctgaggaagaggaggaggatgaacaaaaggagcctatgctgaaagaaagctttggtaataataaaattcacctcttattagtactttaaatattatttttctgtaagtacattgtttattattttataactgtgttgttcctatatttggtgtgggatgaagtcagggttaagaaaataagggtgtgaatcttaagatgaaggcatggtaaattcagtaagtaattgcacattaagtatccattttacttgctagaagtgagctaaaaattttgctttgaacttcccagcttacatataaagatggagaagcatctgttgtatacttcacaagtattaggaagcttaaaataaaactatgataagtaactttggggcttttaatttaaaaaaagaaaaagttctgaatccgttttgccaacattgttggtctgttcacaaagttaaacagtgtatatttattttcttctacagaaggaatgaaaatgagaagtaccaaacaagaacccaatggaaatagtaaagttaacaaagcagtaagtatgacttttccatttgtctttgttctttgtcccatcttccaacccttagtagaactactagaagaaaacaggaggaaaattctgtgacattggtcttggcaatgatttttttttgtatatgaccccaaaagcacagggaacaaagcaaaaatagagaagtgagagtacatcaaactataaagcttctgcccagcaaaggaaacaattaatgaagtgaaaagacaacctacagagtgggagaaaacatttgcaaacattgcatctgttaaggggttaatacccaatttatataaggaactcagtagcaagaaaacgaatagcccagtttaaaaatgggcaatggacctgaatatacatttcttaacataacacctacaaatggccaacaagtatatgaaaaaatttttatcattactaatcctcagggaaatgcaaatgaaaaccacagtgagataacacctcacacctgtttgaatggcatttatcaaaatgaagaaataacaagtgttggcaaggacatggaaaaaagggaacccttgtacactgttgataggaatgtgagttagtatagccattatggaaaatagtatggagcttcctcaaaattaaaaatagaactaccttatgatccaggattcatgtcactgggtatayacctaaaggaaatgaaatcagtatgttaaagagatacttgcactgtcatgttcattgcagcattaatcacagtagccaagatacagaatcaacctgcatgtccatcagtagatgaatggataaggaaaatgtgtattttgatatacaatggaatactatttagattcagaagagaaggaaatcttgtcattcgcaacagcgtgaagaagcctggaagatactatgttaagcaaaataagccaggcacagaaagacaaataccacatgatctcacttacgtcgaatctaaaaaagttgaattcctagaagcagagggttgagtgctggttaccaggggctatgggagaactggggagatgttggtcaaagggatttttaaaaatgtttttaaaaattaaaatatttgacttttctgtcagcagtcccatttgtgaatgtatgactacagaattatgaaagacaagttttaagaccttcatgtccttacttgagatgtattatgtggtgcattttagtaatgagtggtatttgtatgttcccagcaggaagatgatttgaagtgggtagaagagaatgttccttcttctgtgacagatgtgtaagtttttgaatgattaccacaagaatcctatttcaaagttagtactactttgttattattttaaatgagcaagttatactcatgaaaatacaagatactgaaaaataattaaaagnataggaataatcygcaaacaaaattaattgggtttattcattcagatgacatttctgcttagaaagatttagctatgtagtatatcttaaaatgaatgggatactccttttgaaatttttagttcctttccagggctataattttaatgaaacattggtcctgttgcattgcaaaatacgttttttttctatacaatttctgtaactgttgcttattgtatttgctgtttatttttcctaaaagggccattaataaaatgcaaatcttagataattataaagcttttaattgcattattccattgtcttttatgaaccatttatggctttattttacattgttcaatttagtatttctctctctttgcagagcacttccagcccttctggattcagatgaggttggtactcaattcacgtgcataaattatgtatatggtgactaaatagaaagtcatgaatcgtctgttcatggagattctctttatttgactcagtagtggcctgaaaactatagtttatatagttgaaaaggataagaatagaaatactaatagagttcaaacattcaagaatcttcctttctttgcatctgtctatacatgtttcacctttcaaagttatatggtcagacttcagaatgtttttgtttaaattgggtagtaaatacagtactctccaccatctagttcttttgtctgtaagaaatgcaaatttaactctaatctaatattggcaaaaataataaggaaaaatattgagaaaggaatatagtagaccaaaacaaaatctaaattgttacctactatttaataatatttttgtcactaccttcttcagatagtaaggattataattagtacctctaatatttatgtttttaatcttttagtttgcctccatacagttaatctagaaggcttcacatgaagtcttatgttaggattgtgggccaggtatagtggctcatgcctgtaatcccagcactttgggaggcctaggcaggaggatcagttgaggtcaggagcttgagaccagcctgggcaacgtggtgaaaccccatctctacaaaacatacaaaaattagccggagatggtggcatacacctgtagtctcagctacttgggaggtgaagtgggaggatcacttgagccctggaggcagaggttgcagtgagctgagattacgccactccagcctgggcaaaagagtgagaccccatctcaaaaaaaaaaaaaaaagaaaagaaaaagaattgtggcctgagttcatggaaactagttctggatatgttctgaatattaggtcattttagagtttttgtttgtttgtttttgttttgttttttttcaggaagccttttggaagcattttgtctgattctgattcattgtgttgaattggctgctaaaaatgttttgttcatttcccactgacatgatctttgacacagcatgtacagtatcaaattccttagctgttctatgtgttgaaataattgagaactctaccattcagatttgaacctatctacataacactttgctttctgtggtatattctgctgttcccacatctccctcttgaggtcttcctctgctaattatttgcctttaaggcttcccttgtacttcagctctccatgagctgctataagcagagaaggctgattaattgaaacctgattgtgcccttcatgggaatgcaagtttgctatagtaatttggtggcactgagttcagccatctgttcatattttcctctgtgaaaacactgtgcaagattttccaggtatacataaggcttttttgtggtaagaaaacataacaatgagatctactctcttaactcctttagtgtacgttacagtattrttacgtataagcacaatgttgtacagcagatctctagaacattttcatctcatttaaatgaaattttatacctgttgaatagcaactcttgctttccccctccctcagcgcctggcatccatcattctatttctgcctttgagttctattttagataactcatataagtggaatcatgcagcatttgtccccctgtggcttgcttatttcacttagcataatgtcttcaagatttatctaagttgtagcacatgtcagaatttccttcctttttaaggttgacaagtgttccattgtatatatgtaacatgttatcttcatccatttatctgtcagtggacacgggttatttccataccttggctgttgtgaataatgttgcagtgaacatgggagtgcacatttctctttgagatcctgcttcatttcttttaggtatatatgcagaagtgggattactggattatatggtagttattttttaatttttttgaggagctttcatactgttttccatagtgattgcaccattttacatttccaccagcaatgcacaggggttccaatttctttctttgcccacatttgttattttttgttttttgataatgaccatcctaacaggtgtgacgtgacaccttgtggttttggtttgtatttctctgatgattagtgatgatgagcattttttttatatacctgtcagccatttggaagccctcttttgagaaatgtctcttccagtccctggcccagtttttaatcaagttagttgattttttgctgttgaattgtaggggtttcttatatattttggatattaaccctkatcagatacagtcctatgccacatttcagtcagcaacggaccacatatatgacagtggtcccataagaacctccgggttcacgccattctcctgcctcagcctcccaagtagctgggactacaggcgcccgccaccacgcccggcaaattttttgcatttttttagtagagacggggtttcaccgtgttagccaggatggtctcggtctcctgaccttgtgatccacccacctcagcctcccaaaatgctgggattacaggcgtgagccaccgcacctggccaatactgaatttttactgtaccttttcaatgtttagataactttagatacccaaatacttaccattgtattccagttgcctttggtattcagtacagtaacatgctgtacaggtttttagcctagagcaataggcttatacatatagccgaggtatgtagtaggctatataacatctagatttgtgtaagtatattctgtgaagttcacacagctatgaaattgcctaatgatgcagttctcagaatgtatccctatcattaagtatacgtgactgtatgtagtatgcaaatattttctccaattctgtaggttgcttttcattctgttgtgtgcttcccttgctgtgcagaagctttttagtttgatgtagtcccattggtctgttttgctcttsttttgtgcttttggtgtcttagacaagaaatcactgctaagaccaatttcaagaaacttaggttgtcttctaggagttttgtggtttcaaatcttatgtctaattctttaatctattttgacttgtctaagtctttaatctattttgagttgatttttgtgtatagtgaagatgagttactttcattctttctcatgtgaatatctagtttttccagcaccatttgttgaggaaactgtcagtttccccactgtgtagtgttgtctctcttttcgaagatcagttgaccatgtatgtgtagttttatttctgggctttctattttgttccacttggtcatagtatgtgattctttcaacgtgccgttaaattctgttttccattgtttcattgaagatttttgcgtctgctcatcagggatattggcctgtcgtttctcttcttgtcatgtctttggctttggcattagggtaatgctggcctcatagaataagtttggaagttccttccaaataaatgttttcgtctttaatttttttgaaagcgtttaagaaggattagtgttactttgtctttaagtacctggtaggactcaactaaagaagccatctggtcctgggctgtttttttgttgggatgtttttgattactgatggaatcttgttgtaggtcttaccaggttgtgtgttccccccccggattttctrttccttgatgattcagtcttggtagattgtatacttctaggaattatatattttgttctaggttatccagtttcttggcatatttttaaaaatgttttgtatatttttattgaaattcttactttgttcatgcattgttctcctgagttcgttgaacatcttcatgatagttgttttgcattctctttcaaataattcctatacctctgtttcactggggttggtttccagagatttatcttcttcctttgtttgggccatgtttcactgattctctrttttccttaattctttgtgttggtttcattgcattagaaaaaaaaacagttacctttccagtgttcatggactggcattgtacaggagaacaccctcatcaatcattctgatagcctctctaacccactctgtattatgtcttttctggacttctgcatatgtattcccaatcagagggatttgctgggtttttccctccccaggaatttataatctcttgctcccttttgtgtttatctgctgtatcatgggtctcctggagccagtggcatagcccagctctttttttgttcatactggccccaggcacctaaaatatactggtcccatctgtgcttcaaaccattccctacagaaaccattccctcaggtaacctcttacaaagttggaacattttcacagtccatctctcctccctagggaaaagctaggatttggggatgttggggattctacctgcttactctrcactgagctgggggagcggctgtagtgagctcatgcttrctagtccaaacttccactttgatttcagcaacttccaacctgggccctttgtttttagctctcggactcaggcaagacagaaaacagtctctcgtgcaggttcyagaaaagtcagaatgttggatgtacattccagtcatttccttccctctgcaaaaagaagctgggagctgagggtttcctctctatcatgtggtactgtgctgggtccatgggaagggaagaattatggcaagagggtgcctcaggtttttctgccgactttgattcagctggtttcatgctttcctatagtgcagaagaccctcaactggtttctggatttcccacaaagggaatttttccatgtrttattgaatcagtgtgtctgtagagggaaggagtgtccagggcttcctattctgtcatcttgctgacatcactttctccaaggcctttttttcccttaaaactgaaaaagaccttaaatgaattacaggagaaacaatttacatgatggaccaggaatcaaaatggcataaggctcttcaacaacatctttgggagccagaacaaagcctttgaattctgaggaaaatcattttcaacctagaattctgtactcaactaaactatcattatgagggtaaaataaagatgtttctagtcacacaagaagtaaaataattgatgttctatatgcagtttctgaagaaagtaggggaaaatgttctccacaaaaatgaggaagctaggaaaaagacttgggatctaggaaataaagggtccaacacagagacaagaaaaattcccagtatgatgtaagaaattctcaggttggcagctgggcaccaggcttggatggagtggagaacagagagcatcggaaaggatatttttaagaaaaagggaaacatctatagattatctgatgtgattgattatattcaaaaaggatttgtagttctgtcagtttgtgatacaatagtgagaggtacttcgcaaatgaagcaaaagaaaaatgaaaattaactctaaggtataaaattgcctaagaagggaaatttaagggtagtacattaattattttaattgaaatgggatactgtaaatactatattaaattaaatgtaattttattttttacatgatttttaaaaagtgtagtaaaaaacacataacaaatcaaccctcctaaccattctaaagtgcaaagtgctaactaggtgcacgtctttgccctcatccttcactgggtcttcaagtgaaattcctgaattaraggagttacacatttttattaaagcctaatcttatgtaaatatttgtttacataaratcttarctgactctatacatttccttctgagtgctgattttctgtccagaagcctagagcttttgatttagttgttcttgggtgaggtctggacatctgtatgttcaaaatcttcacaaatgtttaggaaccatttctctaaacatttaattaacataaagtactcgtggaagatgtttgcttggatagtctgtatagaagatatttggaatatagatcattttaacctaatatacttcaacctttttttttttccctaggaacgaatgatcacacactttgaaaggtccaaaatggagtaaggaatgggaagatttgcagttaaagatggctaccatcagggaagagatcagcatctgtgtcagtcttctgtacggctccatgggattaaaggaagcaatgacatcctgatctgttccttgatctttgggcattggagttggcgagaggtgtcagaacaaagagaacatcttactgaaaacaagttcataagatgagaaaaatctacgagcttcttatttacaacactgctgccccctttcctcccagactctgacatggatgttcatgcaacttaagtgtgttgttcctgaactttctgtaatgtttcattttttaaatctgacaaactaaaaagtttaacgtcttctaaaagattgtcatcaacaccataatatgtaatctccaggagcaactgcctgtaatttttatttatttagggagttacataggtgatgggggaaattgttaactacctttcattttcctgggaagtcaaggttacatcttgcagaggttgttttgagaaaaaagggcccttctgagttaaggagccatagttctatcaatgatcaaaaraaaaaaaaaaaaaagagaaactgttacagtatgattcagatcatttaaaaaagcaaaatcaagtgcaattttgtttacaaatggtgtatattaaagatttttctatttcagatgtactttaaagagaaatattagcttaactcttttgacatctgctattgtgacacatcccattgctggcaatgtggtgcacactccgaaacttttaactactgttttgtaagcctccaagggtggcattgcagggtccttaggcaatgttttgtttgcctttatgcagagaggtgctccaagtgctgtgattgagcaccgtgctagaggaactgtaatgcttcagaagttgtagcttatacaaaggaaacaggtcctgctggcttaatttaaacagttattgcatgaagtagcgtggaggccctggactgctgctcgttctttaggatggactgttctggtawctggtattggtttagagactgttaataagggacatcacaaggtgatgggattcatttgaagcactctatttctgttttaatggttttayccaattttgccttcccaagatttttgttctacataaaaagttcatgccactttttaatataaaaaaatttaacaaaattaatgtatttttctcatttttttcaaactttttctaaagactctttctgtcaaactcatgaaaaatttctttctatggcttttattctagattgtcttattttctgttaaaaccaatgaccacatgaccacaatcttcactaactcatactgcagtgaaagtgttaacccttaggtagtttctctacaactctttgctatggtgatttttaaaaaagtttcctaggaagtatctctgaggaacagcaatctgaagaactgactatattctcatgctaagtcattagccaaaagctggtggtattgttgcatgctgctattgcatattaaaacgtagcagatgaataatagttgtaatgcagcaggatagttggtcaaattatttttttaggctgctttgatgttgacttgagactaggaaaaaaaaaagcccattgtgttaagcgggagtgtatagttcaagttctatagcctgggccctgataattctacttacagctttctgtattactgggaatagatatagtgtgtcatttcttaggttcagaagaaattgatagctttgcagtaatctgtaaaacaatataaaccttagggttttgggcctgaacgaaaaggtactagaccttccagcacaacagctggtaattctaaatttttaagaaggtgatcagcttctatggtgaaaatcagctataacacaggatttgtttagcaattttcatgtttttgactacttgaaagtacttttcacttgattatcagaacagcatttggtaaagatgggacaagtattcctaatttacatatgaagaaactgatattgtgtaaaaataaaatgaccaggaccagtttttttgacttcatatcacagacttaccctttttcttttacatttttgctttaaacccaaatgcttaattttttgacctacgatgttttcctagggggaaatgaccagatatagatcattcttgcagcccaaactttgttgttttttaagtcttcaaggggaatactaaggtaaccgcagacagtacaggtcccaggtcctataggaggaaaagccatgacaccttcctaaaggaatattaggatgtaagacacagctttggaaagttgaattggtaggaatgtggtcatcaaattaaaaggaggcttatttcactgacttccaagagttagtgaatcatctcttgcctaaactcttgctactcaaaatgtgatccagggaccagcaacatctgggagatttttggtgctcaactgagggtcttactctggtcctactgaatcaaaagaggcattttaacaatgtctctaggtgatttgtatgcacgttaaatttgaaaagcattggcctcaaatggtggttctcagggtaattttgcctcccagaggacatacggaaaagagacatttttatacctctgtggggaagataactggcatttggtgggtggaagttagggatgctgttaaacatcttacattgtacagaacatgccccctcccccaacaagaaattatcctgtcctaaatgccggtagtgctatcgctgaacaaccctaacctaaaatggtggttctcaagcttttaagtgcatggactcaccttggggtttattaaaacataggttgctgttcccttcgagtttcagattcagtagaactggaatgggcctgaaactttgcatttctaacaagttcacaggtgctgctgctactgctgttgttgctggtctagaaccactttcagaaccactggcctagaacaaccatgaaagcattaaggtaaggtgcttgtactaattgggatataatggtaatactaaagctaccacttactgagagcttagtgggtgtcaggtgttgctaagcgctcacgacactaggtcacaggtatttacaaaaattttgcagattaggaaagtatggcatcgaaatattaaattttctaaatcacagctaatttcctaattggtagatctccgtctgaggtcgacgccaaaggccgagtttttaaccatcacgcccactgcctaaagcagttctaagattaagagtttgttccttctatggtaagcccatggctactcgggatggagtagctatgggtccagagtgacgatggcaactcagcaacaaaacaattcatttagagtgcaccgggaggaaggggcgggacttcggctgcggaagaggcgggcctaactagcaggaagtccggggttgacgatggctgtgttgttgaagggcctgtagccggggggttcctggccggatcccggtctacccttagcccagactcgttccggaccccagcccggcccggaacactctgggcgagacggcggtggcaactctccccttgccgccatgcacgacgctttcgagccagtgccgatcctagaaaagctgcctctgcaaatcgactgtctggctgcctggggtgagccgaggggccgcggggccgaggcggagtcagcacaggagcggtccggatcttttctgaggccggggaagtggacaggcgtccatccgtgtgggcttcggttggatgctacacgagaggggcttaggatgagagaaggcagagagatgaccaccggctatagacatcgatgtctgtggggctacttgggtgatcccagtgatccagtcatttaggggagttccccttgcttttgctctctgtgcagagtgggaggatgagctttcctttttagttgtgctcagctttggcccattttgattcccacgaagacttcattttagagggtcaaagcagtaagaagttctcagcctgccaggggcttgaagttgtccagatgtttgtgttgttttctagatgaaagtcaaccctggttttgggggcattgaacaagttaacaccatatgcttttttttccccttagtgatcattcgttcatttctcattcctgtagggaactcatgtagttagctaacctttgaatctagccaagcggttgattaccttatatccaaagtgtccaagttacctaactgtaggcggaagagtttccagactgtcttgaaacctaacccataaaaactagcatagtccttttgggattgactagtgcagaaggccgggacagacatctcttgtgtgctctgaaatacaaatgaaggtttcagggataacggtgaacattgtgctcttatccgtgagtgactggtttgataccagccgccaaagaccaaggaaatcatttctaactttcctcttaatgtttaggtcctagaaatcaaggaccataaaaagatgattcagatcccttaatcagatcttatactgagctagataggtaaccatgatgggccttatggaatcttggtggtgtctgataccatgtgcgtcagctgttcacagtgtcaccgagtcatccttgcagagttcttgatgacttcttctgtagggttctttcacgaagaattttcatgttaatgtgcacccttcctcctttagcagctctgggtctctttaaaatcatacctccacagtaagcagttctagtcctttgggttaagaggagaatcctacttcctccagacatctcaagaaaaccaatttctgtcattaaatgctctcattaaacatttaaatagaggaggagaaaaagtttttaaatgaaagacctgacactgcatgaaaggattaattcccccattgcttcatcagatatacttattaggtggctacacgggccattctctttgcttgggacagtaatacaatgatgaataagaaacagtgcctgtgctcctaggacacacactgggggacaaatacacgtgaacagattataatactagagacatatgctgcctattattgcaacatggatgagggggtacccaactcagctaaggacatatgtttctgaaagggattaatgcagctgtggctacacttgacttagctcgtcagaatccttgactctgatctcctgttggaccattagcacatagtgctcctagactctcaccaactccactttgtcacagtaaagattccttgcacctgtggttttcaggaacacagttttgaaacaataggtagcttttggccttccttgatcacccaccgaacaggagaaatgctctttggttcctaaggtgcttaggtacatattaggttacaagaggccattaactgcctcctgcttcaaaagtgctttatttccagatttgagcagcagtaattattgctctttctagtcattacccctttttaactacattgtgcctttggatggaaagttcgtccaggaacttccagaggcaggtcacacagggccaaatagtatttgaggtgtaaatgtcttagagacaacatactctgtctcctgggaaatagaaatcaggagagaacatgatgaggatgatttctttctaaactccaaagttgtataatcctgctgccttttcagcatcttcatttggatgtccagtagcatagccaaaaccgttcttgattcctctcccctcaaacatgcctgtcctcctgtatcttacgtctcagcaagtggcatttctatttacctctttgactaaagccaaaagctttggaatcgttcttgacttctttcattctgttttacactgtatcccatctatcagcaaatcttgtgtgttctacccctagaataaatctgaaatccagtcatttctctctatcttgatgattactactcttgaaggcaccatcatctgtcacctgaattactgtagtagtcttctcattgatcaccctatatttgccagtgtgccattttcagttttttgtctaccaggtagagtgaaactttgaaaacctaaatctgattccatcctctactcaaaaccctctcatggtatcacatcacaactagaataagttccaaagttttcaccctgtctggcaacatctgacatgatcaggccctgatttcttccctgtcttctgtgtacttacctctcactcctttctggtaccagtcccacacagccttctttgttccatcaatgcacaaagcacatacccacctcagggcctttacatttgctgtttccttggcctggcactcacttgcctttgtatatatggttcattcctcatttcactcagttctctgctgaaatgtcacccaaatcagcaaaaccttccctgtgtatcctatataaaagagattgccacatccaccaatgtgctgttttcttagccttatcttctaatcatgggtcaccatctactgttattttatatatttaattattattgcctctctcactccacattagaatataagttccctcagggcagtatctttgttttctgcattgctatatctgcagtacctaaaacatttcctgactcaatgggtattcattaaatatatatttaatgaataatgttaatatgaatagtaatagcttgcagttgttaaatgctaatctgtattaggcttttataaaataagactccattttacagaagaaagacctaaggcttagaaaatttaagaaatttttccaaggtcacatgtcctgtaaatcatgtctgcttctagagcctggttctcaaacttgaatgtatattcaaagcctgtaaaaaatgcagacttcacatgtatatatgagtatctgtatgtctatatatacatacatacctatattttccagagaaacaatggaaagataagtcaaaaattactaaaatgatgcccatagcagaagggagaagagaggataaaatggacaatgatagaaactagacttttcgtcgttttagctttggaactacatgaatgtttcataaaaacaaataaaatttaatttaattttattttattttattttatttcattattattttttgagactgagtctcgctctgtcgcccaggctgaagtgcagtggtgcaatctcagctcactgcaacctctgcctcccaggtacaagccactgtcgtgcctcagcctcccgagtagttaggatt

SEQ ID NO: 95984 - DNA, 15753 bp, Homo sapiens
cccattctctgctaccctctcttggagctcccagtcccatctgagaaattatctactctgagaaatcgtcacaacacagcatggttgtgagtgcagtggcagaagcctgtgcctggttgtatgggcccctcccctgccttactgactctctttcagaaatgtccttctcttgcagctggcgaaggagtatggcatggacttctatgaaacaagtgcctgcaccaacctcaacattaaagaggtgagagccctggtgaccaggcgcccgctctctcgggctgagtccagcagaggtgggaggaggagccataagatggaccttatccctcaggccgctgcagggttgccaggggagaggaggagacactggactaacctgtgccctttggtttccagtcattcacgcgtctgacagagctggtgctgcaggcccataggaaggagctggaaggcctccggatgcgtgccagcaatgagttggcactggcagagctggaggaggaggagggcaaacccgagggcccagcgaactcttcgaaaacctgctggtgctgagtcctgtgtggggcaccccacacgacacccctcttccctcaggaggcccgtgggcagacaggggagccggggctttgccctgctgctgtcctctcrtgtgatgaccctattgagtatcagtagccactactccccctgcctggccctgagagcggctctgctgtcatctcaagcagcccctgtccccagcccgtccaccctggagtggtcttcttcagcctgtttccccagccacaggcctgctacgacccccacgatgtgccgcaagcactgtctcaccatcccgcacccaccagacaacagccagggctggagtccaggccactttcagctgctcctttctccgtgcatcgtgtctcttctctgctttttctctcttcccccacttctctttctctgacccctcccctccggtgcgtttcgtatcaaagctcctcaaaccccgtcccccgtgtgtcctgctgtgtgcagctcgctctttccttccttcctaagctatccaaggggatggacccaggctcgtggggaggttccacccttggatccaggaagaaccctccaccctgcctcgtgggtgggccaaaggctacagggtgcttcttcctcttcccccacccccactgtccctcatgtgccatgggcctgcctccccagtgacctgcgaaagtggagcatcgaggtaggagggaaacrgcaaccagggagtcctcgagcctggggctgccctacctctacccattccccgaccagagctttgcccttgcttggctgcccgcctgcctctttggggaactgagctcagaggcaggtgcttcagagaaggaaacaaaatgaggggtggcagggataaaaagtcacctccattctctacctcccatgcagcatgaacacaatttctctccacctggctcccaaatttaaagatgtggaccaaggcctgtgggtactccaggggcaaggagagccctggggtcagtgacactgtcaggccaaccatgcactccacaaaggggagcatttggaaatgaaggactagctcctatgtatcaggttaagagcaagggagagctggccagggacagcagtttgcacagcagaggggaatgtagcaacagcagggcctcctaggccccatcttccatttcttaggtaagaagagcatttcctcagactcccaggcggaggactgagcctagccttcagcaaccaaggttctcctgggacccaaagtttatgggagaagggcaaagacttcatgggaagagagaaggaaggccctgggtagaaacgcttggtgctgttctctttggcctttaagacaaagcgctcatcttgccctctacctcctgataggcttgagggtttgccaaccacactgtggctacaggtggagggaagaggactccttcctccagagtgctatgttcaggaagtttctttaaccccatatggcccaagagtagctygtaggaggccctttaaagacggaacaagtaatttaccagttctactggggttcctgcccaccgtcccaaggtgggcgaggcctaggaagagggtcattcttaagccacacattagctgcactgcgtggctgcagccaaaacaaagaactgggtgttgagtattcatcaactaagaaccaaaatccagggcactcatatgtgaaggataagaacctcacttccttactcctccaaaaagaagtggggaaagaaccatcaaacctttcctcctgacttaccaaaccaggaaaacagcaggagagggtggctcaggacttagggacagggtatagcttagatggtggaaagcaaaggagagcaggaagttgtaaatcactggctaatgagaaaaggagacagctaactctaggatgaagctgtgactaggctggagttgcttccttgaagatgggactccttgggtatcaagacctatgccacatcacactggggctagggaagtaggtgatgccagccctcaagtctgtcttcagccagggacttgagaagttatattgggcagtggctccaatctgtggaccagtatttcagctttccctgaagatcaggcagggtgccattcattgtctttctctcctagccccctcaggaaagaaggactatatttgtactgtaccctaggggttctggaagggaaaacatggaatcaggattctatagactgataggccctatccacaagggccatgactgggaaaaggtatgggagcagaaggagaattgggattttagggtgcagctacgctcaccctaaacttttggtggcctggggyatgtcttgaggcccagactgttaaccaggctctgctggcctgtttactcgtcaccacctctgcacctgctgtcttgagactccatccagccccaggcacgccacctgctcctgagcctccactatctccctgtgacgggtgaacttcgtgtactgtstctcgggtccatatatgaattgtgagcagggttcatctattttaaacacagatgtttacaaaataaagattatttcaaaccaccggtgtggctgcctggatgagtccttgggggtaggtctcactcagaccctggcagtgatgtgggagggagagaggcagtgctggtagaagcagctccagaagcaaaggcaacagcagtagagtgaccacggaagcggcaaacattgtcttcccttctctaccttccctagtgccacctgcagggaggcccaaagcaaagccccgttgccctgcattgggctggcactgcagaaataagatgaaacacagttatcgagaggatgctgaacatctatgagcaggttttaaagccaagatgagtctcatctgtttgtgtgggtcaggaacgggtcttcctgaaggcatgaggtgggactggataatctttcagatttgtgattggatacctcgggggagcagaggcagactgggatctcaggactgcaggtatttcatactttgggatatggaattgatggaggtggagaatattggggataaggactgaatgaagaaaggagtaggacaacgcaggacaacagtagtcttaagattttcactacactttacccggcactagtgatagataaactcttctgaccctaaccatcaccgtgtgagatggggagggtggttatctacccaggtcccacaggcaaggaaacagatgatcagagaacttaaagatttggccgggtgcagtggctcatgcctgtaatcccaactctgggaggccgaggcaggaggactgcttgagcccaagagtttgggaccagcctgggcaacatagtgagacactgtctctagaaaaaattagctgagtgtggtggcttgtgaggctgaggccagtggatcacttgagcccagaaggtcaaggctgcagttgcaccattgcactcctgcctgggtgacagagaaagaccctgtctcaataaaaagagcttaaagatttgcctaagggtccgaagtaacagtggcagaattgtggttgtaaaccactgaattggaatcactggagggcaaagctttggcatctctagaaaaattcctacaaacaattctcatttgcagtcagaattaagaaccaccaacccaggctttctgcctaagccagtgctgtgtccagagcaagcactgtcccacagaaagccataagaatcatacgctgcttagtgtatgcttaaagttgtaagcttttggaaagcgaggccagtttgaggtaaatttggagacagagatattttaggagagcctcaccaagtatattccattaggaaaggtgagaaccctgggagtctgaagggtccaaggtcacaccaggagaaaagggatggcatgtacctaaggaagagggaacccccacactcctcatcttgggaactcccatggccttcttgaagaaggcttgcaaaagagcagagaataagaggtgtctctggaggcccagagagtactagggggaagctctaggtatgcacataaatccggcaagttacagttctgcccactatcagtgccaagtccttgtgactcagtggcttggtggggactctttcttattggttgcttctaggaactccacccagcttcagcaggggacacacttccctctacacttcctgtcactccttctgtccacttaggtaatggaaacttgtttttagggagcagccagctgagacacatggtccctgtatacttgaacagccatggaaaagctgcaaggcagcttggcgctccctggtgataattacttcatctcatctcaacaaatcagattctcaagaccagctgctccccggacttgcttattctttgttccaaggagacagttcccaatggatgtgcccctgtgaaaacaccctagtaaacatttgctttgttattgaaatttcactctaaaatcccaaagctaggtcaagccccattgctagttttactgatgaagaaatcaaggcatttttaaaagagtaacttgttgagttggcgggtgcttgggtcttttcrrtttctgtggcttccaggggtgggcctctgagatggcccttagcagatgtcctgcgatgcactgcacgcctcttgttgaaagcatcaggggtgacctgcctgcgtctggaaccacagcagcttcaacttcctccacacacttccttctgtgggaaggtgaccagcacaaacccgctctgaaaagtcttggggaccaaatctctgtctgagaggaaggtaggtgcagttcatccactaagtttatccacctgttctgtgactcctcttcaccattctcccagcaacgactgagcctcatgacttgggggctgggggatgaggtggaggtgggggatataatataggagatggtacagtgcaggggcagaggctggtgtgttctccaggacaagtggcaccacgcactgaaagacttttcaagataaacacaactttgtctcttcagcctggcaagagctgaggcactgaaaacttcttttttcccctagaaaatgacacactctcctcctaagggtccctttgattttgtcctggtggaaagcaacaaagagaagaacgtgaacaggaatatgtatatttcagttgtcatctgagtcccatggataggaggctcaattctcttcttcatctttcagatctccgcagaccctgccctctcactgtacaattcagagattgacactcagcaggcattcaataaacgtctgtgtcaaatgagaacaacttgatggggaagtaggagtcaatcctgcatccctccctccctttttttcctctccattcgacctttagggctctggtttcctgtaagcagtgaattatttacctctgctcatagatatcaaattggcccttcccaggttgcagcagggtggggcggggmggcggccttgttcagtctgttaataggaggagcaacctccttgttcaaacagcacttacaggtggggacctgtttttgctaagtcatcctggggatgctcaaagctccattgttagatcctttctgtcctccttcctggctcctccttcctccccacccctctaataggctcataagtgggctcaggcctctctgcggggctcactctgcgcttcaccatggctttcattgccaagtccttctatgacctcagtgccatcagcctggatggggagaaggtagatttcaatacgttccggggcagggccgtgctgattgagaatgtggcttcgctctgaggcacaaccacccgggacttcacccagctcaacgagctgcaatgccgctttcccaggcgcctggtggtccttggcttcccttgcaaccaatttggacatcaggtgaggggtccctccttgwaatgcaccaaaagtgttgggttggtgtagctcaggtgggataaaaggagaggctgaatgaccatgttttkgagtgtctggaataatggggtatgttttgttaagctargtctttaggtgcatgtgacataccaagagaaggtatatattttttaagattaaacactgaggctgtgtgatttttatagtttactgtctttctactatattactccatgagggctggttccaggtctgtgtttctctccactgtgtcctcagtgcctagggcacagaaagcactcattaaatatttgttgaataaatgagtggagaaagtagaggccaggaatcaaacaagaattggacagactcaagagaccttagctctagctggacttggttttgctatttaatggctctgtgccctcggaaagggcgcttcatttttcggtttagtttcctcatctgtaaattggggataataccacttagctcataggattattatgatgtttaggggacaggatatacaaaagtaacttgaaaaatataaagtactatgcaaatgcaagcaaactgttatttagattgaggatgatttttgttggtttaaattagccaagtggaaagaaaataagcaggaaagagaaaggttttcaaaaggcacgtgcctctgggcattacatgcacctatttctgattaatgggtcaagytgttatagatcttcagcccacacacctcgagttctcttttagggattcttctatttccacctatgattttaacgtacaagcagggagaatgaacccaagcgaaccctctcgttataatccccttagttcaattcacagtggtatgaaggtgaggaagacaggaaagcaggaaggctgaagcatcactggctgtgacaaacctgagcccaaactgttcactgctctcactgttcttccctaagttttctgtctggccttttctagagcaggagagacagaagtagcaaaccctctttcgagatgtccctccagccccagaagtacctccagcctcacaccatctcttcagcctagcaagttgctggagggagtctataacctaccaggagccagccagccatttgtatcaagaaatagaaatctgccagggtacagtggctcacacctataatcccagcgctttgggaggctaaggtaggcagattgcttgagctcaggagttcaagattagcctgagcaacatggtgaaaccttgtttctacaaaaaattgcaaaaattagccaggcatggtggcatgtgcctgtagtcacagctacttgggacgctgaagtagcaggatcgcctgagcctgggaagtcgaggctgcagtgagctatgattgtgccaccgcaccccagcctaggtgacagagtgaggccctgtctcaggaaaaaaaacagaaacaaaaacagagaagtccactagagatcagctctgggctcatgatgtcatgatggcctggaactgactgaactagttagttctcacaggtcagaagcaggaactttctcccagaggaaggtatctgtctsttaaattggaaaggtagaggtggaaaagaagggttcccataggccttttggattgtcatgaatggtgatgctgagagggaataggacagggatggcagtggggagggaaaggcagggaccaggttttgagccaaagcatgcgtagctgagagcagtgagtggataggaggtgcagcagtctttgggtagcagmctactcaagaaaagaatgataattacatactcacaatctttagccatcaagcacttatttcctcaactccccctccccctggcctattgccaaaccctaaatcctgtatcctatttacttcatgcctgttggttactaagtagttccatttagagtacacattcattgttgccttgaacttgctctgctgttatggcacctgaaaactagatgttcttggatgggggtcttccttcatcaaagcttcttcccatttgtacttcagttctaggacaaggcaagaagaaagcaagaagctgtaaaycccattcctctgggtctcaatttcaccctcagttcaaggagctgagtaggcagaggcaaaggctatactcaacacacgtgcaattgaaagcaggcgaggcaaaaccagggcagaggaaaggaaaggggtgtgtgtgtaggtatggatttatgggtaggtrggtcggtaggttagttgaagaggaggttctaagcagtataacctaagcctcttttctctttcttctgcttcaaacaccttaagaactgctcagggtagactggagacaaaagcaacagctcagaagtgctaaatcttgaagagcagccaaagcatgggcaacaaagtgagaccccatctctacaaaaaaaaaaaaaaattagccgggcatggtggcctgtgtytgtagtctcagctactaaagaggctgaagcaggaggaatgcttgagcccagaagttcaaggctgcagtgagcaacacctcgtctgtcttgtctctctctctttcacagtgaaaaagartgaccytggggagggagtgtaggagggtgaaagagtttcatgttgtggatctttctcttcccccacccactgtccacgcactttgtctttttcctcccctaggagaactgtcagaatgaggagatcctgaacagtctcaagtatgtccgtcctgggggtggataccagcccaccttcacccttgtccaaaaatgtgaggtgaatgggcagaacgagcatcctgtcttcgcctacctgaaggacaagctcccctacccttatgatgacccattttccctcatgaccgatcccaagctcatcatttggagccctgtgcgccgctcagatgtggcctggaactttgagaagttcctcatagggccggagggagagcccttccgacgctacagccgcaccttcccaaccatcaacattgagcctgacatcaagcgcctccttaaagttgccatatagatgtgaactgctcaacacacagatctcctactccatccagtcctgaggagccttaggatgcagcatgcyttcaggagacactgctggacctcagcattcccttgatatcagtccccttcactgcagagccttgcctttcccctctgcctgtttccttttcctctcccaaccctctggttggtgattcaacttgggctccaagacttgggtaagctctgggccttcacagaatgatggcaccttcctaaaccctcatgggtggtgtctgagaggcgtgaagggcctggagccactctgctagaagagaccaataaagggcaggtgtggaaacggccagcctgtgtgtgtgttctttgacagagggcggagggaagctacaaactgcaggtgggatagaggagctgctagcacacaaagctttgggaggggaggatctgacggatcaagggatgccctaattactgacaggaaagcaagcgctggccaaggtctgcagtggcaggtgcagttacgggaaatgtgaattatattattcctttacagctcttcttcagaactggggaaaaagagaaagtgataatgggaggtagaggaggaaaagacaatgagccctttggttggggatattgggaggctgttaggaggattacagtcaggaagcatcaatagcactgtgggtactgggccaactagatctgacttgtgccttgggaaattcctgggcagtcagcttagttaatgtttaccaatagcaagggcatagagggtgtagttactgagaacacaaacagcactttatctttttcctgatcatcaaacatctcgggtgtttgatcctttgctagactgattctccctcctttttaaagttcatggcccgggtgtggtggctcacacctataatcccagcactttgagaggccgagacaggcggatcacttgaggtcaggagttcgagaccagcctggccaacatgatgaaactctgtctgtactaaaaatacaaaaaattagccaggtgtggtggcgcacgcctgtaatcccagctactcaggaggctgaggtgagagactcatttgaacccgggaggtggaggctgcagtgagccaagatggcggcgccactacactccagcctgggcgacagagtgagactccgtctcaaaataaataaataaagttcacattacaccctcattcttctcaaaatcacatattcacaaattcaggctccagacaaatagaggcaggaatgactggactcatttcttcctctgtaagaaggaaggggttggggatgggagagagcctcccttcagagtcaggctgtttataatctgccatttgcaacatcattattcctcactgtgaggacagttttgctcagaggccttgcaaggatggtgtccccaattcctcatccagtgcagacataatcaaaacatatcaccaccgccaaggtcaggttctatcatgttctggaaaagatacctgctgagaggccactgcctgtcaccttgccccacagacctcatcctggaaacttctcatttcatcttcccttctttgaccactagatggaatattttcacttctattcactgaaaccctgaagggacagttttccaaactggacacactgcttgagaagcccaatgctgaagggaaaatgtttttcctttaattgttctgcttaccctaaccattttctaagcacttgcatcatatgagagtgaatgtggaatagatgtttaggatccccactttctgaccttcaactaaacctgtcaacaacagtgctttatttcaaaagggtaacctgagtattacagtgggaatcccctgacacctttctgcagggccttctgctaacttaaggctacccttaccttcactcttgaaacctcaagcctttcagattcctgctcttaaagtcaacagctggggtatgaattattatggggcaggaccatgtactgattttagagcagtaactgcagacaaattgctttcctgacaaaatagagaattcttcttggatgctagtcatcaccttgacagtaccatagcctgttgttacatccagtaacagagccagctatctcgggtgttggaaacatgccacaggcaacttagagcctgagacaccagtacaatgtgttcagtctttcccttgaggcccaagttcaaagaattatttagggattcccaaaggaatgggaattacagtataagttattctgcagaaagtcaagagaaggccataaagctagaatgaaggctcttcacttgggaggggaaacactatttgcttcagacagaacctgatctattcagctcaggaggaaacagggaaggcaagactggaagattctattttaaaaggatgtttaggtttaccaaatatttagttgtgctgttgttaaaatgaagagaaattagaaagtgtttcctttcctttattcttcatcttgtttgtcccccttatcatcctcagaagtattagcttgtgatcataaacagacaaggcaaagctttaaaatatcacccacttttctagataaacaaaaatcttttaatcagatttccctaggggcacccagaaggagggggaagtctccttaacaactctcccagaagtgctgagataatgctattcaactcagaggagggacagagagaatcactaacctgagggctcttacaaaaacaaaaaacaaaacaaaaaaaccagagcttggaacaagtgattttaggaggccagggtaaagacactgaaatcgataattatcttcatgactatgttcccatagctatctctccttagtttatgagacactgaggcccagtatggtggctcaagcctataatcccaacactttgggaagttgaggcgggaagatggcctgagcccaggagctcactatgtagcctgggctacacagtgagacctcgtctctacaaaaaattaaaaaaaaaaaaaaaaaatcggctgagcatggtgatgtacacctgtaatggtttcagctactcaggcagctagggtgggagaattgcttgcgcctgggagttcgaggctgcagtgagctatgattgcaccactgcactccagcctggatgagaccttgtctcaaaaacactgagtcaaactctagaactttattataatcaccatcacaaccatcatccaaactaccattcatttaatatttactatgggcacagactgggctaggtactttatatacactaggttatttaaccctcatagagatcccatgaaaaattgttatttctattaaaagaaaaggtaattgggcaagacacttgccaaggacacacagcttaggaagcagcaaagctgaaagttaaagccaggtcagtctgactccaaagcctctactcttaaccataacacaacagtgctttcttctagctcagatttttcttcataaagaccactgacagctgcctgcacacagcattagatttaaaaatcattagatttaaaaattctgtggaggcatgatggtttctagttttccactgaagacactgaggtacagacaggataagtgacttgctcagtgtcccatcattagcaggtgacaaagctaattctagacccagatcttttaattccttttctatccaactatactgtatcttacaacagtcttgtactacagtaaaaaaaaaacatacatttttaaattgagcgcctcaaataactagccctgctcacaacatgaaagaatgaaaccgaaaggacttttgatacactgaaataaaggacagtgaacataaacctcttcatggtaacttacaaataacaagccatatctggttgtgcccaagctatctgatgtcaattaaattagtactgggagaacctaaaaccatgtgagaaagagctagatcaaacaaaacaacaaatagtggctgagcttttaacttcaggagcctaactagccagacctgtacatcacagaatgattagagaaaaaggaggtgccaagataagcccacgtttccaattatccccatgtttccaattatccccacaggtgatttctcttccttcttatatctcaggaaggaaagtaaaaagaagagccatgttttgcctaattcctttttttttattttattattattatactttaagttttagggtacatgtgcacgatgtgcaggttagttacatacgtatacatgtgccatgctggtgtgctgcacccactaactcgtcatttagcatcaggtatatctcctaatgctatccctcacccctcccctcaccccacaacagtccctagagtgtgatgttccccttcctgtctccatgtgttctcattgttcaattcctatctatgagtgagaacatgtggtgtttggttttttgtccttgcgatagtttactgagaatgaagatttccaatttcatccatgtccctaattcctaatttgaacagaaaaataaggattctgtgaaactgggttcaagtggtcgttattagatccacataagaatctagaaaatgataaaatatcacaaaacacagcacaatgtgggttcaccaataatgaaatatagagagaggatcttatgttttaaatttttgtaacatatagtccaaaacaaatagataattatacattctgcaatagatgaggacattggcagggcatataaaattagactcttgggcttcaaatgactaagttggaagcattagcaaactcaaggaagggacaattcagaggctataatgggcttaatgctgctatttaaagtaatgaagcattttctctgctttctggattcatttcaccaaacgatttcctcagcaggtcagatatagatttgcagcaaaatgaaaaacattttccaggaataaaacaactgatccctgcaacagctgacttaacttttctgaataataaatcttcatctgacatgcccagatgcctcagagtactgtcactgatattcttaacctcttcctaaccttgccagatccttgtatttcatatttgccaaacataattactgagagggggtaactgcactagctgtgtgatcttaaacaagttatttaacttctttttttgttgttgttttgttttgtttttgtttttgagatggagtcttgctctgtctcccaggctggagtgcagtggcatgaccttggctcatcacaacctccctgtcgcgggttcaagcgattctcctgttcagcctcccatgttgctgggactgcaggtgcataccaccacccctggctaatttttgtttttgtatttttagtaaagacgaggttgcaccatgttggcccggctggtctcaaactcctgacctcaggtgatccgcctgctttggcctcccaaagtgctgggattacaggggtgagccaccgcacccggcaagttatttaacttctttgtgcctgagtttttttggctctaaaagtgctacactgaaataaagaatagtgaatataaaccttttcatgataacttacaaataacaagccatatctggttatggctaaactatcaatagcacctaccttatgaatttgttaatgaggattaaataagtgcttaaaaagctcttagcatgtagtaagtacttaataaagctcagatattatcatcattactgttattcaacaaagcttttccctagtatctacaatgaacactttgctcatttcttgttcttataagaccttagttcagaatttccaaatctcctagatatgaagaaacacttttgtttctaatgcctgaccctttaaatttaggtctcagaatgagcactaattgaagccacctcattgtttctagtactttacatgctttctaaagtatcttacattcactaattcatttaaatctcctaacaatactgtgatgaatgtattatatcaatttttgttagtccaatttgatagaaacaggacaataaagtccagagtaatgctttgcttaatgactatactgctactaaatggcagagaggcctaaatgccagtttataacctcctggccagtgctcatgaaactatgcaaagtaagatattctaaaatccctttaaagccaatgaaaccattttctcatttatattaactgaagtccacactgtattcagatttccctagtttctaccaaatgacctttttttcttttcgtggtatataattccatgtaggataccacattacatctagcagtcatgtcttctcaggctcctcttggctgtgaccatgtctcagattttccttgttttttatggccttgatagttttgagaagtactggttaggtat

SEQ ID NO: 95985 - DNA, 13110 bp, Homo sapiens
tgacactgttaagagtattcatgggatgccctgattccattacacactctttcagctgaaagtgattcgaaacgcaacattaaactgcacatttccagaatggaggagaaaatctggtacaaggtgacaaagagaaaccattcggaaaaccctttttgacagtgtatatcaatttcaaggcacagggaggaaacatccattttgttcaaaagcatcagactttgtggattctgtttggatgcagcagaagtgttcttctctttcaaaagtattagaaacgcattgttgggaaagaaagcagggcagctgagggacaagccagggttaccttaccatcgtcagaggatggctactctgtagatgctaattaatggtatcaaaaaatagctgaaaggaaaaaagtaagcttaacagcctggaatcagtttgggtgtatttcttgtcattcaattttcagaatggaaactactaaataagtctgcaaatacgatgattcatttaacaagaccccaactatgcaattaagctcctaagcaaaaatattcacaaatgatggtcaagggaaaaatatttcagatctttaagtagcagcaaaaataagtgaccactcatagagccatagctgagtcccatgttccttgctttcttcacaaccagcccagtctgtactcataccacccagaataatttctcagtgtcatattcagccactttctgtagaaacatcttagtctaccattttgctataccagcaacactcatgaaacccagtgcgccagcgcaaaattttccagatcagctaaatgcctcagtcattaatgaaaggttttcaaggtgcatatcatttctcaaaaaaaaaaaaaaagaggtctatgtgtttgttttctgtttttgaattatagtctgcataccataaaatataccctcttaaagtgatacaattcagtgttttttggtacattctcagggttgtgcaaccatcaccattatccaattccaggacattttcaaaatctgaaaaaggactccctataccctgtactttttagtagccactccccatctctccttcgttctaagcccttgcaaatactaatctactttgtctctatggattaatctattctggacatttaatatgaatggcatcatacaatacatggtctttatgactggtttcatttgctaaacagatgttttcaaggttcatccatgttacagcatgcatcaatacttcattccttcttgtggctaaataatattccatcacatgaacacattttgtttatccattcattagttggcagacatttgtgtttccattttttttgaaacagtgaataatgctgctatgaacatttgtgtacaagtttttgtgtaaatatatgttttcagttctcttgggcatatacccaggagtgaaattattgagccatatggtaaccttaactttctgaagaactaccagttagctttccaaagtgactgtacaattttatattcccaattggtaggttttagaactttctcttaaaggactctagagttcaaactagattcagatctgaaaatctcagtgatttcttattcagcacccttttaaaggcaccttgctgaaaaagttttgcctgcatgtttagatttcaatgtgtacatcacacaatgctttatttttcatctgcatcagaggatatgtattctgcttctctctagtgcagggtcaatatctaaaattcacaataccgtacggttccccagcacaaatgtatacaaccatttgttaagtgccaaatcaagcattttcttcctcatggcaagtagccagactgggtgaagccaccaaaggcatttatttttctctctactgcagtctatttatgagtaggacgaacttttctcttctttttaaagatgactgttgactacaatggctcactatttgtgtgccaagacaggtaggacttgcagagcccaggaagcaatttcttcactaataccctgcattggtcacacccttgtttgatttgtgtctgattcggacctctttacttaaaaaacagcaatgtgacggaacaactgagcagggtcccaagaagaggagtaaacacaattcaaggggtggaaaatagaagctttgaagaggctaaaggaaaagtggtattttagcctgagggaaagaatgaggaacaatctcatcacactcgccttcacgcatttaaaatgggtttattcagagaacagtgggtgaccagttcttcatgctcagagtgaaacagacaggaggaaatcacatcaaatcagtaaaattctatggttggaaaagggaaaataatttcttgatcttcacattatacatctgacgaaagctcatggatctccatccctggaattctttaaaaagatgtaaaggagctttgtctatatttgcctgccaagaatcttgaggcgtccttcactgtaatttctttatggtgctataaatcaggaactacgtctgctacatgagggcaaaaccagacccataaacaatgagatctagactgtataatgtactgagaatgtcttgcagtgtgcactgtggaagtaaacaggacctcttctttgctacatgctcctgttcaaaataagttatattacttcatgtggcagggcagggaggctcatctgtggttcatggttaggttatatgggctagatgctgcacaccagccctacctgtaaggcctctctggctctgcctggtaacagttacccggtgtcagttccttacaagcaaaggcctgggaagcccatctctcattcgttgaacataacccattaagttgggtttgggagctggctgtggtgaaatgaaaagtaatcaaagtttgcagtccaaagtcaatttcaagctatgaattaagtatactgggaaagtgagttagccactctgagaatcaattttccccacttgataaataccactttcttcagactaaatgagtatatgtatgaagggactttatagattattagtgatgctgaatgaataaattaaactcacatataagagtcagtagaatagtaatttacttggaacttcgttatttttgtgtaatgataaatgtctacaaatgggatcttaaggaactgtatgaaagaaaaaaaaattttgtgacctcacttaggctttaagaataaagtggttatctcacattttatcattaaataaaaatttaacattttgaagatttctcattgtcatttccattcatgtgttcagatccccccaacattccacagaaaagaaggaagattgacagggggattgggggcattcttgcttctcttgctcaatagctttgaaacctcactctgttcattaatattagagtctccttaacatttttccaagcatatccataatttttaattttattgtgacaaagagatacatataaaggagtcccatgccaaatccccttttcctgcaaaaattctactcaacccataatttatccaaggctcttacaactgtccaagtaaaaaatgagtctgaactatgtctgtggaaacagaaaattcttagagataacatacataatttaaaaaaattatgtgggaattaaaggagaagaaaatgcctgcaaatctgctgaggttcccagcttggacaacgaaggacgatgatgctattaacacaggagagacgagcagaagagttggtctggagaagacactgcattttgggcatttgaatttggggcatatgtgtgatgtcaggtggaggggctggtgaagacacagttggaaatgtgggagtggtgctcaggaatgaggtcagggctaaaaaagatttgtgaatagtcatgtctatatgctagttaaattataaaattgaaacaagtgttctagggaatgcatacagaaaaaggggagaaaaacaaagccgagaactgaactaacatattaagtgaaaacacagaaaaataggtctgttctctcatctaccttctaacctcagctgcctggcaaactcctcttcactgaataaatcagttaatttaggttggcctctacaacatttcctatggaacccacttctgaatgaaaacaggggacgaccaaatgaagattcctcatgctcgaaagagttcaggaaacactcttctttgtcacaggacttttctgaatctttaatatactcacgtggattgttgttctccaaaaccaggttcctttgtaacaatgcccaaatctaactaagggatgaacatctaacatctttccacctttctaccatgtgtgggtcagattcagggacggaagcatttgactgagctatagcttagggatacagtgggcttcactcttgcatcctcaccccctactcttgaagccttgttggatgtaaaatcggaactgttctgttccctcttggaaaaaggccatgacagaccatctctctctgcttccattttcttttttgagatgcacaggcagagataaagaggctgagactggtgggggcttgcctgggagaatgccaggttctctccccctctctctggctttctccattctggttattcccttaaatagttttccagataagggggatcagggcgggctcccactaacctcatttccactagttctgccttggagcttgggctttcttgttctgattcttacttgatttttgtttttgctgcttctctggaataaccttccctcatcaccaggattagaagtattattttccctctcacattgagaaggtggagaaaaaccacaggaaaaactaagtctccaaaacagataaaaatattacagaagagaatcttgctgcaataaaagggatcaaatcctctgacttcaatggattatattttagggccccaaaagtcctcaaaaatgaggctgtcacagtactgttagggatctggaaggaagggcattgaagaagagatgtggctgtggccaaagattagagataggcaaatcaggtataattttttttaacatagaagactatggattctgcactgtgagaaggagagagttggtatccagtcttgataagattctagagtaggctgaggacagtgtaatcccagcactttaggaggctgagacgggaggatcacttgagtgcaggagttcatgaccaacctggacaacatgatgagaccccgtctctagcaaaaacacaaaatattagccaggcttggtgacacatgcctgcagtcccaattactcaggaggctgaggtgagagaatggtttgagcccaggaggtagaggttgcagtgagccaagatcaagccaccactgtactctagcccaggtgagagacagacactgtccaaaaacagatactagagtagatcatgaaaggaagccttatgagggctagtgaaagaaagcagcagtcactggtggtctacctgggttccttaagagagtaagtcacctcattcccaatgcttctctcccaaaccccttccttgtccagctaaaagaaatgttaagccatagtctttacttggactttagaaatcaacagtctttcatgatcttttggttgacagtgaagaggaagggttagcacaagtaaaaataaacaaattaaaaacagtcgaaatgtaacaaaatggaagggtttccatccatgagacacttgttgtgattcagctctgtggcatggctgtcgggagagtgagggtaggttttaaggatgttatctttacaagatgggtggccttcagctctctaccacgcaggtcaattcagttctgagagatgccacatgtgaacagggaaatcacacaagaacaggccaaggagcgacctggatgatgagaggctcaagccagtgatcgtctttggatggtgagaatatcatgtctttcttttcttaatcttatttgtatatttaaattgtacataagtagctctctgctcctcccatttgacagacagccgcctcttctctctcattgacagctgcatccctgagacactacggtgaaggtgaagatcaaagtcaatggatttggttgtattgggtgcctagtcaccagggcggtttttaactctggtaaagtggatattgttgccatcaatgaccccttcattgacctcaactacatggtctgtgtgttccagtatgattttgtctgtgrcaaattccatggcactgccaaggctgagaatgggaagcttgtcatcaaygaaaatcctatcaccatcttccaggagcgagatccctccaaaatcagatggggcaatgctggtgctgagtatatcatggaatccaccggtgtcttcaccaccatggagaaggctgggactcacttgcagcrgggagccaaaagggtcatcatctctgccccttctgctgacacccccatgtctgtgatgggcatgaagcatgagaagtaatgacaacagcctcaagatcatcagcatgcctcctgtatcaccaactgcttagtgcctctggccaaggttatccatgacaactccggtatcgtggaaggactcatgaatgaccacagtccatgccatcactgccacccagaagactgtggatggcccctctgggaaactgtggtgtgacagccacggcgctctccagaacatcatccctgcctctactggtgctgctaaggttgtgggcaaggtcatccctgagctaaatgggaagttcactggcatggccttctgtgtccctactgccaatgtgtcagttgtgggcctgaactgctgtctggaaaaactgccaaatatgatgacatcaagaaggtggtgaagcaggcgtccgagaccccctcaagggcatcctgggctacactgagcaccaggttgtctcctctgattttaacagcgacatccactcttcaacctttgatgctggggatggcattgacctcaacgaccactttgtcaagctcatttcctggtatgacaatgaatttggctacagcaacagggtggtggacctcatggcccacatgacttccaaggagtaagacccctggactaccaaccccagcgagagcgagagaggaagagagaggccctcactgctgggaagtccctgccatactcagtcccccacaacactgagaatctccctttctcaagtttccatgtagaccccctgaaaagggaggggcctagagagccccaccttgtcgtgtgccattaataaagtcccctgcactcagccaaaaaaaaaaaaattgtacataagtaacatatactgcatatgtaatcacagtttttttaaacaaatgtttcatgaaggaaacatgtacatgaacgtattttgtatatttataaatatacaaaataaattcctgagggaggagagtcatcatctacaaagaggtggtccaggccagggaatactaagactcaggtgagctggtgacatttgggaatgtggtcctgaaaaggtgaagagtacttactgagaaatacaaggaaaaagtaggggaggggaaaagaaggagggcactgaatctcggaggagccaattgaacggccgaagatgacggcacgtgaaagcctaaagaactgtgggagcagcctctatagtaagctgcagagatgagagggaaagagaaagcaggatatctaaccaggaaccagttggacctaggaaagctgacttgagaggcacctgtgatgtcagcaaagatttaaccaaagccaaagacagcatctccaagggctcaaaggggaaaactctccttccagagttcacaagggacactcaatgctatgactggtccagctggaaaatgaggttggggaaagggtggatgaccagaaaatggcacccccaatgatgagactctgcagacagaaacccatggccaaagaggcactgagaggcactgtttggtcctcgtgagaagcctcagtgggttggcttttatccccatactccctcatgctctcgtagggctgggttatgaatctgaattatctgagtgtagacagtagggaacaggaaaggaggaagaacatcatggataaaatcaggagtgtgatttttgatagataaactgtttcctgtttttgctgggattagttatgccaaaagtggaaactcagcttcctgagacacctcccatttcaacacaagaaataggagaaatatttataccatggcctagtaaggctgaaaaaatcttcaggtgtgtaaaaaatattttaagttctagagaaactattatagttgcttagggtttaacttctttctcaaactgtaaaatgaaaatagaccagttcacccttagatcacaggaatgaataaaatcaatgaagagataaattcactagaagaaaacacactctagtaaattcaccagaaatgtaccatcatagatctactattttcaagtgtctttcttggggcaagtttcaagttgtaaggttgtctttacaatagaattattgaaaggcacttcctaccataacaccactccagaaaacactcggaagcagctctatcatttaagacccatgtttctgtgtcccaatttctatggacttatccaaatttacaatttcaaatgtttagcatcagtcagtaagtcacacactccacagaacaagaggctcttagaacacaattattatcttattcccattggctggtctcattcacaaccacctctcaaagaagaaaagcagatggaggcttcccacatgcaaccctttatggctccagcctggtgcaatttaggagtgaggtttagaaggaattagaaagcgcagtaatagagacagtcattgtaatttgaaacatgaatttgctgttcaaaaggctaaactggagtgcttaaagctaagtgcttaaaactaccccagaaccctaaagtaatgtaccataattacaattactttccttcaataatagatttaaaaagttaatactttcttgtgtttggctggaatcactcagtcatccattgtagttgtgagatctctttcttggaaatcaacatcttcatttggtttccacatgaataattcttggaagctacaaagtctttgaagggtatttatttttgccttgaggtctggtggcctcaaagttcacatgaacctcacagatgcaaactatctcagcatgattcatctatgcctatagcgttctcaccaaagggaggtccctgcctgtgtggggtttccatatttatactgctttgtgtgtttatttgtagttaaaattgttttcacaagtcaaataaatttaaagatgacctacaatgcacatgcatgagaaattaagccaaaactcagattcttgactgaatcactgtttgttttatcttggtggtgggacatgtgctttgcctaaacttcaaacttcttatccttctgcctccataattgcaatcatctcactctccacactggstacattttatttaaaccttccaactgtggaggaaaaaaaaggagcatctaacccaagacaggtgtcacctagacaggaactatctgagagctaagagaatttcttttctccatgaaatgctgtggtggttagtgtcaggcctctgagcccaagctaagccatcatattccctgtgacctgcacttttacatccagatggcctgaagcaactgaagatccacaaaagaagtgaaaatagccttaactgatgacattccaccattgtgatttgtttctgccccaccctaaccgatcaatgtactttgtaatctcccccacccttaagaaggttctttgtaattctccctacccttgagaatatactttgtgagatccacccactgcccgcaaaacattgctcctaactccactgcctatcccaaaacctttaagaactaacgataatccaccaccctttgctgactctcttttcggactcagcccgcctgcacccaggtgaaataaacagccatgttgctcacacaaagcctgtttggtggtctcttcacacgaacacgtgagacatttggtgccgaagactcgggtaagtgggactccttcgggagaccagtcccctgtcctcacctcactctcactccatgaagagatccacctatgacatcaggtcctcagaccaaccagcccaatgaacatctcactgattttaaatcgggtaagcggtctatttttactctcttctccaacctctctcactatccctcaacctctttctcctttcaatcttggcaccacccttcaatctctcccttctcttaagttcaattcctttcattatctggtagagacaaaggagacacattttatccgtggacccaaaattctggcactggtcacggactcgggaagacagccttcccttggtgattaatcattgcggggacgcctgcctgattattcacccacgtttcagaggtgtctgaccactcggggatgcctgccttggtctttcacccttagcagcaagcaccgcttttctggggggcaagcacccctgactccttctctccgtgtctctaccccttctccactttcctggggggcaagcacctcccactccttttccactttcctggggggtaagcacctcccaccccatttccactttcctggggggcaagcacctcccaccctgtttccactttcctggggggcaagcatctcccaccctgtttccactttcctggggggcaagcacctctcaccccttcttcactttcctggggggcaagcaccccccatcccttctctccatgtctctacccttctctttaaacttgcctccttcactatgggcaaccttccaccctccattcttccttcttctcccttagcctgtgttctcaagaacttaaaacctcttcaactctagcctgacctaaaatctaagcatcttattttcttctgcaatactgtttggccccagtacaaactcgacaatggttctaaatagccagaaaatggcacttttgatttctctgttttacaagatctagataatttttgtcgaaaaatgggcaaatggtctgaggtgcctgacgtccaggcattcttttacacattggttcctccctagtctctgctcccagtgagactcgtcccaaatctttcttctttccctcccacctgtcccttcagtcccaaccccaagtgtcactgagtcttgtgaatcttccctttctactaacccatctgacctctcacctcctccccaggctgctcctcctccggtcgctccctgccaggttgaatcaggctccaactcttcttcagcctttgctcccccaccctataacccttctattacctcccctcacacccagtctggtttacagtttcattctgcaactagctctcccccacctgctcaacaatttccgcttagagaggtggctggagctgaaggcatagtcagggtacatgtgcctttttctctatcagacctttcccaaatcagccagtgtttaggctctttctcatcagaccccactaaatatatacaggaattccaatatctaactctgtcctacaatttaacctggagcgacttaaatgtcatcctaatagttaggccaattcccagaatgactaaagaaaaataacttttcctataaaaggtgagtaaatggccaaatgacctagactagctctgaagggtaagcactgagtcccaggttaaagattacattctaaccacacaccagtcatactctgctccgggaaaaaccttaagtacttgtgaccttctgtccctaacttagatgttgtttactttcagtttacatacagtgcaaacaccagggtgtacatgattttcaagtcaaaaaagataaggactaatccagaaaggagaaggaattctgtttcatgcaggctccttgacagcagcaagagataacaaaaccacaacacaggaggctttagaaaaaaactaaataaaaagccgtaatctcaaagaagactacagccaacaataaatattaatactataaagtaaggtcctaaggactccacagttacggaggaataagggatcagaagttcatatccattatttggaagcattaagaaatgtttagattattttccattactctgtatttgaggaggaaggggaaaagctgtttcaaacctgtatgcagagtgtaatttccctggggggaaaatgggattatgtatgaaaaaaggctggaaagatatacccctaattggtaacagtggttggggaggggaggagattataggcaatttttcttttttgcctgtttatattttctacaagaaacatgacatatatctacagcaaaaactgtgtaaaaaatccttgaattttcctgctaaaattggtctatgttttgtactaaggtagagatctctaccacaaaacaccaggtggagataggcctgtttagtgcttctcattgccccagccttataggccctcatttccccataaaaaaagggatggagaagggtactgagaatctctataaaaggtagccacttataggagcgttttgcaagagtttagggagtccacacagtggagctggctggcttagtgtaataaataggctgcggtaagagtcattctaggccacagcactcatgggggcatgatctgccttaattttacccatggggaatgacacagcaaggagctggaaggcttagacatgaagactgacctctgcagactggtgtgagggaaatggacgtggctcccagaagcggctcttcccactctcaggacctgccatctgtggcctaagaccagagacccacagccaggcagagggtctcccagcacaggcccagtcagtgctccgtctgcagctcctgtcttggtagcactgccttgctgtgtgccaacaacttgggagtccctgttttagagaatctgccaagccccaagtttgcctttgggttaacccctaactacgtatggcccattttaggagttccttagagaggtttctgtcttgcacaggtggtcaggtgagtgtgcacaaagctctgtgattagaccctgtggtgaccacacctgatgtgtgcttgtccagagggggctcactgccatggagtctgtagcagtgcctggccatgagcgtcagaggcctcagcaaaggcctt

SEQ ID NO: 95986 - DNA, 14100 bp, Homo sapiens
tggtttgcagatattttctcccgttccttaggttgcctcctccctctgttgattgtttcttttgccttttagtttgatgcaatctcctttgtctatttttgcttttgttgcctgtgcttttggggtcatatttatgagccaattccttgcagtaaatcgaaatcaatcaatcaatcaatctgtctatctatctcctattagctctgtttcactgaataacccagactaacacataatttaaaatgttactttttctttatttgtaatgaattatatagcaaataaacaccatgacgagttgagatgccatggaagaaaggaaaaggctttatatggggtagctttagtggcaccctcccctgctttttgaacagggaccccacattttcattttgcactgagccctgcagcttatgtagctggctgtgctgatagtcatttcttccttagccccaggtcatcagatgcagtctctggagagtctgggggcctctgtctggccacaggcattcaactatttctggaaattggaaccgaagacctcagggaccatggtttcattgttctcaacccatcctttgagctctgagaccgctcctcccagggcctcagattataccattgtccactcttcctccgctcagggctgttatatttagaaaaataaacaaacaatccagactgtccagctgaatgtgaatttcagatgaaaaacaaatcattgtttagcacaagtgtgtcccagatcttgcatgggatatacttatactaaaaacattttgtattaattgtttatctgaaattcagatttaactgggtgtcctgtactttattcagcaggcctacccctgccatscccccagtgsccccaagcctttcactgccatagcactgccctgctccttctccccttcccccggctccacctctctatctcctacccaaggcctagcccagaacccaccatctccagccagaacctctgtctgcctcatggcctggcctccccgcctccaggattccacttaccaaagccactgtttttgctgttttgcgttttatttttctgccataagaggaatacacattcactacagaaaaatcacaggctacagagaagcaacaagaagaaagtaagaaaacactcataatcccacccacacaaagacaactactgcgaatacctcggggtagatttttctagagctgtatgtgtgtgagcgtctctgcagatatttataaaagagcacacactcactgccccggttcaggcctgttgtcctataagctgagttttcctgtcactctagactgcaaaatctcagtgtcctgagttgttttagcctctgcaagggatgctggggagcctgaagtgaaacccccagacactggggtcagacgggcctatggtcaaaaacactttgtagtacatgaccttgcgtattggtttgctggggcatgctatagcaacataccgcagatgggcggcttgaacaaaagaaattaattttcttacagttctggaggctggaaatccaagaccgagatgtcagccaggatggtttctattgaggtctgtcttggcttgtagatggccaccttcttactgtgtccttatatggtctttcctttgtgtgtctgtatcctgatctcttctttagggacactagtcatattggatcagggcccaccctaatgacctcatttcaatgtactcacctctttccaggccctatctccaaacaacccgcatttcctcaaaaatgcggacttcaacatgtcttttgggggaacaaagacttttggggaacaaagtctttggaggaacacaggtcagaccatgatgccttgcccagctcactccaaacatgctgagcctcagtgtcttcgtcgatgaaatggggtgagtggtcatattcatgtaagaggagtgttaggatgaccaaatcaggtcgtcctgataattcacttgcctggcccctggcccccggagcaagtgccccaatgtcactccctgctcttcttgctcccctgcaggtggatcagagggggccatggacctcctggtacctcttcacccctttgctcaccagtttggttattccctccaggtaagttcctagaggagagttgctggatggaaggtggagatgccagcctgagccctgaaagtgcacctgcccacccccatcggggtgggtagatggatgtgcccccagccccatcctcaggcctcccatggctcctccccatctgactgcctgccccaccttactgtcagaggcttctgtccccaaaggctcagcagagttgcaagctggtgcctaaagctcttctcaagctggctgggcccctttctgcctctccccttcttcattgcccttgtcaccctcctgctttgtagccgcactgaggactccttgctttctgaacatgacatacaccttcaggcctccagggctttgcactggcagtgccctctgccagggatgcccttccttctatctatgccgtcctggggagccacctgtgccttcgaggggcaaatragaccctttctatgaactcttttaatgcccctcctctctctccttgctcaaggctaaaccatctgctaaggccacactggaccttgaaaagatactaattgtgagggtgatggcaactgcgacaccagcaatggctgtctcctcactctgttccccactgatcccagcattcctcaaggggcctcagccatccagatggtgccaggcacaaatcaacctacaggtgcagacctgctcagattagatggattgacaggtgagggggccagggtaggaacggcatgagaacagagtacgtatgtgtgtgtgtgtgggtgggggggtggtggtgtcatcaaacactatgtggcatgattgcaattagggaaaatatgtttgagaatgtgcttgttctcatctgagaatattacatattggatggtcaatatgtgaaatagaatctggagagaaacgcacccaacagtcaccaggggctgtcctggttgagggaggaatggggatgatcaggtggtggcttgcaaacatttttgatccctcaggagaaatacgcttcatttcaaccacctggtacacacacatacacatgctcacacatacactcccacatacacatatgcacacacactcactcacacgtgataggtataactgaagccaaagttgcagaaactccagctaccctaggtgaaatgtacgctgctattcttactgtgtttattttatttcattcttccaattattgacttgattattgacttgattccaattattgacagattattgacttgatctgataaattgatttcatgccccgctgctgggccctgatttatagtttgaaagctcctgctctgagggagggtttgcattttctgctctgtgttcttctgtttttaaaatttaatatggaggatggattcaactattgtctttgtaatttttcacttaaaaataaagggagagagagggagcaatgggaaaatacaaaacaataaaagtcaaacaggcttcctgaaggcagctcagcaaaatgcggcaaaacagatctctttaaaggtgtacatacttctcgtcggagctgcttcactttaagacacgttactagctggggtaaccgggtacagagctgcgctcataggctgctgaccccgactttgtttgtaataatgaaacatccctaacatctgggatgcccacacatggacccctgctggtcatccaattgagtgcgatgcgcggctattcaagacttatttatggacacggaaagaagggtgcaggaaagaaggggcgccctgggattaagaagttactggcaggctacaaaagtataacaccaccctgcccttgttttcaaaatatgtatttgcaagtgtgagggagagggacacagagagacaagtgtggagtgagggggctccacacgcaggaagagttgggttggttttagttccttctcggagttctgttgtatcggcaatgagcttgcattgctttcataggggacattttcaaggaaaagagagaaagaagaaaggaaaggaagaaacagaaaaagaaggaggggaaagtaagagagaaagaaaaggaaagatgaaggggaagcagggaggaagggaaggaagaagagagaaataaaaaaagtgggggtggtgggacttccctggagctgcgaccagagcgagtgcggcccgtgcggggagtggctggcgctgcaggtcccggcgctgcggcgcgaaagcgctttttggagtttcgatctgggaagctccaggaagcccagggggcgcaggctttccgggtaggagaggtcgcttggcgcgtccaaggggacccccaagccaccggtagggacgcggagcggctggagcggtctctgctgggccgggaggctgacgctgtcccaggccaccctccgcgccaccaagctccagtcccggccagccgcgcgtgcggggaggtcagggaggactctcccaggcgccgggccgcgtccctgccgcgatctcctttgcttcctggcggtttcgggatgagaaggagcgttcgcggaggtaggtaggggttggtggtagtggggaggagatgcagaaatttcgtgggtgccaaagttttctttaaagttatttttcaattgagatacttttaaaggaaaaaaaaatccacaaatttaggatgtcagtttcaaaaagtttttacggaggagcagcgcgggggctgggcgcagaattagggacgccgttggctgaacgggggcgtctcttccatcctgcctgccgcgcccctctgcacccctacccaaccctgccatgtacacccgcgctcacatccaagcgcgcaaaccgacactactcacccccacccccggcgaccctgacaatcctgggttcccaggcattgtcctggcgcgccagggaagttgccgtgcccagtcccctcacctggatccgtacactcccgcctcagcggctttcactgtgtcccccacctttcacttaatgttcaaggtttcgctggcacaggggctgcgggctaagctaatcccgcgtcccccgggtcgccctcactccgggcgcaacaggcgagacagtgagggcggggattgcgcgagagcgagcccctggccgtgactgcaagaggggacctgtgcctaaggccccgaatccccgccccagccctggaatccaccattcacctctccctggtctctctctcttcatcccagcggcctcccacctctgcttcccagcacggagcgggtggtggggtttgactggagcttggggaagcggaggagggacaggaggaggggggtcctgggcagggggcgcacccagcagcacgctggcccggcagtaggagccgcagctggagtgagggcgcccctctgccaaggcgcgcctccagcggacctcagctgcctggagcgggtgggcaagaggcaaggttgcaggtgccggaagggggccagggaggagtcaggtgcgcagtggtgcctgcagcggtcgggagccaggctgtaccgggtccaaagcccctctcgccctccacctcacccaaccccctccacacaccgccggatactcagttaagttggatcggcggctgcaggggcagctgcatctgttcggtctgtgtgtgcgcgcgcgggagcaagagagggcccccttgcctctcccgccgctttccaggatcccgcggcgctccgctacctcgctcttctcccgcagctaagttccccgtccaggtgggtgcgtgcggttgtaggagcgccccgggcaccgccgcagaccctcttcctcctccatcctcctccagcgcccctgccagcctaggctccttcccgtcccgcttcccaaggtcactatggggacgcgagggagggatttgtgtttaattcctgccgctattcagagggaaaagaaaataaagggaccaaaggcaaccagaaagcagtttacctcaagcctttattattgtagattgaaagaagtttatatacaggaaatatttccagcaaaacactcaccaaatggccttcgaatcaggggccctccacctcccagccccacaatcagcagctctgcctaggactcccctcacttggggacctcaggctctccccccacctctctttccccggactccatcaccccaacgtcattccccaggagtctcagctttttctctctccctggggcgctgcgaacctcgccaatgcctctcaagctatcttcctctggtcccaaagcagacaccccaacttccctcccatttaaggtggttacctcacggaaacccagagcaccctccccctcaaggtttaggtgctgctttgaggcccctgcaattcagaactagctcgtggtcaagaccagttagagatagttcgtcatcagcagtggggctcctgtgcacccaaaacaagcgggggaaactaccctgcccacccctccccatccmcgacatcacttcccctaccagggacaggaaacagacacaaaagcaacagggaaccccctctccgcgcgcgacaggtgggtgccaggcaactagctcagctgagctgagagtctcctggaacccagctgcgctcakggcgcgcgggcgtggccaaggtctctgtgcagctgcgggaagcaccgggccaaagcacttggctgagggcacgctggggagggggtgtaagaaaatgctgtagaggcaaagtcctgggggcacacggacaagggcaagccatatcccgcgctcaaaagaggatttccagtgagccaggcaggtgtgaatgagacagttacagaagcagagtcccagggaggtaggggagattgttcatgtggctgagggtgcagactcagtctgaaatggtggctcagcacatcagtgtcactggggcctcgccaagcgtgacttggtttgaggcgcttgcacgtgggcttcgaaggctcgaaggcccagcccaccaagttcagtcaattgtccgttggatgtttacaccctccggggccgagcgccgtgcagttgctcatcatagcgttccaaccaagtgcgcagctcagagacctggtagccgtcggggccacggccgccctggtacataatagtgccactctggatgacatagagacgctcgaagtaggcgccataggccgagctgctggagttggccatggtgtcgaggaccagagcgcagccgggtgcaccttgctgcagtaccctcgctgcgctgacccggtcctccaggctccggtgctgtgggatgatgtagggagagtccgtggtgacccagccgtcggaggggtgcgcttcctcgatgtagatgatgaggaagtcgacgtcgcgctggtacttagtgaccaggcgctggaaggcgctcatgcgcgccatgaacggtggtcaggtgcagctgccgaaattgagaaccagcgggcggttcccttgcgcgtagtcgaggatgtgctggctctggaagccgtcgggcagaaccacctcggagttgggcgccggaccgccctcgtgcgcctgcttgaagaaatccaacttctggccatgccacaccgccttgagcgacgccagggtgcacaggcggttgtcgtcggacacgcagatgggcgggtcatcgggaggcacctcctcgccttcactgttgagctccacttcgggctcgggctgcccccggcggcggcggcccaggaaatgcttgcggatacacaagaaatcgagaagccagagcatgaaggccgtgccgaggaagcgcgggaagagcacgaggcacgaggcggtctgggcgcagagcctcaaggagtgaagcagcagggagcggagcatggtggctgcaggccccgaagccccctgggacccctcgccctctccgaccaccaaccgcgacgtggcctggcgaggcatctgggcttcagcagtgcagggagttcaatttatagcggaggcttcaattggcgggagactccacctccggcccggcccgcccccttgcaacttgagcccggagggatcacccagcagcgcggccaatgccctagaaatcttgggctgagggcgggcgcaggcgggcggagggcggagcggccgggcctggggccggtgggggcgggcccgggccccgcagccagctctcgggggcgggggactccggcagccgctgccgctggggaccgggagcccgaccagggacctgggcgtccgctggggaggtcctccagctggcgcgagcgctgcgcgccgccctggtccccgccgcctggctccggcccgcgcccccctcgccgcgcacctgagccgagctccccggcggccgccgagccgcgccggagctccggttcgcttcccgcgcgccgccgccaacgccgcccacgccgctgccgctcgtgcggggccgctgcccaggtgccgcgggaggccgggtccgcggccgccgcttcggtggccccggctcccgccccaccgaggacgcgggccagcgaggaggcaactttgcgttcccgccgccttcctggctcgcccgcgggcgccgctcgcctgccggagcccgcccgcccgcctcccgcgcgcgctcacactcgcgcctcgcacacggccgccccccgcaccgccccgccacgcacaccgcggtccgcgccccccgccgctgcccgaggctgccgcgcgccgccccagcccgcgccgccctggccgcgcccgccccgtcccatctcgttccagcggggcgccgcggttcctgggtcagcggccgccggggccgggctgagaggtgcggagggcagagcccgcgggcgggttaccgccgggcgccggagaccggagagctggggaaagcggcgccggccctgcgcccccagccgacccgggcgcggggcgccacgggcgtggggcgcggggcagcgggcgcggggcggcgccggccccgggcggctctcccactaggggtagctgttgcctgaacgccggagcgctcccctctcgccgcttgcctcgcccagcgcagccccggccgctgggcgcacccgtcccgttcgtccccggacgttgctctctaccccgggaacgtcgagactggagcgcccgaactgagccaccttcgcggaccccgagagcggcggcgcgactcaccgcggaggcgcccggacgcgtcaagtgcgtactttcaaccgtaaatgggtgctgagcgtttaggggtgcggggcaactccctaactcgtggggccctggccggccctgccgcggcgtccgagaccttctgatccctcgctgcgcgcggcgcggggttggcgacttgggctcaggggcggcggggcggggaggtgccttgacctagggacccagaggccgggagcaagtctcctttcgccttggactgcagtgtcccccagggcaaggcctgaaccaggtcgcgagggtctgtctcccgtctggggagctgaactgcccgagacactgtcgcagtcgcggggacttgtctggagcggcggggtctgagcccaagtcggaagccgccgccgccgccagcgtcccgtgcgcctgccgccccgggaccagccgcgaaacttcttctcgggacggagacagcgctcgccgcccgggccgaggtaggagctggctgggctcggtagagcgcgggcgaatcgctttcggcagcgaaggaacgtgtcgggagaagccaactgcaggaccagggccccagcgggcgcgcagagacgcctgccttgggcggaggtccccccctccggttttcgtggctctggtagggccctctgtcccgtgagctcctcactggacctgaggctacaggcttcagcaggtcaagcgcccgagtgtgcctggaggattggcggcggggtggcatgagaaggtggcccctcttctccatctcccagtcaggcgatttctctgctgtctggggcaggggcgcacaccccaggaacttactacgtagagggaagccagcctggtctctcccccttgcgtcagtgctcctaagctgcccctcaccactctgggtaggggtctttcaggtgggctagggaattctccttggaagtccccttgtttgctcccctccatcagggcacctctgagttagccaatcatcctcttttctggcctcttttttgcggggaggagagtagagagagaagcctcctactcggcaggtctctgagaggaggtttgggggggcttctgaggttgctcctcctgggcagagtcaaggggtgttgagggttccaacttttactggacaatctctcaagctctgattccctgatttctgggaggtgtcagtgtagggcttgtgtcctgccccacccacacagcatttggtgcaggcacatgggatggttccccaagcccttttcccacagttagtttcagaaaatgcataagccacctaaggctgggagagcctttctgtgctggctgagatctggtggcatgtgcatgcatatgtgtgcaagtgtgtgtgtgtgtgtgcaagtgtgtgtgcgcatgtgcatgtgtgtggaaagtatggtctgggtggctgtaagactggcccctcttgtcccctctgcaggcccagcccaatargaagcacctgatccacactctttctagccccagggatgctcaggaaagcagcctttctttagggctgtcatctgttctggggatctgttgctgtttcttgggcccacagaatacactccacacctcgggactccataatattggacaaggctggaaggcccatttggctcctgcagcctcttatgcaggtgaggacagacccaaggtccaggcaatgctggcctttggaacacagaacctggctcactgactcccactccagttgtcttttccctctgcctctggagcaaccctctctcctccagagcaacccctgtccctccttcctacctctctctagggctgcacccccagctcaccttagacctggcccttcctacctgttgcccctactgtcttgtcccatcccagtggtcaggagggagagtactggccaaaggcccagctccacctgtgacttaggggagtgccaggcatcacccagaggtcccggccctcgggggcctggcaggctctgctgtgggggaagcagagttagaactggggctgcttctcctgtcccccagcctggctgggcctcccccacctccctttctgcctgccctcttacaactccagcagggggcgggcaggggaaagaaaaggagggacaagttggatggggtccatttggtgtccaggaacaacttggagagaggcggggaggggacaggcagcagggccctggcagagccaggggagggctggcctttggatggccttctgatcccaagcccatcctcctggggcagtcttcccttgaaagggagggtttggtgaaccctggtgcggacccccccgccggacctcactgccccagtgcggggcgtggtaggcgggtttgcaatgggtacagcctctctctccattccagtagagcagctcccagggcccagagaggctgtcactgagacttccctctggggtggggtgggttctggtggccctgtgttcccctgcaggaggacctcctgaggcttcgggcaggagctggtgcacacctggaggagagtgctggtgaatggcaggtgtgtgcctcagtgtccttgctgccagggtgtcagccctgcttcaccactggccgtttgtctctgtcccctccactggcctcttgaagcacagagaccctccgggtactttccttcctctgggcttccactcatgctattccctgctccctttttctacctggagacccccattcctcctcctcctctgctgccctcacctccacctgggccctcccagctcccgggagatggctgaaccccactccccacccgctagtcatcctcttcagcggtcctcccagagctgtcctcagcatggcagcctccacagcccctgggtgtcacccccggtttcgtgtctgcctcggactccagacctgcccctcccaggctggcccagatggatcctctacagtgactaacccaaaccagcaccaggcagggacccaataaacctttgtgaatggagtaaatgagtgcggtgtgtacttactgaaaactccttgtttggggagaaactcagggtatttcactctgtccttttgcgcacctgcagcagtgagctggggcggcatgttggcagccagggctgagcacggtgggtcaggacctgccgctgtgagcagacaacacttcctgggaagtccccttggggcgtggtgtctggtgaatgcacccatcacctggtcactgggccaatccgtttccctttctgggctaaacaggtcttcccacgggtacctgggccctcccacggaggtatttacccttctcatttactttaagaatgaattcttctatccaaacacttggctaggttgatcatggggacaccctgcaggggatggggtgggagatggctgagggacccagagctctggtctgagcggtgtcctcaacatggcagacctccatccctctgggagtttgaggcaggcacaggggaggtggcgggactctggggtgactgggcaggctgggatcccagccaggacagcttgtcagggccccagggcctggatctagcagaggtgtttggcagcatttgggggttggagaaggtctggggctcccggccaaggagaggagaaggcctaggaggcagtgccctggctacttgctgtgtgaccctgtgcatctctggccccttcctcaggtctcgtctgcatcaggagtgggttgggtggtgactttccagtgccttccccatgggtcattctgcacgccagaaggtcctaggaagttctaggagacgctattctggccctacctgctgttctgcggctgctgagagccccacttgaggacgaaggtgccccagtgctggtcctacctggcctcatgctctgccacttccacccagtaccgccttcgcctgcccgcttcctgccgcagctcagggccctccagcccggcctgggctctgacttgttcctggcatgagtgctactgtgctccctggtgctcagccagaccccagggcacaggatgatgccttgccagaggttgcctgtgggtgcctgggtcctgcctggagctgggtggggcactgggatgctgggctacttgtgccaagacagatcttgctctgagccgggccctgaggctggctggagggccaccttgcgagtcagtccctcctttccatctgtgatcctctctggaaaaaggtggggttcaaccgaccagcagataggcatcccaggtccatgtgcttctctgagcctcagtttcttcactggagaggcgggcctaatgtttgaatgtgttgtgttcaccatgacatgaggggcaagtgtaaagtctatatgtgtgcctgtgtgagttcgtgtgtgtgtgtatgtgtacgtgtgtatatgtgtgtgtgtatgtgtgtgtatgtgtgtatgtgtatgtgtgtgtatgtgtatgtgtgtatgtgtatgtgtgtgtatgtgtgtatgtgtgtatgtgtgtgtacgtgtgtgtacgtgtgtatgtgtgtatgtgtatgtatgtgtgtgtatgtgtgtgtatgtgtgtgtatgtgtatgtgtgtgtgtgtgtgtgtgtgtgtgtgtgtgtgtctgtttacttaaacccagccttgttccagagtggatttcaggattcctctaagaagctttggaatgccagaagataccacaagtgagaagaaaaaataaaacaagaggaaggatatacttcccataaggggacaaagtacagccgcagtgtcctccgcttgggccatggaacagctgcaggttttgccctgattaccctggtggtaaagtctgattggctatgattcccggtgtccagaagataaacacgggcggtgcagcggagccacacgcatgcctgtgcatggccacgccaggtcggaaacccagcccctctgcttgggaggcacgcagggctctggctgaagcctgaag

SEQ ID NO: 95987 - DNA, 45454 bp, Homo sapiens
  misc_feature (1)...(45454): n = A,T,C or G
gctgattgtgccactgcaccactgaacaccagcctgggcaacagagggagattctgtctctaaaaaaacttttttaataaaaaataaaggtggccgggcgcagtggctcatgtctgtaatcctcatactttgggaggctgaggtgggtggattacttgaggtcaggagtttgagaccagcctggccaacatggcaaaaccctgtctctactaaaaatgcaaaaattagccgtgggtggtggtgggcgcctgtaatcccagctatgcaggatgctgtggcaggagaatcacttgaacccaggaagcggcggttgcagtgagctgattgagccactgcactccggcctgggcaacagagcaagactccatttcaaaaaataaaataaaaaattaaaaaagggagtgggagtcagggtgcagagagaattttggcaacctgcacttctgtaaacattgacaagttaaacaaagcttaagtcttgctggtctggccacctagtgtgggagaagagaaatgaaaccatcagtcccaagtgaatttgagtctacactttctgagtcccatagcacatgaggatggtcaggttaaactcttagttaacagtctcagagataatctccctgcacttggctttcccattcaatctctcctacatacgttaacagattaatcttagtgaatcttagctctgaccttgttgttcctcaactaaagaagtttctctcgcttcccatggactcaagagtaaaatctcaatacaatctgcagcctagctttcaaggaactgtgatagatataaaaagaaatgaactttgggacagaagacctgggtccaaacattggttctgacaattacatgggacttgggtcaggttattttaattctcagagtcaattacctcacctgtacaatgtagctaagactcattttcacacagctgttgtgagagataaataagacaacatatgtctggtgcctcactcaatttcctactttccttactttacaatccagtttcaacctactttcttttttttttttttttttttttttttgagatggagtcttgctctgtagtgcaggctggagtgcagtggcacgatctcggctcactgcaacctctgcctcccgggttcacgtcattctcctgcctcagcctcccgaaaagctgggactacaggcgcccgccaccatggccggctaattttttgtatttttagtagagacggggtttcaccatgttagccaggatggtttcgatctcctgacctcgtgatccacccgcctcagcctcccaaagtgctgggattacaggtgtgagccacagcgcctggcctcaacctactttctaacattccttacattccttctgttagtatttctcttcatgcactgtttgttctagccagacagaattgcttacttccctggtatctctccagatgctttggagatctctgcctaggttcatttgccatttcattgtatgcatccagaaaatattcattaagtgtctgctatgtgccaggcactcttccagaacctggagatcctaaagtgaacaagttacatagagttatccttctagattgtggtccccctctatagactgctcttttcctttacacattgaaattcaaactctttcaaaatttaacacaaatgcttcctctttcatgcattcattcaacaagtacttgctgaacacttactgtgtgcagagtcctggcttaggcagtaaggatacaattgtgaaaaaggtaccattcattcagcatgtgggctgtggaggacatggacaagtaaagaggctataatgagggtactatacaaaagtacccaagaggagatgatgtttccccttccacacatcacagcacacacaggaagagactgctcttgactgcaggtgactcgccaggatgtctagctgccccaggccctaccaccccaaggattgaggggctggctgtctcagcacaccagtaggagattcaagaaatactaggccaggcgcagtggctcatgcctgtaatcccaacactttgagaaactgaggtgggagagtcacttgagcccacgagtttcagaccctaacctgctgggattgcaggcgtgaaccaccgtgcctggccaagaaatactcttaaaatgaataaagtcatgctaaagagcatttactgtgtgctagacactgttccaggggctagtgaacacagaacctgcccttaagaagctcttactgtagtggaacagacagacaaatggacaaacaataacaatagagccataccctggtatactcaagggattggttccaggaaccgcctcccccacgtccccaaccttccaaggataccaaaatctgcatatactccgcacatactcaagtcctgcatatggtcctccatatccatggggtttgcatcccaagaacactgtgttttccatctgcctttggctgcataatatctgtgtatagatggactagtgcagttcaaacccacgttgttcaagggtcaactgtactttcagatacatgagattaactcagagagttatgagatcacagagggggatcttacccagatttgagaagtcagaaatttccaggatggtaaaatataagtttagaccttcaagtaggtggagggattggaaagtgggaaaggcattgcagagagaagagagtatggtagaggaccaggaagtgaggtaatcgtggcacattttcttttgctagccccataaaccctttgttcaatatgtcatctctttcacatctctgtgctttgcctatgctccccttccctgcctggctaactcatgctttgggagtcaattcaaagttcacctccattgtaaaagacttcctgaggcaaattatttatttcctgcttctttctgatcccttaatttatgagccaaaaacctgaacacattgtctgacagtgaattatttttctgatatgtaaattaattttattagaagctatagatatgaaaattaaatcatgtttttattcatttaacaagctgcctttaataaagaaaaaatagctctcagcttttggctcggaggaggccaaggtgcaactttcttcggtcatcccgaatccgggttcattcgacaccagctgcctccaccatgccgccaaagttcgaccccaacgagatcaaagttgtatacctgaggtgcactggaggtgaagtcggtgccacttctgccctggcccccaagatcggccccctgggtctgtctccaaaaaaggttggtgatgacattgccaaggcaacgggtgactggaagggcctgaggattacagtgaaactaaccactcagaacagacaggcccagattgaggtggtgccttctgcctctgctctgatcatcaaagccctcaaagaaccaccgagagagaaagaaacagaaaaacattaaacacagtgggaatatcacttttgatgagatcgtcaacattgctcaacagatgcggcactgatccttagccagagaactctctggaaccattaaagagatcctggggactgcccagtctgtgggctgtaatgttgatggccagcaccctcatgacatcatagatgacatcaacagtggtgctgtggaatgcccagctagttaagcacaaaggaaaatatttcaataaaggatcatttgacaactagaaaaaaaagaaaaaccatcaaatattatatacagtatgttattattttttatattcatctactgtccaaattgatggcaatgttgtatatatactaatttaaataattcatattgttaaaaactgtttattcatttttaaatttaaatttaattttttttgagacagaacctccacccaggctgaagtgcagtagcgtgatcttggctcactgcaacctctgcctcccaggttcaagtgaccctcctgcctcagcctcccaagtagctgggattacaggtgcctgccaccacactaatttttgtatttttagtagagatggggtttcaccgtgttggccaggctgatctcaaactcctgacctgaagtgattcacccgcctcagcctcccaaagtgctgggattaaggcatgagctaccatacccagtctaattttaattttaagtttttttggtatatagtaggtgtatatatttatggggtacctgagatgttttgatataggcatccaatgtgaaataagcacatcatggagaatggggttatccataccctcaatcatttatcctttgagttataaacaatccagttacactcttttaaaatatacaattattattgactatagtcaccctattgtgctctcgaatagtatgtcttattcaggctactttttttgtacccattaaccacccccatctcaaaaaagaaaaaaataaagagagatgggatttcctcgtattacccatgctgatcttgaactcctgggctcaagtgatcctcccatcttggccttccacagtgctggaattgcaggtgtgagccaccatccccagcctgtgatccatttttaattaagtttgtgtatgctgtgaggtaggggatcatagttcatttttcccacatagggatatctattttcttcatcaccttttattgaaaataacttgccttccccactaaattaaattggtgtcttcattgaaatggagtaataatcaaatggctcttttcctggaccctctattccgttccatctatttgtctgccattatgccaaaaccccactctagtgtatagtaaggggggatattttggaagatcaacaaatttatcttgtgtaacttacttttatgtatgcataagaatatttggtttaaaaatctggttaagtctaaaagagctctttcagtaataattaaataactgaatccctgtaatccaccatgctcagccccattagtaatttttatagcgtctttatttggatctagctctttcatcttgtgtaactcttttaagtaaatgactcctcccttctggtacaggttgaatatccataaaagggtgccttggcatgtgctcagtcctgaaattctactttgatctactgctctcatctttgaaactgctctaaacactcccccaaattattgatcctatgggcctgattatgaacttggctcttctgacaatacttctcaaatcctgtacctttggtaacatctctcctgactggcagagtacccagacacttaattaatgctgatgaaaattaagatttaagcaaagaagaaattggtgtaagaatgcaagccttaggatctgaaacttgatgactgtgggatctaacttctgcttcttttgctacaagctctgtttttgaataatcaactttcaaagacaaattgcttgatgaatctctgtattgtcagaatgtttctttgatttcccatcaaagccatgtatgtgtaactagtaattaggtacctacgacctgaatataaattatcattatttcagtagccctttatttgtttttgagaaagggtttcactatactgcccaggctaaacttgaactccttggttcaagtgatcctgccgcctcagcctcctgaatagctgggagtagctgggactacagggatgtgttatcatgcccagtgaaagccctttatttttaaaagttcattttcctgatctttacatgtattttaatactaaaattaaatttaaaaattttaaaaagtacctactaaccaaataatgccacccaataacaatagcattatttgtattatgttctggtaatatagtggtgaacaaggaagacagggtctctgataactgtggaattctccttgatcacttctcaagcctctcttccggatactatttcttggatctacagctgtcttccttccccacttctgtagttcagtctctcattattctctacctccaataaaaaggggcctcctaactggtttcttatgcaactactcaacatggtatttctaaaatgcagatctttygggatgattttcaattgctcagagaataaattccttgactttctacgtaaggccctgcaggaccaggcccctgtcattatctctgagcactctccatcttgcacccaaagccccagcartatcttactgctttcrgtaaatacacaccgggctatgtggggttttgtctggggaaaggggatgtgagttgtaactaagagatttatastcaatcttgaagggaagagctcatattggaggcaatggaatgcctcaagctggctctgaaagtacacattttttccagtcataagtagatcacatttgtgtgatcttgtgatcctctctctagcagagccgtgcagactacctacttccggccctttcttgccccacgaaatttcacatcacaacgacttgtggttttaatcctccgtttttctgcttctgaagttacttcagcctggcaagtcctttacctccccgtaggcctggcgagctgcatcacaacattcaagattcaccctagagccatctgggaaactttcttctccaggtcgccctgcgtcctcgcctccccaccccgttcttctcgagtcgggtgagctgtctagttccatcacggccggcacggccgcaggggtggccggttatttactgctctactgggcccgtgarcagtctggcgagccragcagttgccgacgcccggcacaatccgctgcacgtagcaggarcctcaggtccaggccggaagtgaaagggcagggtgtgggtcctcctggggtcgcaggcgcagagccgcctctggtcacgtgattcgccgataagtcacgggggcgccrctcacctgaccagggtctcacgtggccagccccctccgagaggggagaccagcgggccaygacaagytccaggctttggttttcgctgctgctggcggcagcgttcgcaggacgggcgacggccctctggycctgrcctcagaacttccaaacctccgaccagcgctacgtcckttacccgaacaactttcaattccagtacgatgtcagctcggccgcgcagcccggctgctcagtcctcgacgaggccttccagcgctatcgtgacctgcttttcggttccgggtcttggccccgtccttacctcacaggtgagtcggacttgtcccgccctgttcctgggccctgagagtgcctgcctggggacagttcccccagggctccagagacgccctatgggcttttgtccagccctctgatcacaggcactccacttcctcctcgagctgcattaggttttcatccaaagataactactataggactacggttcaatcaggagattaatttatggaaaatactgtgccagcagaaatctaaggtgatccttctgaccgtgttcaagctagccagggtcctagtgagactgtgagcaagggctgagtagagaccagagaaaacactcaaaattggggagacataatacaagaactatgcaaagttacatacaagtttctggcacatagaatgtttggcgggcggatcacgaggtcaggagttcgagaccagcccggccaacatagtgaaaccccgtctctaccaaaaacacaaaaaattagccaggcgtggcggcgcgcgcctgtagtcccagctactcgggatgctgaggcaggagaatcggttgaacccatgaggtggaggttgtggtgagctgagatcgcgccactgcactccagcctgggcaacagagcaagactccctctcagaaaaacaaccccccccccaaacaaaacaaaacaaaacaaaaaaagtgtaaattgtgaaagaaatcatagaacataaggaagtgagtttccagcggccacttggaatgggatggtagatgtaattagccgggactgaaaagagggtattccaggcaggaagaagggcttgagcagaggcacaaagaattatgattgagttcaaagttcaggtctagtggatgtgatgagttggggctggggattgaggagggatgagggtggggaaaatgtggggttgaagagtcaagagcgctttagacattggtttcacataaaatggaaggggctaacagttttcttttaggcagctatgtaatcagtactgaaaattgtatttgaggataattattccacagcacatttgtaagtcgagccaacaatgtaaaggaatacaattctgctgcatgggttcaaaatttagaagtttcttgataatctggaatctagctctttggttatattgtatagatgttatgggggtgggagccacatttacggttaagtcttgtagtaatatcattttatatgatgtttcaagtgtgtttaaattactttcacaaaagttatcatttgatatatagaattaaaagcatttaattatacagatgacccttagagagtgacatttgatttggggaaagaaacacaatctcagcatcagggtagtccttaactggtaaaatgcattaagctggagaggataagaggcctgctgttgagtgtggtagatcacattttcctctgaatccttcatgacaaataatagagtgccttacccaagattggcactcagaatatgttgattttggtttagaagagtttgagcctggtttatggaaaaaaaaatccgtctaactggtatatgtcaatcccagtgctgggcactctgaaggttacaagaaaagtcttaagacctaggcctaggctctatagttcaattgcgaaaatatgaaacagagggaggtacacagtgaattataagattctcaaaagctttataggttgtttcctactattgtatacatgagaataattcctttcctttttttttttttttttgagacggagtctcgctttatcactcagcctacactgaggctgagtgcagtgatacgatcttggctcactgcagcctccgcctcctgggttcaagcgattctcctgcctcagcctcccgagtaggtgggactacacgtgcttgccaccacgcccagctaatttttgtatttttagtagagatggggtttcaccatgttggccaggctggtctcaaactcctggcctcaagtgatccacccacctcagcctcccaaagtgctgagattacaggcatgagccaccgcgccatacctaattcctatacttctaaattaggccttcacctccattgctatagcaccatagtttaatcaagtagatagaaatggagagattgtaagataatggaatactataaattccctaacaaaagagatttagagccagataaattcaataagatgtttatttccatatattaccttcctgtaagttcattagctttattagttgagggttcttgtccattgagagaaaatgaaaactgggttgggtgaacattaccaaagacttaaaagtaacttctttctctattgctcttcccatggagtcttccctttggaatgtagtttcctgtggaggcttttaggtgactttgagctaaaatcctagttctgcagaaacaaggatgaagcaatagcatgggaaacaaatagaggtagagcaataccaacaaggctgaagccagaatacatttctttatgagtctgattttagtaaagaaggcaacatatgcaggttaaatcttaactaacagatttccatcctcttcctccaaacaacttatttgtaggctctgggccagtaggttttgtttgtttgtttgtttttgtttttttgagacagaatcttgcttagtcacctaggctggagttcagtggcacaatcttggctcactgcaacctctgcctcccggtctcaagcaattctcccacctcagcctcctgagtagctgggaccacaggagcatgccaccacacctggctaatttttgtattttctgtagatggggtttcgccatgttgcccaagctggtctccaattcctgagctcaagtgatccccctgccttggcctaccaaagtcctgggattacagggtggaatgagccacctgaccagcccagtgtttttcctaatgcaatacaacttctggtttttgtctgaacctgaaactaagaattcatactcccttttctgaaaaagaagtctggtattgaggttcagttctattttgaattcaccttcaagggttagtcccaccagttgctaaatggtctgtgaaggtgtttagtatttgccacctttctttgtcattgagaggtgtttctaccaattggagggtgtgtgttgcatgttgttgaacctgttaaatagacttattttaggaactagatacttgaatgaatctagttccctgtttgattattaagccacatcctgtttgcaaagcaaagatgtgattatttggaatttggaatggcacccatctaatgttgctccagacatttaataagcatggtgtggagcatggtgcttgatggagctgataaagtccaaatttttccaagtaaagtggctaagtctaattctgccattaractgcatttttttttttttttgagatggagtcttgctctgttgcccaggctggaatgcagtggtgtgattttgactcactgcaacctccacctcctgggttcaagtgattatcctgcctcagcctcccaagtagctgggaattcaggcacccaccaccatgcctggctaattttttattttttagtagagacggggtttagtagcgatggggtttcaccacgttggccagactggtctcgaactcctggcctcatgtgatctgcccacctcaagattacaggtgtgagccactgcgcctggccatgactgcattcttctttgcttttcctgaaactggttgatagaagccatagtatatcatagatattataaggttcccatcctggtctgatgttcacctgcacatccctgtgagttgctgaggatgccattgtccttcaacagaataatcctgccccccttctccagcccttttattctggaatggaagtaagattattatataagagcctgtgtccttctgcagccattatcagtatttgatttgctcatcctcagatattaaagaagtgactaaattaataaatggcatagttcattataatctggatctcctaaaataccttctttggccatttcttctgtatctggaaygttgtagatatgtagtaattatttgtaaaatatattaacgttaaagagctactttgtgtaaacatttgtaagaaggctttatgggtttgggttttgttttcttttttttyttttttttttttcttttagagacagggtcttgttttgtcacccagtctggagtgcagtggcacaaacacagcccactgcagcctcgacctccgaggctcaagctgtcctcccatctcagcctcttgagtagctgggactacaggtgcatagctaatttttgtagagatggagtaccaccatgttgccccagctggtctcgaacccctgggctcaaccactctgcctgcttcagccacccaaagtgttgggattacaggtctgagaagatcatcaaaaagatatgatttgcaggttttcattgaggattacctttcctttcaggttaccaatttggagtgtaagtgtgtgattccaggcaaaggataatcacactatgctgcttattgtgtgatcccaactcgtgctgctcttaactcagcatgcagtgagagatgcattgggattgcatctaggagggaaacagataaggtcaagcagctgggctggggagaaagaataaggccgattagttctctccactttaattgggctagcggctaactatactttaacctttcccacggcaaagacaaggcatattcctgccaaagatgattgccactaagtttattgttttaaaagcaaagaggaagaaaacaacacgggaagaaggttttgtagtagaattactttttctcatgaaggggtttctggagaacgagggatacataggagaaatacagtgatgaataaattgtctttagaaagaaggtgatggcagaagcacagtttttagttgaagggcaaaataagtgtcatatttcattttgaatcccagggcctagattagcttggcctgcagtcttccaccagcctctcttctcacagccctgtttttttcttttcttttctttctttttttttttcttttttttttttaagaaacaggtctttctctgtcattcagactggagtgcagtggtgtgatcacggcttacagcaacctcgaactccaggactcaagcagtcttcccgcctcactgatgagtagctaggactacagacgcatgccaccgcacccagctaatttttttattttttgcattttgtagagatgggggtcttactgtgttgcccaggctggtcttgaacccctggcttcaagcgatcctcttgtctcggcctccccgagtgctgagattacaggtgtgagccaccatttattacctaaagcatgatacttttctagtatccctgtatagtactgagtccaagaagctaaacttgatcaaggtgtatgtgggtagcctgggcctggtttatgaaaaatttgagttttatttctgtgagctgtaggtgttcccctgctttggatattctgtttgaacacagtatacattggaggactcaggatgtggaacatgattcattcaggagtcagctgagaaagtgtttattaaccccttaactctgtgccttcagactaattgcctaatttccaagctgttgctgctacttcctttttttttttttttttttaactctgcctgccttccagacatttccgaggataacaagaaaatagttatgaatgttttttcagtctttaagggagggtataatagtgggaagaacttggtgattttaaaaataaaacaataaaaattaaaagtccaagccccagagatgcctttccttccatttccttctaccccagttccttacctccaaacaggagcgagaagcatagcattggaaggtttttgacaatggataccttgtcgttttgttgttgtttgtttttaaccgtctcatgctagggcatgttgtctgtttcttagcctgttcaaggcataagcctcaatccctttcctgttgttatatagagggaaaggagttttacagccttaccagtacttcttttaagaaataaagctgggcatggtgtctcatgcctatagtcccagctactccagaggctgaggtgggaggatggcttgagctcaggaggtggaggttgcagttagctgagatcgtgtcattgcactccagcctggacaacagagccagaccttgtctcaaacaaacaaacaaacaaacaaaaacctagaaacaaaaacaaaagaaagggatcactcttatgtttctgcagtttcctaaatttcttctactggtcctgaaaataagtgataaaatagagtcaatttgcatcatcctcaagaggttccatgacctttttggagccactgacaacaaagtcagctgaagaaaggaggttgggtnnnnnnnnnnnnnnnnnnnnctgtaggggtcagagaggtgtatgtgtgaagagttttctgtggtgtgagctgtctcaaggtttacatgtttacagtccattgtaatacagaaatggattatattttcttctgtattcctggctgtaatgaataaaacccattattgggtcaggaacttgagtcttctctcttcttgtcctttgttcctgtttcaagctgtggcatttgcttaagcttcctggccacacactcagccctgatccccagccaactgctgtatgctattgttgtgtccacatcttgaggctggttaggcttgggtgtggtgtagagctcctttctgtggaagcgtatactcaaaaatacaggacgtatgggtgtttgtcagctgtcattaagcagccttccccttcttttgtaaagctcttgggattgagggggtaagagagatgccttactaggtacactgttatgcatgaaaagtttaactacttactgtttgttcaaccttgtccttgttgtaactaggattccacattagtggctttgttgttttgcctggagctgcagtcctaggttgggggagattcagagttctaaggccatgtccctcttgtattttgaagtgtcagcctgttcatatacagaatggcatctcacagtagtgaagccttcagtctcctataagaggctcatgaaaaacccttcagggaagctgctcctagagtgtggctttgccataggagaccctgccccaggactcctctggccaaatgagagagtcgaggtttgctggggcaaaactgtcttattgggaaaagggaagtagaacacggaaggaaactagcatttattgtctggcacttgatgtatgttattgccctttaatcttcataaacagctctgtgaggtcagtgttatcccaatctttgagaatggagacatagaggctaagtaacatgcccagggttacacagcttgtagggatggagcagaaattccagtcatgcataaattttgcttttgtcactgtacagtcttgtartatactcatacacgtctttgtcagtccagttagcaatttggaaaactactggcctctggcaggattaagctctaatcacatcttagtgttaattacttcaaataggtagtaacttctaacatctagttactcataagcactcaggttatgaatattttgatccctggcccattgttaccagattccagtagcatttcttccttcctcccatctattcttagtacaggtagtatttattaagtaactttaattgtcaatagtactaggtccaaggaatattaaattgaacttccccgtccttaaagaatttacagtttctggaagtggggatacagagagtgtgatatttttctatgataactgaagcacaaggtactttgggagtgcagaagaggaacacctgacctaagtgtatggggggaaaaggagaaagtgcacattgaaaaggctttcccagagagctgttgaaggagatctaaaagtagaagttagtgggggtgaagatagtattccgcatagaaagaactgcgcgtggaaaaggcctacaggcgagaagccttcatgccatattcaaggaactcaaggtgtctagctgaagtacacaactctagggtggatcagcaagttctgaagctaaagaggtgatagatggaaaggtcatgaaatggcctaataagccctggtaaggaatggagctttatcctaaggtcaaagaaggccagtaaagtccagtcaacaggataagtgatgtgactaaactctagctacattggggcttgctgtagagtgggattagaggcaggaaacccagttaaaaggctgccaacagtggtctagataagagagagtagtggctgaagttgggttgatggctgtaaggacagagaaaactagaaagactgaagagagatttaggaggtggctgcttggaagtgggagttaggttggagggaaagggtgctgaggatgactcccagatttctgacttagcagtttgaatgttggctctcattcactcgtgctgccattaacaaagatagggaaaatagtaggagaggaagggaaggagtaaaaagagctaaattggtggtcgtggtggctcacacctgtaatcccagcactttgggaggctgaggcaggtggattacctgaggtcgagagttcgagaccagtctgaccaacatggagaaaccccatctctactgaaaatacaaaattagctgggcatagtggtgcattcctgtaatcccagctactctggaggctgaggcagcagaatcgcttgaatccaggaggtggaggttgcagtgagccgagagtgcgccactgcactccagcctgggcaacaggagtgaaactccatctcaaaaaacaaaacaaaaaaaaaacagtgaaattaagaggttgagaggtagagtgagaatcatgaaaagtaaatttgattttgacgtgttgactatgaggtatcwagcaaacagttagctatgtagtactagagcttgggagaatgagtttgaacacttccgaggagaagaaggtccaaaaggcaaccacaggagggtggttgaggaggaggaggaggatgttgttggatgactgctaagccagaacatgggttagttcttcctcttgggtgtgaaaatcatctaggataatagccagccttggggtggagaggaatactgggcaacaggatccaaagtattaagtaaataaggttgggcatggtggctcacacctgtaatcccagcactttgggaggctgaggctgtgggatcacttgaggtcaggagttcgagaccagcttggctaatgtggtgaaaccccgtctaatttgtaaaaatagaaaaattagccaggtgtggtggtgcacacctgtaatcccagctacttaggaggctgaggtaggaggatcacttgagcctgggaggcggagattgcagtgagctgagatcgcgccactgcaccccagcctgggcaacagaggaggactccatctcaaaaaaaaaaaaaaattaagtgaataaagaagtgatcaggaagctacagagtgttgtaacaaggagagctgaagatttaacagctggatgacatgaaccacagaagaaaggtgttttattacttggtggtggtggaatggatgacccagaagcagccccatatctcaaccctatgatgtgggaagtggctgcctctcagagcatgttgtaggggaagtggtgtgtggtattcctggggagagccaggcttcagttagggaggaagtagaagaggctgagtaattaagtaactacacaacaagatctcagagggtttacaaggtgaatgatatgtagtacacaggtggtctggtggagaagaggaagcaacatgtataaaaatagaagtgcaggaccagaagtgagcaaagggggttatatattgggcaaagtgacaaaatatggtagagatatgacatggcggatttccctgacaataagattaccaagaaaatagattccagagacaagcaagcatgtgtatatatgtgggaatttaatatatgatcaaagaagtatttctgatcaaatgtgaaaagatgtattagtcaataaatacctaaggatgactggttatccaattgggaaaaaaataaatccttacctcatatcaaactcaaaagtaaattccagggagattaaagatctgaagataaaagaccattgaagtgttagacagaaatgaaggaaactattattataattttaggggtagaggaggcctttctaagtaagcaaataaagagaccgtaaaggaaaagagtcatagctttgactacataaaaattaaagcaaaagaaagcataaggttaaaaaataagggataaaatgaggcagatatttgcaacaagtcaataaaagaaaagtaactttaaaaagtaaaaagaatggctgggtgccgtggctcacgcctgtagtcccagcactttgggaggccaaggcgggtggatcatgaggtcaggagatctagaccatcctggctaacatggtgaaacatcgtctctactaaaaataataataataataaaaaattagccgggcacggtggcgtgcgcctgtggtcccagctactcaggaggctgaggcaggagaatggcatgaacctgggaggcggagcttgcggtgagccgagatcgcgccattgcactccagcctgggcgacagagcgagactccgtctcaaaaaaaagagtaaaaaaaatttggctagtaaatgcaaagaaatgcttgaggccaagagttcaagaccagcctgggcagcatagtgagaccctgtctctacaaaaaataaaaataaaaattagcctgacatgctggtgcacgcttgtagtcttagctgtttgggaggctgaggcaggaggatcacttgagcctaggaggttgaggctgcagtgagctatgattgtgccactgcactccagcctgggtgacagagcaagaccctgtctctaaaaaaaaaaaaaaaaaaaattaaattaaaacttaaaaagaaatacaaattgaaattgaaacaatgtatgtgtttttttaaatccagctggcaatggtgaaaaagaattgagatgttctagtgttggaaagatgtggagagatgggcccatatatgtggatttgggtgtaagtcagtacagtaacttggaagaggaatttggcagtatcaaaaccaaaacttttcttacctgtggcctagcatttccacctccaagaatttatcctacagatatctttcacaattgcttatatacatatatatgaatatttgtttactagagtgttgtttataatactaaaaacttagaaacattaccgaatgtctacaaacagaagagaagttaggtaagttaatgtatatctcatcattggaattatattcaacatttacaagaaggatgtaaatctatatatattgacattaacagatctacagctcattttggtaaggggaaaaatgttacaaactaatagtattaggatcccattttttttttctgtttttgttttttgttttggggtttttttgagacagtctcgctctgtcaccaaggctagagtgcagtggcgtggtcgcttggctcactgcagctgccacctcccaggttcaagtgattctcctgccgcagcctcccaagtagctgggtttacaggcgcctgctaccacgcccagctaatttttgtatttttagtagagacaaggtttcgccatgttgactggcgaaccttgaastcgttcgctgggctcgaactcttgaactcaagtgatccacctgcctcagcctcccaaagtgctggggttgcaggtatgagccacctagcctgggcccatttttattttaaaaattaataaatttatgtatttacaaaaaaattggaaaattgtgcaaaatgttayaactaaagttatcccttgagatctagaattttagggagatgttctctttccagtggggatagggttgggagggacagatcagttttaaaagtaggggaaaatagaaaatttttaactacagcttttcccaaaaaaagatgggtacaacttttacccaaaaaatatgggatgggaatgagaggaaggaagaacattcaggattcatctgtgggctggagagagtgatacttccaagtaggtattaatagtctgtggagggtgaagaatcttggaacttacaggaggaggtaccatgatctagactaaattcagcagcactaaggagaaggccccagctcagggcagtyggcttcacagactcccactttactgggataagaagtttgacaaggttggccttgacttctctcctagctacaccaattcacttcccaggcttggaataccttttctcctcttggtagcttggtgaacaccaattcagggttcaagatcccactcagaggtccccttcaacgtcaagccttccacctttcctggacgtggctattaaatctaccatagcccttatcacaatgtttgtaattattgtttgtgttcatctctcctgctagactgtgatctcctcaagggcagggaccagggtttgtttttctttttaactgccccagcacctagcacagttcctgatgcacattaaatgcacaatatatcttggttggaatgaagaaatgagtgggaaatgaatgatataatgggcttttattaggcagaatatgggggagatgaaacctggatatgatgtgtataaaggtgggagggggaagagaagaaagtgggcatgggaacaaactttggcaccagcctaggagggtaccaggggatatgggagcagagtagacattaaagagtgggaaggtggcaaagtctgggttgcctttcttagttttcaatccagaagcaaaatcagctaccactttataaccgaaaccaatgtgttttttttccatagtgctgggattctgtgaatcaaacacattgatacgatggaagtgttttgattcaggagggaacgggtggtagagggaaaggctattgtgcactgaggtaaagattgatagtttccaggttaccctaatagttattagtgaccctaatacagcaacgagttcttcctctcagagaagtggaaagacctaaatcttagaatttatggatccagaggtcttcagagcagtgtctgaaaaggcactttgtgtaagtctgggcgtcttcttagcatcgcccaccccagtctcaggatttcagaaatactaggtttggggatataaaagtaatctctacattaactacttgctatttatgcctgattatcacatagcacaatcataaaatatgcattttttgaattccaacatcattcattttttcagcaaacatgtactgaatgactgctgtgtgtcaggcactgggaatacaaagacactgagattggtccctcctgttgaggaactcacaacctaggtgaggagatagacaaataaacagcatatcttaagaaaagtgttttgaaaaatgtatgtatacattgctgcatgatcacataggagggtttcttaggaaagagggggggaataacagaaaagtttcctaaaaggaaaatagagctgtttcttaattaggggagatgtggcgggaaggcaaagtttgtttcaattggaggaagcaatatgtgcaaagaaaaatatggaraaaatatggcattttcagggttctgttaagagttcattgttcattgtgagagttcctgcacaggagcagaaaaagacaaggcattttcttatgattacccagtgaattctggactgtattctgaaagctatgggagccattggaagattttaagcggagactgtcatgctcttatcttcatattctaatatctctgaggatagtagattgacatgggtattcctggaggcaggggaagactgcctgggagattttttatagtcatccaggtgagaaattacaagaggctgaattaaggctttggcccagtggggctgggaaaatggcgatgtgttaagagattataaggattgtgtaattgtaagacttttaaaaagtatttttactgttgtaatctcagtgcttaacacaatgtttgagatatcagacagtctgtaaatgttattttgagttgatgaacttgtgatctactcagttagatggaaggtgtagaagaaggagatttctggtataggtgaatagatggggctgttatcaaagtgagagagaggatcagccaggaggaggaatgaagagttagattagttttatgtttaagattcaagtggcttttgagacatttgagtggaggtgtacaagtctagagctccagaagaagagttggcttggaaagatagatttgggagtcattggcctgctgtgggagtggatgacattgtctagggagagtgtaagcgaagggaaaaagagaagtttggaaccttggataccctgggtaacattagtacattgggattggtaaaggagaagttgaatgaagaagcatattcaaggagttagaaggaaaaccaagagagcaatgtcccctaagctaagggagtttagtttcaagaaggtcagagatgtctgatgctgtcaagaggtcccagaaggagtgagtggtttctattagctctctgacagctgggatttttgtctgttttgaccactgctgtatccccagcacttacaacaccctggcacatagtaagcattcagtaaattactgttgaatgaatgaatgaattgaaaagagtcccttgaatttggttacagaaccacaggactttggtgaagccattttgagagaagtggtggtgaaggaagccagattatagtggattgaggaatagataggttgtaaggaagcagctacaaaatactaagtatgaccaacatcatgagcacataggaggtaccaggcactgagctaagcactttacatgtattaactcatttaaccttcccagcagcccaattatataggtattatgatccctattttacagttgaggaaactgcagcttagagagggtaaataacttgcctagagaaggcctgcagctagaaagtgttagaaccaagatttgaatccagatctgtcttcctttggagttcaggtccttagctgcccaggctacatttcctctagggagtctttgtggcaggaaggcaaaagaaagagtaagtgaggccaggaagattgcaaacattttaatgctgatgagagttgaaagaaataatttgaaggctttgggaaaaggggaaataatttatacaagaggagactgagaagagctccagagcacaggtaaaaggaagccccttccatcaaggtggaggtccaggagagggtacaggcaggtgtgtgttgcagatatttttgtcagtgaggagaggggaagagggtagggatagttgaaagttctcttctgattgtctgctgagcataagggaggtggtgatcaagtagacttgaggaaggtgtagagaatagaatgaagcaatgatggagatagaagattttcagggtagcatcaagggcccagccaagatggagaccattattttgcagtggtccagtcctgctgttttgtgatttttctcccttccctccagtagggtacagtagccggggtcaggggcacagcaggcagatgttagattgatccagggttgaaagttttgcccattggttgtgacagaagaaaagagacagatcgttgggagtattggctagattgcgtttgaggtgatgaatcactacatgtaggccagcagggaaggaagcaagaatgagagaagactgagaacagaagggaaatggaggggtcatagtactggagtctggagaaggttcaacagtaggactttggtgatagagcgtccttgttattagaattccatgtccagaggtgacctgtctgtgatgaataaggcaaaattactctataaggtactacaggggtagaaaactaccagtgatgtttgtctctttactgaggggactaaggaagggtaccaaagatactttttttttttaatcgtaaatattttctactgtttggtagtactgtttgattttttttttaaccagtatgtactactcttttttttttttttttttttttttttgagacagtttcactctattgcccaggctggggtgcagtggtgcagtctctgctcactgtagcctccgtctcttgggttcaagtgattctcctgcctcagcctcctgagtagctgggattacagggcccaccaccatgaccagctaatttgtttgtatttttagtagagacagggtctcaccgtgttggccaggctggtcactaactcccgaccttaagtgatccgcctgcctcagcctcccaaagtgctgagatyatggacctgagccaccgcaccaggcctatacaactgttttgattttaaaaaaagatacaaagttttcagtgaacccaaagagaagagtaggtttacatgaaagcagggagatgagtgagctgcagaggtagcaggctgtggtcctggaatgggaccctggagtgtattatctgtctatggaatcacaaggtcttagatctgaagaggagtagctggaatctggtcccaccctgccattgtttacagggaaggaaatgggagccctgagacttgctcagcttggcagcagcaaaaccagaaccagaagcaacctgtcctgatttcccagccctctggtctgtttttcatgctacctcctaagccctggaggcttctcaatttcctgctgttccagccagactcatggcacatgtgctcatgacattgctggctgaccgggctgtttgccatactgtgcttcccacacgttggtgcttctcagtgttcagggtgtgggcgggtgtgtgtagaggcggctgtactactgtcccctgcctatttcctgccctcttcatagccaggcaaagtagcaacttggaggcggaaaaccacagtggtgataccctatttacatcctttacaatgacctagtgtccctcctgttttgccagctctcatgttgctgcctcccccaaacatccctctcataatttgtttaaacagcagccatgcccccgtatctacttctttcagcccaaacccagatgagtcactgagagaacttcggacagggattcttcaccatgagattgatggcagggagtggaagaattgtaattctggagaaacagcccttaaattaggggcattgttctgggaaaaaaagtgttttcctattcagcagatctgcaaaggagtctgtgactctccaaaagactacagatttagggagtacagtgcaggtgtcttttagaaaaataaattttttaaaaatcgaaagattaggtatttttctgtcttccaagtaatagttcagataaacctggtgtttgtgtggcctctcttattttgtcatgagggcagcgagccatggtagttgcatatggattagttgtgatttctccttatgtggcaggctgagccccagaggattagaactaaagctcaggacttcggctgtcttttggatggctgcctgggtagatatgcagatgaattctccacacaatgatattggggctccatgatgtgtggggttgggagtgggggcaagaagtcagaggatggggtatagtttttcctcacccttgctcctaggttaagtcctcattggtctccctgtagagtctcctgtggagatgggtttgtagcctgtctgcttggatggccctgcagattctgccttgagtgtggtctttgccttgaaggtctgcttgtccttttgtgttgtaacaatgtagttttagggttcaagtatggagctgtgaattgacctggcccagagttgcctcagattccctcctctttgcagaatgtaggcaggtattggtgtggggatccagggtatttactggtaagggaaagaatgtgttgttcatgatggtaggaaaggcccccttattggcttgcttcttggcagaccaaagagctgagatacagccatgtggtagtgctcaagaggtctgagcaggcttccgtgagatgatctgagcgcttggattccttctgcctggagatgggtaacatttgagattccagtttggttctgaattctctcattgccttctgccaggccatcctatccctgacattgtagtgccataagaagtcatggatgttgtgatgccagtgggatgaatatggctccaggaaagaatagaatagagaggggttcattaagttaaggcttggggctataacaccagagccaccctgaaaatcacagggaagaaccagcaggagggtgagaagagacagtgtattcatattttggctttggcattttttctgcatagacaagggtctgtaaagctatattagatactatgttggttcaaccctccactattagggtaaaatctaccttggatagagaacctgtttgggaagaggaaggaaggaagcaagatgggtgggtgaccctgatcttctctgaggtatcagttgcatcatctcaggcctcctctgcctgatccttctgtcatctgctccattagctcctaggcttttgcaaaactggaaacccttcatctggagccctcaagagcagtactacttaatatgccaatctkcaatgagataagaagcatatgtaccagaatgtaagactgatctcttcatcaagaaaatcttgtatgaaaaaatgttagaactagacagtgtgtttactctsacataattgatttacattcaggcttcatataagttttctatatagtgaccagccagtaacacagtttgcaaattggcagctaatctgcagaccatacttggagtagcagtgctctagagctgcctttcattcagaagcagttgttgaggtcatggagttgtttgtttggtacaggccaagggcagtcagaaatatagasccctggttaagaagagctgtcacccagagcattcagacatgggtcagggcagctactgaggagaagaggggcacaacgagagtgagacagctgaacagatgatcaggcactgcctatgccaagggtaaatgccatgtcctccctttcctttaccacaggcgtgtgagctgagggactagagctagggtcttggttttgcctgttgcttctaatggcaggttggccgcaccaagcttaccctgtcttcctagggaaacggcatacactggagaagaatgtgttggttgtctctgtagtcacacctggatgtaaccagcttcctactttggagtcagtggagaattgtaagtaccatcctgttccctgtcttagaagagcaaacacttgtctgaagctgtaactctggatggcctggcctaaactgctgatgctcggcctggagtcccccttgaccctggggaccgagggtcaccaagtgctgagagccatggaagatgagtttttcctatgcagaaacttaaccagtgctaaaggttggctgtggaacatcacactggctcttcactgagtcccacaggacttctacctggtgtactgaatacatttctattttaggaaagtgtatactttgctacttttctctaatagaccctacactggggaaagcaggggttctggtcacttatactgagatgaagttaagtcattagtccagtgactgcctcctgtcttccctgagcagcatttggggacttctcagtctccaaagtgaacagttgagtttggctccttcctcacattcttggaggaagtagctgaagcatagaggaaggggaaaggagggtgattacaaaggcattgggagcatcgcgtgctgcactcacccctgcaggcatccctgttccctttgccaggagaagacttctttcatctttctgctgtggaaactgacccatgaggtaggtggtgctttgtacagacctccactccagcctgactcttgctgtacatcatcatccagggtctacagagtcactgtggtgaccaccctcccactctggccccagaccaggccatcctacagctgtcttgctctggggacatctcctcattgaaagattttttaaaatatatggtcttactgttttttttttttagtccagtgatttatatagaatatctggtctataatctgagaatagaaaaccttaaccaactaaatgagttcatttctgtcatttcagataccctgaccataaatgatgaccagtgtttactcctctctgagactgtctggggagctctcygaggtaacaaattggggctgattaaaagagagagagaaaggatgatgtgggaaggttggtgttggtggagtgcagtggcccagtccctgctcactgcaacctctgcctcctaggctcaagcaatcttccctctttagcctcccaagtagctgggattacaggtgcctgccaccatgcccagctaattcttgtatttttagtagagatgggatttcaccatattgcccaggccagtcttgaactcctgagttcaagtgatccacccatctcggcctcccaaagttctgggattacaggtgtgtgccaccgcgcccagccaggaagctttttttatgggaacaattggcgtgttttcccgtctctgtggaattgtccctggaagttgacaggttttaccctgtgcagcatcagcaactgctgctgccctagtcaggggctctgggaagcagtaggagagtctgygggctgatgttctaggtgccagcaggggacaggtagctgggggcagggggaatgatgctaccacagacactgtctgtccagctcttgctaaagacatgtaattggaaaggtttttttaaaaggaaaactataacaaaagaaatagatacatgcaaaaaaaaagataaatagtagtgaaatatttagaactacattatttctggagaaaatgagtttactggctaaactattggcccttgcccttcttctgggtttactgagaaggcatttggtgcctagatacagacttagccaaatatctctcccacttttggtaaaccctctgctggtgaatgatgtgggaaactctctcggaattccacaccttgctttagtttgtcttcattcccttgctccacttctatgcttggagcaacagcatgctgcctccccttcctgccctcttgtacctttcatgcaggtgctgatggtgagtcaggctagaggtaagggaggacctggaactccagaatgctgggtgtcagagtcagagtggggagaagccaaaacagtacactagcagtctgctcaaatcaggtgctgagtgactgctgaggtctcatggattctttcactttgaaactggggactctgataattttcatggggcttctgcagggtttccagaagaggggccccagctgttgagaacatacaatactctgggttyaacatacctgtgtgtgggccttgctagactctaggagacagtgtcagtggactaggggagtccttctggggcagttgctgtccaccacacctcagctccctatagctgggtctcttctcagactctgaagaggaagagtggatgattttttttatcttctaggtccagccatgaacccaggctccttggaaacccaagcttatgatcactttctcacaatttattctgggaccccttttctcagctctyttagctcctgataggggttatccatgaaaagtccaactcttgcaggctgagttktctctgtgtctgtcctcatgagtatatgtcttggcctctcttctcaatattcttgtgaaggcacaggaaatatagataagaggtatgtgggttttgaaggttagtatgttgtaaggaagggcactaaaacccttactctgacatctcccaaaatgaaatacagaagtaaagatggatagtggcttcctaatatccccttttcatcagtgttaaaaatcgtcaagcctacactacatccattttccctgtgtacccaaatgttatgctctgctacattgagaaccttccaaatagagacatctctttttccactccctgagtctttactctgcctctctacatcttcctaggtctggagacttttagccagcttgtttggaaatctgctgagggcacagtaagtgtggaccctcaaaaagggctcctttttcatctctggggttggatcccaatattgagaatcctagaaaaatcttgttttgccttaggatcctggtggcttgagatagccccagtagaaatggaagaggagatgtgagtggaaaactggtttggtagatttggtctgtttggaatcactgtaatttggtccccctgagtcatcatttagtaatgaccttgaggccacactgctttgaagaaaataaactatgttaacaggaaaatccagaatttgtaggctgagtggtgtttgggacagttgtattaggctggcgttggacaattgctctctgggaaggtggstgcttatggtcatttatagaggtggggagcatttagggagagagcgaccctgagaacagtcacagattggctttttaagaatcctgggagagttgtcttcatctccctgtgcccccatagtaagcttcctttgaaactgacatgttcaatgtttgttctgcacagttctttatcaacaagactgagattgaggactttccccgctttcctcacyrgggcttgctgttggatacatctcgccattacctgccactctctagcatcctggacactctggtaaccaggccttaaggccttcttcacacttaagagttctagggtgatggagcaacggacagaccaagttccaaattcttaaagagttagagagggaatgtatggactgggtgtggtggctcatgcctgtaatcccaacactttgggaggccgaggtgggcggatcacctgaagtcagaagttcaaggccagcctggccaacatggtgaaactctgtctctactaaaaatacaaaaattagctgggcatggtggtgcatgcttgtaatcccagctacctgggaggctgaggcaggagaatcgcatgaacccaggaggcagaggttgcagtgggtggagatcacgccactgcactccagcctgggtgaaagagtgagacgctgtctcaaaaaaaaaaaaaaaaattgtatgtaattctatgagctcctgggaaaaatgtagaagatgagctgctccaagactcaaaaaataacagagtgacttaaatctaccttacaggctactgtagatcaatgttcaggctgtttccagggatacaaatgtttaggggaattggcttcattggcagagctaactatatttgtttttgagacagcgtctcaattttttttttttttttttgtattttttgtagagctggggtttcgtcatgttacccaggctggtcttgaactcctgggctcaagcaatctgcccaccttggcctgccagagtggtagaattacaggcatgagtcactacacctggcyggcagagctaactttagttagaacaaggtcataggagagagacgttcaaagccttaacttggggccaggtgcagtggctcacacctgtaatcctagcactctgggaggccaaggcgggtggattgcccgagctcaggagtttgagactaacctggccaagacggtgaaaccccatctctactgaaaatacaaaaaattagccaggcgcgatggcgcaaacctgtagtcccagctactcaggagtctgtgatgggagaatcacctgagcctggggagatcaaggatgcatgaactgtgattgcaccactgcactccagcctggacaacagagaccctgtctcaaaaataaataaataaataaataagtgaaggaaggaaggaggctgaggcatgagaagcacttgaacctgggaggtggaggttgcagtgagctgagattgtgccactgcactccagcctgggygacacagcaagactctgtctcaaaaaaaaaaaaaaaaaaaaaaagcctttcctggggaagttcctaactctcttgagtttaatgtgcagtcttatctgacagttcccaatccagttcctgtgtctgccttttcctttgctcctgtgacggaaccaaaggaggccacacatctgccagcctttgcttctgagattatgagttaagaggctactaagttcccaggaggtctcacagttgggcttaacatcagtcagacaaccgaacacaaatggcaagaggaagtattgatcttcaggcttttggaagattccaggctaccacagtagctgcagccctcctcttaatgtggccagaatttatttcaagaagaggaaagaccacttctatcatccatctttggatgtgttctgggaaaagtagaagtgtgctgggccttccctccatgccatccctccctgatgggaaggtttgatagaccccataaatacttaattgagagctgaggcaggtcaagcctgtaggggtgtgtggagcggcctgagagctcgcccaacatcgcaagtttgaggctgaaaccggagagactgtgatgggttcacagtgtgcactttaacctacaggatstcatggcgtacartamattgaacrtgttccactggcrtctggtagatgatccttyctycccatatgagagcttcacttttccagagctcatgagaaaggtatgttcccgtttcactcagaccaagtttatgggtcaatgtctgaatctggctgtggccctgctggcaagaacagggtctctcatcctaaccagccagttttagaccaatataggggaaggacactggatttggagtcaggagacttgagttcaagtccaaaactttgccgataatttgccttgtgamcttcaggagagaatctcttctggccttattccctttttatgtatttatattctgttaaatggacatagtattaatacctaccatgattatctcactggcattatgatactcagataaaacagatgtgataacttctgggaaattatgatcaagttttttgaagatagtccctgacaccaaagggctatgggcaggttttctgatatctggggagtcttgtgggcattttgagtatcttctactctgctagctttcaggaagtgtgaacctgaagggtgtcttgtgcctttcaggggtyctacaaccctgtcacccacatctacacagcacaggatgtgaaggaggtcattgaatacgcayggctcyrgrdtatccrtgtgcttgcagagtttgacactcctggccacactttgtcctggggaccargtaagaatgatgtctgggaccagagggactctgcttgttatgctcagagtgaagcttcagggcactggctcatggaagtggcatatcccagccttggtccttagaagaatgttttccatcgacttcttccacctgggaatttagataggaagaactcactttggacaatggaggctgcttcttactattaaaatatgtactgttagactatgtaagggcacatttttctcagatgccgttgcaggtagttgtgcctagagtggatgctgaggaatctgaccaccagggtagaatctgaaagaaagaagcccaagggcagcctgcagaggtcagagtcagtcagtacccctgctccctttcttctgtataccctcagccctccagtgtgagcccccaacacaggttaaatgacagttgaaaagggctactggcctgatagaaaactgaagatattggccgggcgtggtggctcatgtctgtaatcccaccacttttggaggccaaggcgggtggatcacctgaggtcaggagttcaagaccagcctggccaacatggtgaaactccatctctactaaaaatacaaaaattagccaggcgtggtggcaggcgcctgtaatcccagctactcrggaggctgaggcaggagaatcgcttgaacccaggaggcagaggttgcagtgagccaagatcatgccactgtactccagcctgggcgacagagcaagactctgtctcaaaaacaaacaaacaacaacaaycaaaaaaaaaccctgaagatatcttgtgacctcagcgtcaggaagtagtctctgggccaagggagatatcccttagcaaatgtaaaaagattctgggtgatggttgaccccacctacaggaggagatagagaagaaagattttgccagtttggctggattaggctctctctctgcctcaaggcctgtgaggagagcagccttgggagcaagggtagcacctgctagaagcagtgtgtccaggcaagagtgtgcgcactgacagttgtctggctggaacttagcctctgcctatgattgtggatatatttgtatctttttactgtgactaaatggtggtgactaccagtgtctgtgagtgcctaagtgtgcctacctaaatgtgtgtgatgtttatgaatacacttgtcttgctttgtgtgactcgtgtccttacgtgtaggactgtgcgtgggggtttatgtatttgtgacactcatatggggttttctcttggcttagrtatccctggattactgactccttgctactctgggtctgagccctctggcacctttggaccagtgaatcccaktctcaataatacctatgagytcakgagcacattcttcttagaagtcagctctgtcttcccagwtttttatcttcatcttggaggagatgaggttgatttcacctgctrgtatgagccctttgatcttcccactgtggcctgatcagttgcttactcagaatagaagttagcacccgaggggctgcttagctcagctgctgctctcaggggtctgtatgggctcacattgctcaggtcttaggccttcctctgcccatctacgtagagatcctacctgattttggcaaggctttcactgtgaacctcttccttcctactctcatatccttgaggtattgatagaaaaaacagccctgggcacagaattgtcttggaaaagttcgggatagagaaaaataatccctgtttatgaaggcttaaaattgtctagttgaagagtcaagacacagaattcaagactaataggtgacaatgtctaattagtattcagttgtaaagtccaaacccttggttctagtaagctcaaaagaggctgaggggcttctttgagaagagggcgctagagctgaatctggggaaatcaatttggctttttggagatgtgagcaggggaaaatattccagaaggagaacaatgtgagcaaaatgtggacgtcataacgcaagggatctgcagcaggtgttagacagcaaggcttgtcatccaactggaagagcagataggaaagccgaaatccagtgtgctggagcttcaagttaagaccttggattctcatgttgcagtccagagaggattaatatgttttctctttgggagtttgaacttaaaactcttcaggtccagactcagcctttctcagcctgtgtcaacagcccacctgcttcacataactttgcttggccacactttccacatgtagggcttctgagatccttgcttatttgatttttcaggtgaaaagaggaagttatagggggccaggtgactaatccccaggcattaggctttcaggatgttgaaagattaatcttcattttctcttgggattcaggaagtccaacccagagwtccaggactttatgaggaagaaaggcttcggtgaggacttcaagcagctggagtccttctacatccagacgtgaggaaggaaggagggtgggtggggtcccttgggggtcctcctgtggggtcctccctttccataccgagtcaggccctgcttggccactgtctggtccctgcagggttcccttgtcctttgtcccatcctttcagatttggagtggttggttttcagcccwggggaaagacactgcttaatgaggaataggccmctggccaggctcaacccctagagcactggcacaaacagtctagaacccatctgagctaagcagacacttactagacactcctctcctctccaggctgctggacatcgtctcttcttatggcaagggctatgtggtgtggcaggaggtgtttgataataaagtaaaggtgagccggggcagagaagagaagaagccaccagcagtgcctccctctggtctccccagctcctccctgcctctacagagactgatcctcctggtttggattgggctttaatggtcggagcactctccttttctctctagaaaggccacagagtgctgggtgcrgtggctcacgcctgtaatccmagcactttggtaggccaaggcagggggattgcttgagcctaggagttcaagaccagcctggccaacatagcaaaaccctcrtctctacaaaaaatacaaaaatcaggaggctgaggttggggtactgcttgagcccaggaggcasaggttgctgtgagccaagatrtgcctctgcactcaaccctgggcaacagagtgagaccctgyctcaaaaaaaccaaaggccgctgtggtatgagccctgggtttatgtgtcagagtttctatcttccctcactacaaacttaattaagaactatttctgctgttaggttacttggataggctggatttttcttcctaaatcatagatgagggtcttctgggtctgtgggaccaaggttaccttctcctttattgttgatcagtaagatcccagtctcctgtcacatgcaaggactcttcaggaaccttgtcccgtccccagaaacatctggagacttttggacatggcagctcctgggtcccactgcttgcctccctcagctcacagctggtattactagctctgtgtggacagggaggctgcagagggacggggaggagagctgcagggaggcctcttagggccctggattccttggcctctgtcctgaggtgtgagctcaatggtcaggagtcacagagacatactttgctgctggggaacagagggagcacatacctgttgtcccatgttgcctgtgtatgaataaggcccaggaatctcctcagctttgtgtccttactgccatttgaccttttataacagattcagccagacacaatsatacaggtgtggcgagaggatattccagtgractatatgaaggagctggaactggtcaccaaggccggcttccgggcccttctctctgccccctgstacctgaaccgtatatcctatggccctgactggaaggatttctacrtagtggaacccctggcatttgaaggtgaaagcagagagctctccttgctaaccaaaggaggctgggttggggcacaggatgggaggcaggaaggtctgggccagacatttccagttagtaaatgaaacaacttagctggggtgagggccacattgggaaggtggttgagagggaccctgnagttaccccaccatcaccagactgttgttgcttgttttccctcaggtaccccygagcagaaggctctggtgattggtggagaggcttrtatgtggggagaatatgtggacaacacaaacctggtccccaggctctggtaagggttttcgggggggaggtggagggttgggcctgagagcaggagttctcccttagagacccaatcccatctagccacctctggactagtacccttctttcaggcctgagagagagcaggccgtgcaacgagccttctgaagatttgtgtgcaatattcactctccacatgacttccgtctatatccctccagctgccctttggtatgtgggatagggattgttaaccttacttcccagagagataatgaggcctggagaacataggtgagttgctcaagacccagcacaagcatccatgattcctgtaataaggcttccctctgctgttttcactgcagccttaccaagtatggttgggtgtgcaaagtttacattttaaggacctctgctgctgccactgtcattgtggttaatgatggctttaaggtttattcttattcccgtatctttgagagaggaagagagtgggattgctacccacattttaatgaaggtggagctgagccgtagaactctctgggagccatccaacctggctgtggctcataacaaggtattgatcacttcctttggcctgagtgagtccagggtgcctagacaagaggtagcarcctgtggatgtccagcacctttgcagggaatacagggcccaatctggcacatgccccttttcctccagscccagagcaggggctgttgccgaaaggctgtggagcaacaagttgacatctgacctgacatttgcctatgaacgtttgtcacacttcyrctgtgaattgctgaggtaagcaagctgtggggccttcgcaaggcggagcaggccagatccagggctggggaaccccttagagagaggaagacartaattaacaatagctaacacttacagaggcttatagtcagccctcatccacggattcaaccaactgcgataaaaagtattcaggaaaaaaaaaatacaacaaaaaatggtacaaataaaaaatactgtataacaactatttacatagcatttatattgtattaggtataagtaatctaagatcatttcaagtatatgggaagttgtacattggttatatgcaaatactatgtcatttttatataagggacttgagcatccttggattttggtatccacgggggtcctgaaacaaatcccctgtggatactgagggacaactgtattttgtggcaaacactgtgctaagtttgttacaaatattgtytcatttagtcttcaccacagccccatgagacaggtgcattttagagatagacactgaagcacagagttcaggaccttgcccaaagtcactaagaagcaggatttgaaccaggctgacttacaggatstcatgacacctttgcctctgtcagggatgtgcctgtgtaagatagtcatttccctgattccttcrttggctaggtcttgagtacttgggggacatagcctagtgcagagcagagtcctgggctgagagtcaagcatgatggtgtctaagcctcaattatgtcattcactgggtaacttccagctggttctctaagcatgttgcttacttggatgataagggaagcatgcctagaggtcccctaaggagattggtcaggttatagactgagacccaaggacaggatttcgcatccatgttcatggacaggacagcacctaagtcccccagtgccaccatatttacagcattttagagtcaggaacagagggctaagtagaccaagagcattggctgcctttcagacatccatctntattctaaagggattgagttatttggggttagggtacagagatgggcaggatataaatagatgtcgccaacgtttctggatctccaagacctgtatcagaatcacctgaggcacctgttcagcttgcagattcttgccaatactttgccccaccccaggtgagaatctctggaattgagattcccaggtgcatttggtgtacagtgacagtttgagagtcaccgaaatggggaaggagagactgttgactggtgtgaaaagtgttgctggggccccttctgaggggcttatcttgccatttcttcatgtcctcttgcaggcgaggtgtccaggcccaacccctcaatgtaggcttctgtgagcaggagtttgaacagacctgagccccaggcaccgaggagggtgctggctgtaggtgaatggtagtggagccaggcttccactgcatcctggccaggggacggagccccttgccttcgtgccccttgcctgcgtgcccctgtgcttggagagaaaggggccggtgctggcgctcgcattcaataaagagtaatgtggcatttttctataataaacatggattacctgtgtttaaaaaaaaaagtgtgaatggcgttagggtaagggcacagccaggctggagtcagtgtctgcccctgaggtcttttaagttgagggctgggaatgaaacctatagcctttgtgctgttctgccttgcctgtgagctatgtcactcccctcccactcctgaccatattccagacacctgccctaatcctcagcctgctcacttcacttctgcattatatctccaaggcgttggtatatggaaaaagatgtaggggcttggaggtgttctggacagtggggagggctccagacccaacctggtcacaraagagcctctcccccatgcatactcatccacctccctcccctagagctattctcctttgggtttcttgctgctkcaattttatacaaccattatttaaatattattaaacacatrttgttctctaggcactgtggtagtgggtttttttgttgtttttgtttttgagactgtctcaaaaactctgtcgcccaggctgacagtgcagtggcacaatcttggctcactgcagcctctgcctcctgggttcaagcgattctcgtgcatcagcctcctgagtaactggaattaataggcacgtgccaccatgtccatctaattcatatatatatattttttttttctgagacggagtctcactgtcacacaggctggagtgcagtggcacgatctcgactcactgcaagctccacctcctgggttcacgccattctcctgcctcagcctccccagtagctgggactacaggcgcccgccaccacgcccggctaattttttgtatttttagtagagatggggtttctccgtgttagccaggatggtctcgatctcctgacctcgtgatccgcccgccttggcctcccaaagtgctgggattacaggcgtgagccaccgcgcccggccgaattcatctatttttagtagagatggggtttcactatattggccaggctggtcttgaactcatgacctcagatgttcacttgtcttggcctcccaaagtgctgggattagaggcgtgagccaccgcacgcgggcctgtggtaaattgttgaatttgaaggactcagaggccctggtcaattccaaaataacgtaggcgacttccatccccctcctcccaaccattttcagcccaaagcatcttcgcagggaatggatggctgcgcggaggtgggcggtggctctggagagggtctttgcaggtgtgattttctctagaaggaaatgtctcgtcgtggacccagactgccccctcctggtttcagatgcagaagtgatactgtaagccagaggcaggggcagtaatgcatcgcagccattttaggtgaggatttccttggcggttatttgttaagttctttggctgggccctgggctggggtaacaatggacaggttccaggcatttttttcagaaagcttccagtgtagtggatacagaaacttcaggaaggcagggctgagaaggatctgagtaaaactcggtccttcaacaccatccttcagcccctgggtcatgttccttcgaggtcctggtgggaggtagacaagcctagccttgtgctgttcctgtaaggacagggtgggcattttctaccaacagaattcttggaattttcacacagcccagcctagccaagtccagggctatagcccagatacacaagttaaggtcccagcactggcacccaccacaggagcccccttacctctattacccagaagcttgtaggaggggtggtccgcagacaaggaccctgcacaggtgcgaccctgcttccctcctggtcataactttcatgttactattgcttgggataatgttaagtaaaaatagcagacactgagttttaagtctcaagtggatgaaggcagagatcgtgatacacttgagttaaagcagtagggttctgtcattttctattcctgttgtaaacattttctttaatgttattatttttaccactaaactaacgtggcctggtcacgactttcattggtaaagtgtgctgttcctcaccctccaccgttgctcctttggtccactgatcataagagcatttacctgaaggtcgtcagacctcgaatgccaacaggtcaactgcagtggcctgcagttaccacccagtctgttccaatgaacagaatcgctgttgccccaactcatctcccttcacctaggctgtaaattgaaagtcccacccctgagcggaacacaggccatcttgtgtgctgtgcaccaccagggggcggggaagtttccagactgacttcctggctccagtcatcctaggaaaagagttctccagtcgctccccacccccaccccttcccattccaggagtctattaaggaggcaaagcaggcctaacgggtatcaaagcaaaggagtgaatggagactgggagagtcttcaacctctcctctccttggtaggagctgaggctgcatgccaggtaccttcccttcgaggaatctaataaagctaggtcactggtgttttcaggtgcttctcaaaggattgccgtaggggtaggatatcaggatgtgggagcacaggtgccaccacagcactagtgatggagagtcattgcccctagacttctgggacagtgagactgtgaggaaagctgaaatgatactgggaaagggtgaaagaaaggatgtaggtggaatttatttagtattaatgtaggtacacataccttatggcaacattcctagcactctaaattctagatttgtatagtttctgtcaatatcttttgtaagcttaatcaatacagggcatgacaagtatgtgtcacatacttttttttccacgaagaaaaaaaataagtaggaattgggtgctttgtttatcaaaatttgtatttcctttataaataaactttgaaataaaggttgaaaattagtatcttttctagccgagccaccattgtttttaaaaatcctctttgaagcaggtgtgtgtgtgtgtgtgtgtgtgtgtgtgtgtgtgtgtgtgtgacgtttttcaacaaaatttttaaaaatcgaaatgtcagggtcaggtgcagtggctcatgcctctaattccagcactttgggaggccgatgtgggaggattgcctgagctcaggagttaaagaccaccctgggcaacatggtgagacctgatttctactaaaaattaaaaagattagctaagaatggtggtgtgtggttgtagtcccagctactcaggaggctgagaaagaaggatcacttcagcctggaagattgaggctgcaatgagtcatgatcacaccactgaactccagcctcagcaacagggtgagaccatgtttcaaaaaaaagaaaaaaatttaaatgtccaggaaccttgcttttttcacagtaattactgtactctaaccacacccatgtttagtctaaactatcccagtaaatactcctattttttagtgatttcaaatgtttcaaacaacagaaaagtctagaaaatagtaaacagtgtaaccacccagctttgttgcatctcagtagtcatatttgcttcagatttgttttttttaaacaaaaaagatgaaacattattaatatcccccttcccaatgctattcccttctccaaaaacaactgttttccagaatttctttttaatcttatttcctctggagaatctgatacttagctgtgatttttttcatcacttaataaattctttatggctcactctttatagcaaattagaaagagatgttttggaagccactcaaaaaagggagtgtgtgtgggaaaggaggaagagcagctggcaggcagacacagatgggaaggggtgccatgctcgctggtgtgctgcagagtgtgtgagtgagagcgtgtgtctgagtgtctggatgatctattatgaaagaggatatttgaacataggaactcaactgctggtgtttatctagactcacatgagtcagaaatctgaatgaagatagatgtggagatccagctaggagaacaaaagtgcttcgtcatttttatgtgcttgctgtgtcaggcacttttgttgttttttttttttttttcttttctttttgagatggagttttgctcttgtcacccaggctggaatacagtggtgcaatctgggctcactgcaacctccacctcccgagttcaagcaattctcctgcctcagcctcccaagtagctgggactacaggcatgtgccaccacaccctgctaatttttgtatttttagtagagacggggttttaccgtgttggccaggctggtctcaaactcctgacctcaggtgatctgcccaccttggcctcccaaagtgctgggattacaggctgagccaccaagcccgacctgtcaggcactattataagcactttactggatgttaatgtatttaatcctcatcccaaccaatgtgctatcaatattatcctcatttgacagataaggaaacaaacataggaaggttaagtgacatctatatggttacacagctacgctgagtcccgattagcactggggagttgcagggcatatgactcctaactcagctacctaactctagcccctactgccttcagccactgtcctgggctgccccacgtcagacatcttcctcctctcggacaccaaatacagacatacagataaagctagcaactcagctatttctgggctcgaatccatttcttctcctatgtttaaacaaataaaattaaaacctctcagtccacttttattagtcaagctgcctgaaacagttgcaagtttgtctatttcaccactttgcattcagccctcatgaccccacagttgggctgtaatcctcataagggccgcttccactaaggccaacaataacctacatgttgccaaatcaagggacattgctcaataataaggaaaaaaattacttgatcttttcgcatatttttgagattttgatccctccctctttgaaattctttcttcgcaggcttttgtgacaccattctttcctgagtttctcaatgtctatcactgactccttcagtaaactctcagcccataaccaaggttttgtcttctttttttttttcttctttgagacagagtctcgctctcttgctctattgcccaggccctagtgcagtggtgcaatctcagctcacttcaacctccgtctcccagtctcaggcgattctcctgcctcagcctcctgggtagctggaactacaggtgtgcaccaccacactcggctaattttttcgcatttttgtagagacaggatttcgccatgttggccaggctggtcttgagctcctgaactcaggtgatccacacacctcagcctcccaaagtgctgggattacaagcatgagccacagcaccttacctttcctcttatactttcttcctagtgatctcatttagacagtcttagtgtgcagtcttacacctggacagccatagatagataggtaggtaggtaggtagatagacagatagattagacagatagatagatagatagatagatagatagatagatagatagatagatagatgatagactgaccgacaaacatatatataatatatgtatgtgtatttcctctggggtccaagctcaggtagccaacatcttcatatcatctgaatgtccattacgtacttaaagctcatgtcccaggcagaattcatcttttcatagctccccactctattcctcctgtatgactattctgctggtcattagagccgaagtctgggaatcatctttaactccttccttcctgtcataattgtcaccacaacatccctactctgtataaataactcttagattcatgtactcctctctatctacactgccaccatctttgtttaggatcctaatgaatgcatctgcctcaattcttccagtcatctttttaaactgcaagtcagattacgtgtttcctgctttgccccattgtccagttcactcagaagtatacgccagtcttcctcttcaagatgatgcctttgaccactccataatcattttctgacactctacctatattagttacaaggaaatagctcaaactggattgtgcaaaaaaaggtaaaacattgtgtcatgttatacatcttcacatacacattcaaaattctgacttatgtcagcctagataaacatcaacagtacataattatatgatcctagggataaatctattaaaagacctaaggactttgtggagaaaattactaaattttggagagacacaggagatagagatgtagagacagaacatgttcatgaaagagaagactcaatattcataaggattttaaatttatctgcaggttcaatatggttcctattaaaattcaatttctttttattttggaacttgaagctgattttaaag

SEQ ID NO: 95988 - DNA, 21581 bp, Homo sapiens
aatgaggtagaaatatggcaagtgcttagaagcaagccaggtatatggtgggcactcaataaactgttgcaaaggtgatgatctctgtatcagcactgcccagcactaggtctgacctgcggtagcaatcagtgcaggtccctgtcgagggaacacaccccagcctctagtctggagaggcccgtggcccaccagacaacccctcgctgagcagtagctggagccactgcctcaaccccacagccctgccctggtcctgccaccaagacactactcacgggaaggtagatgcagcaaagcagagaatggagatcaagcccaggcccacgctggcctcgtcccagccgtcctgggcacattcacccaacacatcccatatccactggatggagccaytggggcagctggagaagttgcgggagcccagtttcttccagaccatggctgtggaggaggggcccccggccaggcagggctgcaccggagggagggcgctggtgttctgaggccagcaagggttctacagggaggaagggaggaggctttcagcactgggaggtccaggtcctattcatggtcatcccaaactaagctcatcccagccttttcacggggctcctggccctgagccagagaagggcaaagacataatcttcacccaccaggacccaatcagctcccaggtgcacagatcacagcaaacacacgccaactacagacacatgcaggcagcgtgctggatctgcagaagggacgggtgtgttcaaatccctgcttcatcacccattcatgctagactttgggcaaagactcagcctttctgtgcctgagccctctcatctgtaaatggggtcatcacagtgctgcctcccacatacagctgttgtgtgggttcagtgagttcatacacagtgtgttgaactgagccctcgatgttaccttttcctatgactcttgaacacttagggtattcctaatttcttgttattattgtaaattactctctaaggatctgctgaggccaggcccatcaagttcatctaatttaaagcaggttgtagccacgaatgatggctcatgccggtaatccccacaatttgggaggccaaggcgggaggacagcttgagcccaagagactgagaccagcctggcagcctgggcaacataacaagaccccatctcaaaaaaaaaaaaaaaaaaaaaaagaggtgacagagcaagactccctctaaaaaaaaaaagaaagaaagaaagaaagaaaaagaaaagaaaagaaatacaaaaattagccaaacatggtggtgtgcacctctggtccaagctactcaggaggctgaggtgggaggatcacttgagcccaggaggtacaggctatagagagccatgatcacaccaatgcactccagcctggatgacagagcaagaccctgtgtcaaaacaacaacaaaataagggctgggcactgtgccagcactctaggaggctgaggtgggaaagattacttgagcccaggagttcgagaacaggctgggcaacgctgtctccatgaaaaattcaaaaattagccaggtgtggtggcacacgcttgtagtcccagctagctactcaggaggctgaggtggaagaatcgcttgagcccaggaagtggaggttgcagagcaagccatgatcatgccactgcactccagcctgggcgacagagctgaaccctgtcttaaaagaaaacacacacacacacacacacacacacacacacacacacacaaaccataaagagttgccccacacagatgaggcaagtggagaagaggagcaagggatccccggggttgcatgaatgacaaggactcaagtttgggacgatgcagcctgtattctcccaggagctcacagagtgtgggggggatgcctaccagcagggagtccacagccacctccccaccgtcacaatgacaaagccagaatatggctgatcgcaggggtgggcagggcaggcctctcccgctacccgggcaccctggacagtgagtagagcagtcattgcctgcgtgacaccttagaggagggagggaaagtgaggctcggctgggccatctccatcagtgatcatcaccacagctcggaccggtgagccaagcatcctgcatgcactcatgttgcatcttcccagcaactatgaagtggggaccactgatatccacaaggagcctgagccagagtgcggaagtgatgtgccagcgccacccagccaggaaactacagagtcaaacccaagactcagacctacacccctgctcatagccacctgccacaccacccgcctcaggtccatctgtcaccagcgaagcagaagacttctgtggctcgagagagagagagggagagagggagggagagagagagacagagaagcctctgtggtctggcatgactgcacagccagaaagtgggcttcctcttttttccctgtgctcagaggggatttcctcatccaggtgggggctgtctctagctgccttcattcccacttgtgtcaggaggcctgggctccccagctagtccctggctggccccacggaactgctgaggacacagagaccagggagcaccgggagggaaaggaagtgagtcagcacctcctctcaggaagccgtagaccctcagccctaatgtgactcgctgtgggcagaggccctggacctaaaggtaagggtgccccaggtcactgtcagcccagctcactggactacctccagggcctggcacaggcagggaggctgaaagcctcttccctgtgtcttcgtggcccacctgggggaccatcagcacagatgatgttggaagccttcacctgatgctccatctctggcccctgaaaggccactccaaattaacatatagtccaggtgtggccgggcgcagtggttcacacctgtaatcccagcactttgggaggccaaggcagttggatcacttgagctcaggagctggagaacagcctggccaacatggtgaaacaccatctctatcaaaaatacaaaaattagccaggcgtggtgggtgcgtgcctgtaatcccagctactcaggaggctgaggcaggagaatcacttgaacccaggaggcagaggttgcagtgagctgagatcgcgccattgcactccaactgggtgacagagcaagactctcaaaaacaaaacaaaacacaaacaaacaaaaaaaaaccatatagtccaggtgagaactacacgtttgcaaggccaaaggcatttcaaatcaagtcctcatgttctcagccaccactgccaactggggtgcacccccacacccccttgcagagtctgaacacaaggctgcagctcatccactgccatcctcaccactccccagcaaggttgggtatactgtgctcatttgacaggtgaggctgagcagccctggaagtgaattaacctgcctgagcctgtccataaaatggggctaacgacactcactccttggggcagctgccctgactaaatgcacataaagctctcagccctgtgcctgacaacacatggcagcgactgttttcaggatgagagtccagcatctcaaccaccttggggactctccctctcatttccccctttccccaggttagggaggaaatgaaatggacacatctcagcatgtgtgtgttggggggttgtctcgaggaaggtaccttggtttatggcccctgcggcctctctctcacttccccctttccctaggttaaggaggaaatgaaatggatgcaccccagtatgcgtgcgtgttggggagttgtcttgaggaaggtaccttggtttatggatccaggatactgggtgggtgtccccctgaccttggacaggacccatgtgcaatgtggagctcgggacactctgagacacacctgatccctgaacagaagggcctggctctgagggccatcctgcgtagttcctgtcacctagaagccaggcatgggcccacatcctgttcaaacagctctgagcaaatggatgtccaaggttgcaatggagcttgacctcacctgcagggatgggaaggaccccagaagcggtaccctggaatcacccttggagggtgcatgttcaaaatttggagtcagtgcacctgggctggggcttagagattctgggtttaagaagccctccagcgattctgctccatctagtgcactttgagaaaggttgggctggagatgacatctcctgccacacccaaactcctctccctgatcccaagctgagtcagggtgcttcgggcacatgatcacagccaatcatgtgtccacctttgtctacaggatgaagtccaaattacctgaggctaggcctcaagttactccaagaactgccctcccaaccttatctcctgcctcctgacccacgtcttcagtcatttcaggtctccaggcttctgcacgtgccatctcttcccctagaagtgtcctgctccccttcaagggcctggtcatgagataagaagactcacttctaaattgccctttcaaagatgccccatgagagctggctggacaggaccttccacctcctcctctccccttgtccacacacctgaagaacgctaccaccgtcctctgcgaccactgtctttgaaacgtactctccccaccctgggttgtgcatttcttattctccaggtgtaaacacacctagaggttcagcaaatgttgagagacagtgagagaaagagagaggtagagagaaggacagagtgaagaagagaggaaacgggtgagaaaggagaaagggtggaagagagagaagaggaaggaaaggagaaaggaaggggagaaagctgtgagctcgaacagcccagggttgaggagaaaagcactctggaacagacctgcccgatgcctaccagtctggaactcaagtgattgagcttcgtagttctcatctgaaaagtaggggaataatgcaatacccaccacctaggctgactgcagagttaaatgagacaatccaggccaagcgattacaagggtgcctggcactggcactcaacaccaacagcccaaaatgactattatttgttctcattgtagcccctccagcgtccgggcacacaggcgccttcagtaagcgttgattagacatgacctgtgacccaggcccgggacccctcacacttccagactcagactctccatttacacgtttggaaacctaccctaagcacggcgtgggaggaggcagtgtaggccctcggtccctgcagacctggggagattgtggagggaggagcgtcccagctcggggctaccacccactccaggcctcggcgtcctcggccacagctccctcctggtgactcagcccggcgcgggccgcctgtttggagggataatgataggacagctgctggggccagcgccgcgagggcccctcgcccggccggcccgggaaaaacgaagccatcagatgccaaggggccggtcggccggggcagggcaactcctggccaggccagctcgagaggccgcgctggtcgcctttgaggtggggggccactggctgcggattcccgagggccacccagtcccggcccggagcctcgtcccacgatatcgcgccacaaggagggcgcaggagccgggacagtccagcggccggaggagagggctggaaggatgtggcagggaagcccaggagccccgacccccagccgtggagtttgccacctgcccccggtccggctcaccacgtccagatccgccgccagggcccagcttctgggtcaaggcccgccgggtcagctgaccgcgcgccaccgcccccgcgggaaccgcaggccccgcccccacgccgcgcgctgggctgaccgggcctggaggcgccgctggggccgcgcctgttgtccccgcccccaactgcctccgcgctcctccccggcatgggcggggcccccgggcccccggggcccccggctcccaacgcgcaggcgccgctgctatgctgagtgccgcgtctcgcgtagtctcccgcgccgccgtccactgcgcgcttcgctctccgccgcccgaggcccgcgcgctcgccatgtcccggccaccgccaccgcgggtcgcctcggtgctgggcaccatggagatggggcgccgcatggacgcgcccgccagcgccgcggccgtgcgcgcctttctggagcgcggccacaccgaactggacacggccttcatgtacagcgacggccagtccgagaccatcctgggcggcctggggctcgggctgggcggtggcgactgcagaggtaacagtagcygcagatcctccccatgcatcgtgtagagctgagcctgtccccagccgtgcaycaccccgctcgggcccggccgcgggcagcaccgacggattcgtccctcgctccccaccccaggtccaccccgcagctctgggaaccccgggacaactagacagtgctttgccctgactcctttcccccactctccttcccttgggagttgcagcgcgagagtctccscccagcctggtctgacccatcgcttcccacctccattgatgcccccgcctccaaacctgccaggtgcccacaaccggtccccacccaggctctcccccttttctctaccccttcgttaccatcatcacgcatgcacaccctgggcacccttttctcatcctggccttttcttaaccactagaatttgacctgtgcagctggcagtacctctgcctctctcagggagaactgtggcgatgccgtaaggctggctgggagagtaggagtgttagggagtgcggacgggtcagggtgtagggactttctatccactctatgccaggctttgacttggggccataggagggaaagtgattccagccctccacagggagttcagagtctaatgaggaagattgaagtaatgattgctggagagcccagaagagagagtactttagggagctgcaggccggggagaggcactagggaaggctcagcaaatgctggatggagctcagccttaaaggctcaatggtaggttggaggagaacaagagaaaggaacattagagtctgtgcaaagacttggtttggaaatgcaatgtgcgtgatgtgtgaaaggaaggccactgggcaggtggggcttgagtggaggatggaggggactgtccctcgtgagcctggtgcccttgatagcccttgggagggtgcctggcactcagtgagggcccagggaacgtgggctgttacccttaccatgcttcacccactggactatcctgaggctgttgctccccacccctgaggagaggttctctctgggtcctcctgagtcatagcgcttggggggtcggggggaaaagagggcaaatgtgaatctcaggcccacgctgtttctagttcacctggctgcatgttgttgtttttgttattattattatttgagacggaatcttgctctgtcacccagggtggagtgcartggcacgatctcagctcactgcaacctctgcctcagcctcccaagtaactgggattacaggtgcacacsgccacgcccagctaatttttgtatttttagtagagatggggtttcaccatattggccaggctgstcytcaactcctgacctcaagtgatctgcccacctcagcctcccaaagtgctgggattayaggtgtaagccaccacgcccggccacgttacatactattaataatgaagattttgttcctgagttggtttttcttctctaacccttccccgcttccgtctttggggccaggagctcactgaaccaaagtcctcaggccaggcctgaggcacagttcatgccaagaatgcctggggcgttgtggggaaatggagaaaatctggatgagaaactgtggaacttgttctgtcccatatcccaactgatctcgtgacacccttctgagctactgagctgactttgctaagtatgaaaagtgcagaatccatcccccaaccaatccagacagctggggttctttttttttgttttgttttttgttttttgacacagagtctcactctgtcgcccaggctggagtgcagtagcacaatctggactcactgcaacctctgcctcccaggttcaagtgattctcctgcctcagcctcctaagtagctggggttacaggcacgtgccaccamgcctggctaatttttgtatttttagtagagacagagtttcaccatgttggccaaggctggtctcgaactcctgacctcaggtgatccacccacttcagcctccgaaagtgctgggattacaggcgtgagctacctttcctggcccagctggggttcttttttaatttttatttttgtagagggagggtcttgctacattgtccaggattatctcaaactcttgggctcaagtaattctccctactcagcctcccaaagtacycccaaactaggtttacagacttgagccactacatctggaccaacagctggggttctttataggggaaagaatagtgcagaattaactcatttccaagctgctcggatgcagaacactgttgtcatagtgatgtgtccctacagtgtttggatatatgctcatgcttctgtgagtcaggaaggggaggggagaattataattacattctgctcagtttgccttctaagctctcaagttgatctctaccactgggccacatttatgtggctgcttcgctttcctaaactcttccaggcctgcccccttgacttctttctctatactgcagccaagtgtgaacacaggtgaccggttcacaccctgacaaaatctggaatgatcaagttcagattcagtgggatggtatttaagaacttttgggatgaggtctgtccctgtctcttgtcctacgtcccactgctccttgctctagaatttatgctcttataacttagacttgaaggtttggagcctcacatagtgtttttttgcctctttgactttgcatgggttcccatgctctggagtgtacttcctgctcttccttgttggctgggactctgggagtgatcccctagagaaagccttccctggagtctccaagttggcttcatgcatctcatctgggctccttggcatcgtgtgcctttccctcctgtgcttaccatattgtaccatcatcctctagggctccaggagggcagagatccattgtgttcagttcatctctgcatactcagtctctagtgcaargcctggcacagccagcaggttggtgactaatgatagttattctaataggtgaacattgagaactcacatatatgacattatttaatccccaggacctcccaatgaggacagtttgattattatcaccccattttacagatcatacaattgaggccaagagaatattagtaatttagccagggttacatggttagcaaatggctctaataggtcacttaaccattccattctctctccaagtgaaaattgccaccaaggccaacccttgggatggaaaatcactaaagcctgacagtgtccggtcccagctggagacgtcattgaagaggctgcagtgtccccaagtggacctcttctacctacacrcacctgaccacggcaccccggtggaagagacgctgcatgcctgccascggctgcaccaggaggtgaggggsccctccgagctccaaaggtgggctcctgctcctttctttatcctgatcctactcatgagagcagaggcaccagggcrgtcccagggtggggcagggaatagccccattccctggggccccaccctggcctccccttcctggtctgggctacactgcrttctgactggagcctyacccatgcagggcaagttcrtggagcttggcctctccaactatgctagctgggaagtggccragatctgtaccctctgcaagagcaatggctggatcctgcccactgtgtaccaggtgagggccrgggctgcagaggccaaggtctccaggactcctgctaatcctgggctctctttgcccccctgactgccccctgtgccgtctgcatagcagccactcccctgctgaaagcctgcagatggctcccatgtaccctcaggatgccattcaagctcctcagcctggccactgggcatctgcttccttcctgcctatctgtgcaccttggacccttccttccccacctcctttcatacttcagcctggaacacatttcccctgccctcctccctgggagaagcactcaggccttacatagaggtctcctcctctggaagcctttctagacagccccataggagtctccagtcyccaaatctcatcttcatacattcagcgagtactttccagctccttgtttgattgtagaacctaactttattgtaattaactgccttccttgtctatttttttaaacttgagtaaacatctcctggaagcagggattttgtgatacctacttgtggttgtaaccagtgtccagcatggagttcatacagcagatatttgtggaaagataccattccacttcaattttctgtccttgggcccaacaccttccctccatcccctactaacagtagtgatgttagaatattgctgaagtcctgggccggtgttgctttagaggtttgaaagtggaaggcaacagttccttctcttgacatgtccaccctgtccccggggtccctctccctgcagrgcatgtacaacgccaccacccggcaggtggaaacggagctcttcccctgcctcaggcactttggactgaggttctatgcctacaaccctctggctggtacgtggagcattcctgaccctgtctcagcctattcctgacccacagatgcccagcccagaatttatgaagcagggagggtttgacaagaggctgggctgtgttcttcagcccctcctgggtccctgcccctcccctagaccagagccctgagggatgtsgcagcttctggggcactctggggccaggggctgattgctgccttcccgcagggggcctgctgactggcaagtacaagtatgaggacaaggacgggaaacagcctgtgggccgcttytttgggaatarctgggctgagacctacaggaatcggtgagccgggggtgggcttggtgaggatggctggggtggggtcaaatctatgtggaatgaagtcctgggctgttcctgaggtaagaccttcctttgctgtttgcatctcctcccctgcattgcttcaggaattcccaagccctctgtgggttttcttgttgtcttgagacctctgggggggaaatgaggatccctggatgttggggtcttgaagtcatagctcgttcctgagcaatcacctgctgggaagcaaaaagcgagcccaggatgggccaggcatggtggctcacacctgtaatcccagcactttgggacaccgaagtgggagggttacttgagctcatgagttcaagaccagcctgggcaacatggtctctacaaaaaaaaaaatgcaaaaaagtggtcaggtgtggtggtgcacacctgtctgtagcccagctacttggaaggctgaggcaggaggattacttgagtctaagaggttgaggctgcagtgagccataatgatgccactgcactccagtgtaggcaacagagtaagaccatgtatcmaaaagcaaaaagagagcccaggagggaatcctgccccatctgagcagccttcgtgtccctagggaagtccctaggctactgagtcctcaggagtaaagatccattgaggtctctgctgaggggcccagcatcctgggtggttctgatgcccagcaaagtgggagacctatgactagagaggacacccrcccctcagggctgcagggtgtggggtggggcagtggtcctggatggctatttggttgcggctcccagtgtgacccccatggtactgacccctgtgctaacatcccctctgcacagcttctggaaggagcaccacttcgaggccattgcgttggtggagaaggccctgcaggccgcatatggcgccagcgcccccagtgtgacctcggctgccctccggtggatgtaccaccactcacagctgcaggtaaccagcgaccctgggtgctcagcttcttcccttccagggggaccagcgtcacctttaggtgaagcccaaagcatttgatttctsaattcctctgaaatttttctttcttccaattctcataagcactcttcccactggtctttgatggtatctgagtggaggctttgtagtgagggrttttcattacagggattttcttattccttaggctttctgaagtatgattatcccagtgttattgatgaggaaacygaggttcacccagctattaaagtggcagacattttaacacaggtttaactaagacccacccatctcacccttttggtttctctctcttgatgcctcatgtcttcctggttaaaacttatttcctgatcagtggcagtgacccacacctgtaatccagcacttygggaggccgagatgggaggattgcttgatctcaagcatttgagtctagcctgggcaagaaaatgggaccctatctctacaacaaatcaaaaacattagccaggttgtgatggcttgctcctacgttcccagctactctggaggctgggatgggaagatggcttgagcctgggaggtcaaggctgcagtgagctgagattacaccactgcaccttagcctgggtgacaaagcaagaccctgtctaaaaaaaacaagcaaacaacaatgaaaataacagcaacaaacttatctccagcttcagccttccatgttgcatagtgtctggcatatatccggtagatgttcagtacgtgggagctgtgttttacataagttttctcattccaatgctgaaaacagagaaaaagattgaatgtcatgcctgcatcgacagcacatatactaaaattggaatgatacagagaagattagtatggcccctgcgcaaggatgacacgcaaatttgtgaagtgttccatatttttccgctgccaccaccacaccgcactacctcccacccccttttgtgtacaaaacacaaggaaaaatatttttgtttgaaaaaaaaaaagatcgaatgtcaaaacaagcttaataacrtagcctgctttttaatttttttgagacagagtctcactctgttacccaggcggtagaacagcagcacactcatagctcactgcaacctcaacctcctgggctcaagtgatccttctgcctcagcctccctagtagctgggacaaggcatgcaccatcacccctggctaattttgttttgttgttttttgtagagacagagtctctctctgttgcccaggctggtcttgaacactttggctcaagtgttcttcccaccttgacctcccaaagtgctgggattgcaggcatgagcctctgtgcccagccaacttagccatttttacacagctgctgggggcagaactgggctgtgaatgtagttctgtgtggaagcgtcgtgcggcagtaggggaaaggatgcgggtttcaagtcacgtgggtacwgctatccaaggcaccttaagtcctttctggacatacaagatataaatataaacagagaccccagatctcagcagggaggtggctgggacggctgtgagtggagtcgctgtgcagcagaagagggttgaagtctggccgtctcccttgcagggtgcccacggggacgcggtcatcctgggcatgtccagcctggagcagctggagcagaacttggcagcaacagaggaagggcccctggagccggctgtcgtggatgcctttaatcaagcctggcatttggttgctcacgaatgtcccaactacttccgctaggcccrtcatggctcaggctgcccaaggcttttctgtcacctcttttgttctctcacactgaccagtcttggccttaagctgacttagaagggtttttctgaattgtctagatccatgcattatttttctagcttcctgccttgctccctattcactttacactgtgaaaggtggggggtgagtcccacttgagcgcttcctgttgaataaagcaggcacttgacctggctgtagcctaggtcttgagtgaaccccaaaaacttgctttctctgctgttaacactttgtttcccatcctacctggggactgagaaagggcagaaccatgggctggagtcttcagagggcagaggtagtaggagggtcacagaagcacactgccctcccagggtctcctcgggcccctggtctgaatacccacctgacctctcaacattgaggtgtctctcactcttctacacacgatagaaaagagagtcatacacctgcagtacattttctctaattcagagttgcctcaatacattcttaggaatgaaacaactgggacaaagaaactaccattagagtcactaccaagaagaagaacacttcccaggatctgtggaacatcttgaagctctcaatcttagcctcctcttgtcttaactaaagcctcttgtcttttcacccattaggttctcagtcttggctctgggcctcctgttcggcatggggacagacataggcagccaaggtcctcatttcccttggaaacccctactccaaacaggaggcaccaaggctgagaataagaatccttggttcagtggttgctgaacctgctgcattcccagtgcaccaaaatccctccagccatgggcagggcagcaggcagcacttggagcagcttcttgaagcaatgaaagaggcccaacctggaaatttactttttcatttatatttattatttgttcttgagacaggctcttgctctgtcacctagaccggagtacagtggcatgatcactgctcacagcaattttgacctccggggctcaagggatcctcccacctcagcctcccgagaagtttttatttttattttttttgtggagtggagatctccctatgttgtcaccgtcttttctgtttacccgtaacaaaacagatgctcacccatgtggaatggtgtatcagttatctttgcacaacaaaccacactaataagttgcttgaaaagataaaatccaaggctggcacagtggctcatggctataatcccagcacgttgagagcccaaagcaggcagatcacttgagctcaggagtttgagaccagcctgggcaacatggtgaaaccctgtctctaccaaaaatacaaaaaattaatctgtgtgtggtggcacatacctgtggtcccagctactctggaggctgaggtgggaggatcgcctgggccccggaaacagaggttgcagtgggccgagatcatgccattacactctagcctgggtgacacagtcagaccccatctcaaaaaaaaaaaaaaaaatcttattgatcaaaagatttgatataattcctattattcccagctgactttttcttaatactgaaattgacaaactaatcctaaagctcatatggaaattcaagggacccaggagaaccaaaacagtcttgaaaaacacatagttggaggacttatactttctgatttcaaaacttactacaaagctacagtaataaagacaatggttctggcataagaatagagcaactgaacagaactgagagtccagaaataaactcttactgattttagagttgagtgacaactcaatagggacagttcaatagggaaaagaatcatcttcaccaacatccagatgtcctgctgtgaaagagtgaagttggaccccttccccataccataaacaaaaaattaactcgaatcaccatctaaatgtataaggtaaactataaaactcttagaagaaaatacttgagtcaagtgtgactttggattaggcagtggtttcttagatgttgacaccaaaagcacacgtggcaaaagaaaaagtaaagtcaacaccatcaaagatgaaagtgttcgtgcttcagggaacactatcaagaaagtgaaaagacaacccaagaatgggatagtattttgcaaatcacatatctgttaagaatcttgtatctattctagctataggactcttacaacttaataaaagagaaaacccacctgggtgcactggctcacgcctgtaatcccagcactttgggaggccaggcggacggatcacttaagcccaggagttcaagaccagcttgggcaacacggcaaaaccctgtctctacaaaaaataccaaaataattagtcgggtatggtggcgggcacctgtggtcccagctaatcgagaggcagaggtgggaggatctcttgggcccaggaggtggaggctgcagtgagccaaaatcagaccattgcactccagcctgggcaacagagcaagaccctacctcaaaaaagaaaaaaaaaaaagaaaagaaagaaatcccaattaaacaatgggcaaattattggaatagacctttttccagagggcatacaggtggtcagtaaccacatggaaagctgctcaaaatcagtacttatcagggaaaagcaaatcaaaaccccttcaaatctgctaagcactaggatcatcagagtcaataaaatacagaaaataacaagtgttgagggtttggagaaatgggagacttaggacaccgccattgagactgtaaaacggtgcaaccattttggaaaacattctggcagtttttcaaaagattaagcatttatatgacccagaaatttcactccctaggtatacctagaagaaatgaggctgggcgcagtgtctcacgtctgtaatcctagcactttgggaggccgagatgggcagatcacctgaggtcaggagttcaagaccagcctggccaacatggtgaaactccatctctactaaaaatacaaaaattagccaggcgtggtggcacacacctgtaatcccaactacttgggaggctgaggcaggagaagcgcttgaacctgggaggcggaggttgctgtgagccgaaatcttgccgcagcactccagcctgggtgacagagtgagactctgtctcaaaaaaaagaaaaaaagaaatatatgtccttattaaaaattacgtgaatgttatagcagcattattcataatagccagaaagtggaaactgcccaaatgtcaatcttaatagatgaatggataaacaaaatatctgtatgtacaatggaacatttttcaaaaaaaaaaaggaattaagtatgaaacatctacaatgtggatgaaccttaaaaacatgttaagtgaaagaagccagtcacaaaaggcctcatattgtatgattccatttatatgaagtatctggaataagcaaatctattagacacagaaagtagatgagtggttgcctaggactgagagggagtttgggaggaaatggagattcactgctactgagtacagagtttcttttggggaggtgataaaaatgctctgaaattgactgtggtggttgtacaattcagaatacactaaacaccattaaattatacactttaagtgggtcagttgtatatagtgcctcaataatatgtaataaaacaatcaattagctcagaaatctgttagagcagggctcagcagggaagcctcatctgttcctcagtgtctcagaggtgatctagcagctggaggctagggttgcctgaagacattcactcaagcatgtggcagttgctgctgagggccagctggaatatcagctgctgtcatcaaccggcacacacgtgacctctgcatgtggcttccaagggagcacatcccaggcaaactaggcagaagccatgtggccttttatgtcccagcctcagaagtccataacatcactcttgtgtcctgggaggagagtcaaagatacctgtgcaaagagcacgtgagagaatggagtggttatctttggaaaataaactgtaacacttggagcaacagtcctgagtggagaaggtgagccccgggacctgccaggagactgtgtcttgactatccccatcagagatgcattttctgctatgtcacatcccatccgttagaatcttccggatactatatctcatagttgatggtctcttgaattcagcaatttcatatctaaagagattcttgaagacaccatgttgtacaccttaaatatatatacaatttttatttgttaattaaaaaataaataagtgaggccaggcgcagtgggtcacgcctgkaatcccagcactttgggaggccgaggcaggtggatcacgaggtcaggagttcaagaccagcctggccaatatggtgaaaccccgtctctactaaaaatacaaaaattagccgggcgaggtaacaggtgcctgtagtcccagctactcaggaggctgaggtggaagaattgcttgaacccaggaggccaaggttgcagtgagctgagattgcgccactgcactccagcctgggtgacagagcgagactccgtctcaaaaaaaaataataagtaagtgagaaggaacaaaaaaatctaaagaagcagagctggatctggagagcatctcatatatttaatcatcctcaaactaaggaagctgttctgtgctgtatgaaagactgaaggaggagggggcatcgattttttattttattttatttattttttatttattattatttttttgagacagagtctcactttgttgcccaggctggagtgtagtggcatgatctcggctcactgcaagctccgcctcccaggttcacaccattctcctgcctcagcctcccgagtagctgggactacaggcacccaccaccacacccggctaatttttttgtatttttagtagagatggggtttcactgtgttagccaggatggtctcaatctcctgacctcgtgatccgcctgcctcggcctcccaaagtgctgggattacaggcgtgagccaccatgcctggccgattttttattttaacgttttgttttatcttactgtttttccttaggtgagaaaaatgtacccttccatgcctgtgctttctaaattttgggactgatacagatccacagaggccacacctaaaattaaattatcgttagtgctaaaacttaattgactgtgtatataactgtgcaattgctgttactgatataactgtttggggttcattcaacagattaaagaagcaaggtcttgcatttaacacacaaactaatgagatactgctttatacaagaattttaaaaacactgtcatatggtttagtgtagttaatgtcatgcttatgtcatataacatagcatgttagagttctctagagggacagaactaacaggatatatgtacataagaaagggagttgattggccaggtgtggcggcttatgcctgtaatcccagcactttgggaggccgagacaggtggattatctgaggtcagcagttcgagaccagcctgaccaacatggtgaaaccccatcctactaaaaaaatacaaagattagctgggcgtgttggcaggtgcctgtaatcccagctatgcaggagtctgagacagtatcacttgaacccagggggtggaggttgcggtgagccgagattgtgccactgcactccagcctgggcaacagagtgagactctgtttcaacaaacaaacaaacaaacaaaggggggggagtttattaaggataattgactcacacgttcacaaggtcaagtcccatgataggccggccgcaagttgaggagcaaggaagccagtggtggatcagcctgagtcccaaaacctcaaaagtagggaagccaacagttcagccttcagtctgtggccaaaggcctgagagcccccgacaaaccaatggtgtaagtccaagagtccaaaagctgaagaacttggagtttcatgttcaagggcaggaagcatccagcacaggagaaaaatgaaagctggaagactcagcaagtctgctcttccatcttctcttgcctgctctattctagctgggctggcaggtgattagatggtgcccacccagattgagggtggatctgcctgtcccagtccactgactcaaatgttaatctcctttggcaacaccctcacagacacaccaggaacagtaatttgcatccttcaatcctatcatgttgatgctcaatattaaccattatacattggttcaagttctttcttcagtcacaagagtaacacaggtagaagagacaaatgaataagtgccaagtcttgctgcagagtttccttcataagttttgtttgcaacctggccatttcttttctaaggtcactttgttcatcagtaagatgaactctgattctcttctaggtcctccaaactccgtaggaattgctgatttcagtttaatttgtttcagtgtctctgtctctgaaccattctagcttatagacaactcttttgttgctctcgaaacattgtagctagtttttgttcctctggttcctcagccttcactgttcgtgttccaatcttgaaacaaagtcagaaactgcttagaatatttgtaatgaagtttctgcctttcctcttgtgttttcaaaacatgttcaattctcttcttagtggtgtggataaaagcattcatatactcctgtaatcccagcactttgggaggccgagacgggtggatcacgaggtcaggagttcgagaccagcctggccaacatggtgaaaccccgtctctactaaaaataaaaaaattagccgagcatggtggcagcgcctgtaatcccagctagtcaggaggctgaggcaggagaactgcttgaacccgggaggcggaggttgcagtgagccgagatcgcgccattgcaccccagctctgggcaacagaacaagactctgtctcggaaaaaaaaaaaaaaaagcattcatatacattctagcctttttctctgtgtagcaaaatcctgtttaatatcagctccgcttacttgtaacttctgtacatcatcccccacgtcttcctcatctgttcctacaaagtgctttctttctccatgctcatcagttcctgaatgctttcctcccagctcatttcctgggctgccataacctgggcctccactgccttggcaaccttcacgatgcactccctgtccacaggctccatggctggctgtcctggaacttctgaaccttgtgagtgcaatgatgcactggaagtaggtggagatgtgtgtgatctgcaggcttgggtatctggaggccagtgggcacactggacactccctgtgatctaagaacttatttaggcagatagtgagggtaaggaagtccttggtaaggttttccttttaatgaaaagcagcccccgaatcatttctttcctaacgaagtgcagcctgtaaaatcaagctgcagacatagatcagcaagctggaagcttgcaggggtgaatgccagcagctctggcaataggaaaaggccccctggaggctaggcatgttcaacatggtggctccatctcccctttttctttatcaaccacatgtacagtaaggagcaggcaacgtggcgc

SEQ ID NO: 95989 - DNA, 14977 bp, Homo sapiens
ttcacccacattttatgttctctgcagccccactggcttaccttcagcactcgagcaaaacgatccagacaattacccactgcaatatcgatggtttccccaaagatacggtaacgatgttccgagtatgcaatcacctaagggtgatgaggatgtccatgaaaccccaagtctgtaaagaggattatttggctttgggagaaaaacatagcagaggatcaacatgaccaccagggcttccaataagaagtggaagaaaggtgtttcccaaatggtgaatgggtagtttttacagctctgatttgagaagaaatctgtataccctgaggattccaggaacagattcctagacagtgtaggttcaggcagaaataaactgtcatttcaaatacattggttttccggcttagaagttcctaatatatcccttaaatgcagtcttgatagtaggtaactggcttttctgcttggaggcagagaacatgaatccttctaaattatgacacagtggcagtggtaatttttttttgagacagggtctcgctctgtctcccaggctggagtggagtggtgtgatcatagctcactgtagcctccacctcctaggctcaaaggatcctcccacctcagcttcctgagtagctgggctaccatgtgtggcttatttttatatttttgtagagatgggggtctcactatgttgcccagcctggtctcaaactcctggtctcaagcaatctacctgcctcagcctctcaaagtgctgggattataggtgtgaaccaccgtatgcagctgggcagtggtatttagaaccaagaagcagagctgaagaactcaaaaatctcatatggagtcagactaatggcccagccaagtcagcaatggcaattcacttaaggccatttttcttttcttttttttttttttctgagacagagtcttgttctgtcgcctaggctggagtgcaatggcgtgatctcagctcactgcaacctctgcctcccaggttcaagcaattctcctgcctcagcctcccaagcagctggaattacaggcacccaccaccacttttttgtattaaggccgttcttcatatgtgaccaacttttagcacagagaatatctgtcccttactgacacatattctgcagacttataacaccgagggcttcctacgaaccttaagaagtccctttcccttcccagtgctgttagggatttcttccctttctgatacagatcttaatctgctgtcaaaaagacagtaacaaaggcgaaggaaaaatcctgcctttctgcttctgctatccactcctctccacctaatcaccctccctgtttcttacacctaagcaaacattaaaagagaagaggaagacaaaaccgtcactgctcctttcatcaactcttgtagcctccattatactttccacaacccaagtctctgaccttgtatgtcatccttcaggcctcaaccaactacttgccctctacctgctgaagtttctgcatcattttcatgggaaacatgtgcctcatcttctcgacacaaccctttcatgagctggggacaatgctgaactatttctaatgataatcaagtgttctgttggaaaagaatccaatcccaaccttaaaaaggtcatataaggtaacccaaacaactttagcttcacctataaatttaaaataccttctggccgggcatggtggctcacgcctgtaatcccagcacttagggaggccgaggcaggtggatcacctgaggtcaggagttcaagaccagcctgaccaacagggtgaaatcccgtctctactaaaaacacaaaaaattagccaggtatggtggcgggtgcctgtaatcccagctactcgggagtagagaagaatagtttggacccgggaggcagaggttgcaatgagccaaggttgcatcattgcactccaacctggacaataagagcgaaactccatctcaaataaataaataaataaataagataaaataaaataccttctataatttacaaagtattttttaaagttatttatatttctaaactcttagaataacaaagtctacataatcattcccagtaatataaaaacaaaacatgtacttgccccaaaataataaatcaggtagtgtcctttagttgtttttttttgttttttgtttgtttgtttgtttgagacggagttttgctcttgttgcccaggctggaatgcaatggtgcgatctcggttcaccgcaacttccgcctcctgggttcaagtgattctcctgcccagcctccggagttgctaggattacaggcacctgccaccacatcaaattaatttttgttatttttagtacagatggggttttgccacgttggccaggctgggctcaaactcctgacctcagatgatccacccgcctcgacctcccaaagtgctggaattacaggcatgagttgccatacccagcaactgttagtttcaattgctaagatttatagaaaaaataagcttcaaaataatgcaagagctttcagatattcattattttgaagatttcaatccttttcaatcccattcattcctttcctgaagtagaaattcctaatctttataatcagatataaagtctgataatgataagccatctaatgttctgatcatgctgccaaaatttgcaatgttacaaactctgttgggggttttctggtctacagtattttaggttcagataagtccatctttgttcctgacattcccatgactcagatagaacaaagaaaatactggttcagtgcctcagaaattgagatggagtgggtagagccctctaaatacctgcgtatttcctccactcacatacaacacggttgggctggtggctccagtgatgaggcggcccatctcaatgtggcctatacagtggttcacacccaccaatggcttattccacagytgggccacagtacgggccacaacagccacagaaaccagtggggcacccatgccagggcctagggagatagaaatggaagttataatcctagagattggaaaaaaacaatagtgggggacataagggatgtgaggtggggtaggggtagtgatggtggcagaggtaaggtgttggctattttgacctagccaggttgcaggtatattcctccatcgttgaccactctcccagccatacccttggtgtatgcaatgcagtcgatatcctgggaggttaatccagactctgttagtgcctcctgcagcaggtctaggataacagctcggtgatgcctggctgtatcacctggaaggaatcctagaaaatgaacataggtcagagatcacagggattttctgtagcaaaggtaggtaggaagttaaagaaagcaacaggagttttagtgatgtagtaagagtcctttcactttccccaagcatcctatcttccacattttcacatctactctttccggcttctatataggctattcaactttcagaaatgctcttcttcttaccctactcagccttcaggtctcaatgcaagtagtatctacctcataccctttcgtgatcttttttttttttttttcttttgagacagtctcagctctgtcacccaggctggagtgcagtggcacgatctcggctcactgcaacctccacctcctgagttcaagagattcttctgcctcagcctcctgagtagctgggactacaggcgacaccaccacgctcagctaacttttgtatttttagtagagacggggtttcaccatattggccaggctggtctcgaactcctgacctcgtgatccgtctgcctcggcctcccaaagtgctgggattacaggcctgagccaccgtgcctggcctttggtgatcttctttctctgtgaccctacagaactctatgcatgatgatgtcatttatttaacataacaattacagcattataattttctgtggtttgctcagcttaatcatgaatatctcaaagcattgagtattttatttatctttgtattcccagtgcccaagtgcccagaggagtgaatgctaaacatacatatatatttctagtgagtatctgtcacaacatcacctgttcagggaggcttttcagatacatgcaagtcagctgccctctcctatgtatgcaagtgtttgaggggagagtagcaagatataatagcttatttaaaatatcaattaaaagttgtaatgtgttttgtactttttttttttttgagacagagtttcactcttgatgcccaggctggagtgcaatggcaccatctcggctcactgcaacctctgtctcccgggttcacgcaattctcctgcctcagcctcccaagtagctgggtttacaggcatgcgccaccacgcccagttaattttttgtattttttagtggaaacatggtttctccatgttggtcaggctggtctcgaaccccgacctcaggtgatctgcctgccttggcctcccaaagtgctgggattacaggcgtgagccaccacgcccagccgtgtttggtactttcatctaatcttcaagacctaatgatacaggtattattcccattttaaaaacaaagaccaggcccgagcggtggctcatgcctgtaatttccacactttgggaggctggggtgggcggatcatctgaggtcaggagttcgagaccagcttggcctggtggaaaccccgactctactaaaaatacaaaatttagctggatgtggtggcgcacacctatagtcctagctacttgggaggctggggtagaagaatcgcttgaacctggaaggcagagattgcagtgagccgagatcgtgccactgcattccagcctgggcgacagagcaagactctgtctcaaaaaaataaaataaaataaaaaataaagaccaaatgtccaaaacaaaaatatttaatatgaatatagcaaagccagccagttctgtctgacatgtaagccgggagtctttccactctcatctctctactcatcctagaatatttcaaaaaataatttttttttaaaaagggagtgtatattcagggcaactggaatctatactcctgctaagcgttttttaaacagaatatttcgagtccatctctattatactgtttatcatgctgtagtataaacatctatttatatgtctgactccacagcagtataacatctatttctgaatacttagcacataaaatgcgctcagtaaaaggtaaatgaactcatcagatccacgtccaagtgcctgtaactcttctagtcatcagccttgtgacgttaataatgtcacataatttcaatgagactcggatcgaaagctgcacctcactagtatttaggaagatggaaggctgattctgtgcggggaagtgcgcggaaaactcttaagtcccctactcaccaacctgtgccaggaggcgtgacgtaagtccgccgcgggttcgccagcaccttgccatcccgcaccacgcccacgccaatcttattggcgctgccttcaaaacccagcaccgccggcatggcggaggctgggagaaaacgccgacaggactcctggcaatgtcaggagctgtggaggtcctcactagtccgcgctgggccgcagctttccggagcgcagaggaagctggccagcctgcagatagcactgggaaagacaccgcggaactcccgcgagcggagacmcgccaaggcccctccagggacctgtcttcctaactgccagggacgccgagccaactctgtgccttacattcgtatccgttttcctatctctttcccgtggtccagcccagccttctccactgtttttttccctcttgcacatagttagaatcttaagtcagtgtcacacaatgtgctgtgcatctggcacaacgataaacagcccgagggagggttggggacctaagtgtcctagagaattagaggagggaggcgaggctaagcgtctccgtcacgtggtgtcagacagaccaatcacgcgcattcttcggccacgacaagcgcgcctctgatcacgtgaccaggtccgctacccacgtgggggmtcagcgtgcacccttctttgtgctcgggttaggaggagctaggytgccatcgggccggtgcagatacggggttgctcttttgctcataagaggggcttcgctggcagtctgaacggcaagcttgagtcaggacccttaattaagatcctcaattggctggagggcagrtctcgcgagtagggtacaaggcactatgaaatgatctagtttcgtgggtgaggggctgaagggcctatgatgcacggaggcggggaaaggatttagagataacgtggtttgaaaggcgggacctggtgcggggacgctcttgggaggagtcttctccccagccttagctggtttcatgatttctttgcgtytgtaggcaacgcggtaaaaatattgcttcggtgggtgacgcggtacagctgcccaagggcgttcgtaacgggaatgccgaagcgtgggaaaaagggagcggtggcggaagacggggatgagctcaggacaggtaagggaatgaaatcagcccttcttcctagaagctgcggcgggggtgtttgtcattcccttgatgtacggtaagtacgggccgactcatttttgcaggggtttgtgaagaagtcgcaggaaccgtaggctttcgttgggtctatagttaacgccggatcgcagttggaaaccaccagctttttgtcagtatatattactcattttatagagccagaggccaagaagagtaagacggccgcaaagaaaaatgacaaagaggcagcagragagggcccagccctgtatgaggaccccccagatcasaaaacctcacccagtggcaaacctgccacactcaagryctgctcttggaatgtggatgggcttcgagcctggattaagaagaaaggattagatgtgagtggaatttgagggaaagagacattttttagtattgaatggtcttagggtttagtcaccccttttctccgtttagccttcaggctgttttatttttctcctgcccgtagttttctgtggggcttccccagtcttgccagttgtatttcctaaatgtctgttccttcacttccattgccattttcttttttagtgttctctcctcttcccagaatgttgcaaaaacctcttcactatacttcctccattttatcttcctgcattgcattccatatgaagcatgtcctccattccattaaccatagcttaaaaatcttagcttgctatccactgcctatagaaaaaacacatctccttggcatagcatgtaagactttcttacctctctatatttgttttcatttatctagcttagaattgtttgaatattgtgctgcttgactcgaactccttaggccaagagactgtttaacccgtgcgtatctatgacttagcatatagattattcaataaatgttctgctgaattgataatacgttttccacctttcttttcacttacagtgggtaaaggaagaagccccagatatactgtgccttcaagagaccaaatgttcagagaacaaactaccagctgaacttcaggagctgcctggactctctcatcaatactggtcagctccttcggacaaggaagggtacagtggcgtgggcctgctttcccgccagtgcccactcaaagtttcttacggcataggtgagaccctattgatgcctaatgcctgaactcttcaaaaccaattgctaattytctatctctgccccayctcttgattgctttcccttttcttatagttttttatgctaattctgtttcatttctataggcgakgaggagcatgatcaggaaggccgggtgattgtggctgaatttgactcgtttgtgctggtaacagcatatgtacctaatgcaggccgaggtctggtacgactggagtaccggcagcgctgggatgaagcctttcgcaagttcctgaagggcctggcttcccgaaagccccttgtgctgtgtggagacctcaatgtggcacatgaagaaattgaccttcgcaaccccaaggggaacaaaaagaatgctggcttcacgccacaagagcgccaaggcttcrgggaattactgcaggctgtgccactggctgacagctttaggcacctctaccccaacacaccctatgcctacaccttttggacttayatgatgaatgctcgatccaagaatgttggttggcgccttgattactttytgttgtcccactctctgttacctgcattgtgtgacagcaagatccgttccaaggccctcggcagtgatcactgtyctatcaccctatacctagyactgtgacaccacccctaaatcactttgagcctgggaaataagccccctcaactaccattccttctttaaacactcttcagagaaatctgcattctatttctcatgtataaaactaggaatcctccaaccaggctcctgtgatagagttcttttaagcccaagattttttatttgagggttttttktttttwaaaaaaaaattgaacaaagactactaatgactttgtttgaattatccacatgaaaataaagagccatagtttcagccttgctgtcttcgtgtcttaccccttcgtggggctacacattctcttcctcatattttcatgcacacaagttaacaactgaaaaagcgtagagtcatgaccttatttatttacaagcacaggataagtccctaacctcccccaaagactgagcaaccctacccagcccagttaaatactgcaactgggggggtaaaaaaggtcgggaggaggaattaagggaaatacaggaataggggaacatatcccacattaaatagttatatacacatcagttcctgtggttctgtacagagcagcggctgaccccacccccacaggacacaatgtggggagaggagactgagggtactgaggccagagccaacctctggtgaagtgcaatagcagcagcaaagtcctaatggtgcacaagagggaggggaacccccagggctacccacccccaccctgccctggaatgtgtaagggacaggaatggctctcagggagcacacaggaaggacaaggctggaaccgtcttcagggcccagttttaagggcaacgttttgcctacttcaccctagacacagcaacccttggaggaaagcagatggtcagcagtgctcttatctgcccctccaaacctaagtgagggcctggttccttcctacctctccccagggaaaaggaaggcagctgcttggcttccttctagaagccccgggagcctttaactaccccagctcccttcgtagtgtcactgtccccaccagggaggggccaggcacagtctgtgggtcatcaggctcaggagaagttctggacagggtggctgaccttcatacaggcccaataaagagcccggcccaaacacagcacagccaacaggatgacaaatgcccaggctgcatagatgcctccatatcgccgtgcatgcttccatgtgccaaactgatgaagataaggagggagaagaaaagaaagatggggttaatgttggtctccactacctcctattagttctaagaacagtaataactcacgcttcagtccttgttccttatccacatgtagccaccctcagggaccttcttaaaggcagagctgatcagcttccttcccttaggcgtaacatactcatcccatcccacactgtatctcagtttttcttaatatctgacaactgagccaggtttgaaaaatagcaactcttaaattaagaatttcactgtcctatcctcatcctacagagaaaggaaggctgtttttcactcttgtagtagtaataaagtctgtttgatcagccactttgcactttagctcatccatatcttaaaacaaaacaaactagtcccccaagtttcttccacttttttttagggtagcagtttcccaaatcttagcctatggagatgaggctgcagaatgaaagaggttggggcaagggtactcacggcaaggccagtggcagtgactgccaaaagcaagccaagcaagaagcagcagatacatctcttacgtgggtatctgcgcccaatagatgacctgtggggaggcaaatagaaatggatgctttctatggccttgtagtttttactccatacatcaattaccagctcaatccctaatcacttacactttcctgcagtgaggacaacgtgccaaagtgcggtctgtgaactctgtccactatggagaaasaaaacaaaaataatagcacaagcagggtctccctcaatgagaaccttggggtggggatgcagaacatgttcccataggacagacctttcaggggtcattaccattactctaagaaatatactcgaaatgactcttagtctcctttcccctccccttcccaataccscttcctcaccagaaaagtattcttgcaatgtccacagataaccctgacacccatgggttggggttctggactcagaggtccgggatgcacaggccccaggttgatgattcttttgctatacaaaagaaaaagacttgtattttcaaacttgtgtttgaaaaatttttaatcctaaaaatcttcacagtccctgttccacatcccccactccctgtctattaagtcactcgacttctctgtacttaagatactctgtcccccaactgtataccctcaagaatccttgagaaagaaagagcactgtttaaacttcaggtccccaattcccctccgacctcaggataacacacccagtccccaaggctctctattctccgaaacgacatcatttcatctcaatatttttattgagaaacgagaaagacagctataacattcctgaggcacatgcttcaaagccttttctcctaaataaacactaggctctctcacctttacattctctgtatacgctcatccttttttgactttccagttccccacttaggcccttccccaccttatgcctcttaccagtagggmcgagggcatgcaatccgttgggatgtcactttgcagataaggagacagttacaggggcatcgaacatattttttccytgggggtgcattcttgattggctagagaataatagggtcatcagcaagcaaacctctaatcccaatcccctccacttccctccaaaaacactttatgagatcagaaaaataaggtgctaaccaggaaggagaaataaaagaaagactatatcatgagatttgcaaataggaactaggctaggtgtaaaagtgagagaaagtgaacattagctttggtgagtggcttctggggaaatggctgtgtgagacacctggaactgaaacctgggtatcatcaaaagcacttggctaatagccggaaggtcagggtctagaaccaagacatcagaaagaggatccaggaaacagggcccatttcatagatatgtgtaactcacggtggcttcattgcagacaccacatttgactacatgctgatgcatcttgccttccacgttgatgagagattggcagactcggcaggtgatcataggggcactcccactgtccgggctagttaagggtgaataggggggtgggtcctccccaggcaacacggctggatgcccctcgggaaacgggggaaatgctggagaggaagcaaatagaagggctgggatcacttacacccccactgatgctccacggtggtagggaagtccttctgatcttcaaccctctgaccaagctcggagggcttctcataattggcacttctatcaggttgctcagaacccccttccgtccctaggctgtggtcgcgattacggagggaaggaagcctcgcccagtcacaggtgcagcagtccsgcacctggcgactgggacccgcctccgccctcggtcccgccccctccccggctttcagagtaccccggggagcacctcggacccgccccggcttaccctggggcggggcatgtttaccggctccgtacggtggtgcggagggggtcaggcctcccccgggcccagccccactcccgccgggccccactaaaccgttgccgcccgcgccaccgtcgatgggctcagacagcagcggggaacgctctccatctgccgccatggccgccaccgccgcctcccgctcaggtcggcgatccggctcccttcgcctctgccgtcgccgcagccaccgccaccgccgccaccgccaccgccgctaccgggtccccagggcgcctgcgcgccgcgcgcccagctcactccgcaaccagtggcctgccccgccccgttccgtctagcagcacgtgataggctatccccgcccgggtcatgctattattcgcgtagataaaccaattcctggtcctgtgaaggcagctctccttttccattggggagcgacgcacaaacgtcaactgtcacatgacctgccagatgctgctgggcttgcaaaacctgcacgtgactagaggttctgcaagctattgggagcgacgcccatcgcgctacctccagaccaggaggtagggctaggctgcgtctgctcaactggtcacgtgtttctggaagctgcacggtccctgttgctctgctcctcattggttcaaagacaccactaaaacacttttctccggctttgcgttgtagctggtttcctattggctggtgactttacttctttcgtcctgtgatcctagcggcgcaactgcattggcccgaacttagcgccagaacatggggggcgtggcttatgcattttaaaggaggctgggcgggtgcaataaaggagtgcggaagcttgggatcttctgagcggggagaaaatggacggtggggaacagtagacaaagttagctgttctactcaaagaagtacctttaaaaagtcagagtaatgaggtaccagaaggaaatggattaaaaagttaagattatcactccagcctttgtcgctagagtcactttcaggacaggacacaagactgggttttcctggaagctgtccttacagagccccgtctttccccattgctgatcaaattgttaaattatcttttcattagtgtctccactactagaagatttcatcgttttactaaaaaaaaaaaaaaaaaaattcaatagagatggggtcttgcctatgctggactcaaactcctgagtttgatctcctgcctaagccttcccagtagctgggactacagggacaagccaccgtgcctttactcagttttatgaccaccaacctttaacatacgcacaagtttgtagattggattaatcaaatacaaggttattttcgtcaccttatttgacagatgggacagtctttaggcctgtctcaactttgcttccagcaaaggggcagtgcctcctcccctacctgaagtctcgtgtggtctttatgggcgcctgaaccacacctggattttttcccaagtcatagcccaaactgggactgctttaaatatgggaagcaacaaggaattgataaaaacaataaaccccgaggaggtccattatcagtttggctagcagactctccactaagaaaggaagtgcatcaaagaaagtacagccagccccaaatatgtaataacaaaggaactgcagatgtcccagcacttggctgctacaggggctggagacttcacctaggtcctgatttttttagacagggttttctcaggccaacttctacttggaagctagtaaccttcgaccagttagataagagcccctaacagacacttaaagaactaaggaagctccagatacaaaatagggaagaggttgtagctccatagagggaggccagtctgctgctttttctgctgtttgtggcacacagatgctcaagcattgtctggggttggagtaggatccattatttgcgccctagttacacatatattccaaaaactgtcctaaaaatattttttaaatatctacactttgtgaaagacactccttaaaaaagcttacactctgggtagggagacagaatagtgtaaacattgacagtataacatatcaggtcaggagtggtggctcatgcctgtaatcccggtgttttgggaggctgaggtggaggattgcttgagcccaggagttcaaggttacaatgagccatgatctaaacctgggcaacagagcaagatcgtgtctcaaaaaaaaaaaaaaaaaaaagaaaatcagcactagtattttattacatggaaaaatatcaatactagaaattcatgatacagcacatgcttcataataaaagaattaaacaatgtaattcaagttcaagaaaagaagagatcacttctagctagagcagccagagaaaacttctaaaacataaagaaaaatgagtattgtgcatggataactaggatctgagctctgtgttgttgagtagatcaataggcagaaaaatgcaaaaagtaatcataatatttggaacttgctcacagttaataaagcatttttttttttgagacagagtctcactctgtcgccaggctggagtgcagtggtgtgatctctgcccacctcccgggatcaagcgattctcctgcctcagcctcccgagtagttgggattacaagtgtgtgccaccacacccagctaatttttgtatttttagtagagatggggtttcaccatgttggccaggatggtctcaatcacttgaactcgtgattcacccgcctcggcctcccaaagtgctgggattacaggcgtgagccactgtgcccggccaataaagcacattcatagttatattcattttatttcagaacccactgtgatgtggacagggaaggcaagactatatctttattttacagatgtggaaactgaggctgtgtaaactggagtcatttaagctaagtgacagattgaaatgg

SEQ ID NO: 95990 - DNA, 19699 bp, Homo sapiens
aaaatcagcactagtattttattacatggaaaaatatcaatactagaaattcatgatacagcacatgcttcataataaaagaattaaacaatgtaattcaagttcaagaaaagaagagatcacttctagctagagcagccagagaaaacttctaaaacataaagaaaaatgagtattgtgcatggataactaggatctgagctctgtgttgttgagtagatcaataggcagaaaaatgcaaaaagtaatcataatatttggaacttgctcacagttaataaagcatttttttttttgagacagagtctcactctgtcgccaggctggagtgcagtggtgtgatctctgcccacctcccgggatcaagcgattctcctgcctcagcctcccgagtagttgggattacaagtgtgtgccaccacacccagctaatttttgtatttttagtagagatggggtttcaccatgttggccaggatggtctcaatcacttgaactcgtgattcacccgcctcggcctcccaaagtgctgggattacaggcgtgagccactgtgcccggccaataaagcacattcatagttatattcattttatttcagaacccactgtgatgtggacagggaaggcaagactatatctttattttacagatgtggaaactgaggctgtgtaaactggagtcatttaagctaagtgacagattgaaatggagctctaaatccccgtcttctgacttatgatctaatattttacattcaaataatttgataggtagattgaaagggacagaagcacagaagtggcagagagaaggtgcttgggatgagcccccttttatgctaaatgcctggaacatagaagctgcttgatagatggctctctaattaattaatgaagtaacttaagccccatcttgggataaatttgctgggtactgaacaatattgttagctgcagttgcaagcagggaggatattcagctggggcactacagggtggctggcattggttgtttatggcgccattggttctgattggttggtacctgtattttacagataagccattttaatattatctctggtaaatattgagtgtctcaggtattgcctgatttttacctatggggtgggatcttctcacttagattgagaacagttaggctattgaggtgtattaatttgctaggacataaaaaacactatagatagcataaacgacaaacatttattttctcacagctctggagtctggaagcccaagatcaagatattggcaggtttgctttctcctgaggcttctctccttagcttacagatggccaccttctcactgtggcataaatggccttttctctacacacatttttgctttctcttcctctttctcttctttttccgtgcttttagagacagggtctcactctgtcacccaggcaggagtgcagtggtgcagtcatagtctgtggcggccttgaactcctgggcacaagcagtcctgccacctcagtctcccaagtagctgggatgacaggtgcatgccaccatgcctagctaatattttaattttttgtagagacagggtctcactatgttgcccaggctggtcattggtctctaactcctgggctcaagtgatcctcttgctttggtgtccaaatgctgggattacaggtgagcaccaccctgcctggcctctcttcttcttatgagaacaacagtcttattggattgtggccccaccattatgacctcatttaaacttaattacctttttaaaggacttatctccaaatatagtcacaatgaggattagagcgtcaatataagaatttgggggaacacacttcattgtgttatataatagaatagatttcaaagcatttttttctttagatttccaacaaagtgataactagtacagtgtgtacatggccagaggatggggtggaaaacatctgcttggcttctatgacccaaagtgtcccaatctgatttcttttttttcacatattccacatgccctatttcttttttcctctttcctgaagtggtaatttaccacctgtgtgaaaacaacacaatcccttactgcatttcaaaggcacagaaagtttctggtaatgtgcagagtgagttaactaagacgaggggtagtttgccgggggttgggtgggattgggtagggtgtgacctggttttaaagaattaatttacgttaattacattgggactttgctcccttgtgctccttgctcttcctgggcctcagttctttgctctttcctttagggaattcctggcttccctttctaggagccaaggtctttggaatagagggtggtaggccagtcctttatctctgctctgttcttcctgccactgagtgaggcacagatggaagtctcactcttagaaaagagaaataaaagtgatccctataacagaaagagaagggctggatgtgctggttcatgcccataatcccagtactttgggaggctgaggtgggaggatcacttgagcccaggagtttgagaccagcctgggcaacatgaagataccccatctctaaaaaaataaaaataaaaaataggcgaatgcggtggtgcgtgcctgtagtcctagctacttgggaggcagaggaaagaggatcgcttgagcctaggagattgaggctgcagtgagctgagattgagccactacactccagcctgggtggcagagcgagaccctatctaaaaacaaacaaacaaacaacaacaaaaaaaaaacagggaaaaaccctaaaatgttttaatttcagtaattggagaaaatggaagaccaaagattatggtgataaggggagtagatattttattttattttttgagatagggtctcactctgtcactcagactggagtgcagtggctccatcacagctcactgcagccttgacttcctgggctcaggtgattctcctgcctcagcctccctagtagctgggaccacagatgccaccacacctggctaatttttgtattttttgtagagatgagacttcaccatgttgctcaggctggtctcaaactcctgggctcaagtaatcctcctgtcttggcttcccaaagtgctgggattacaggtctgaggcactgtgcctggccagggatagatatttttaaaaccgcatatttagcttgtgatctagagagaataagagatctcagttgagagggcaggaataaaatacgttccacaaggcaatactgagtgacttagaacctattcctgccacttttttttagtttccttgatcttgcgggtggagggtaagtgtgttactaagtatgttcctggacaaggagtccctctgaagatagaagtgatgagaagatagaagaaaaggtaataaggcattaatgaactctaatcacactaagattgatgatcgtctggttcctgtctataggaatgctacaggaactcttttaccctaaaagtaaataataaagcacagttccagtttcttttatgtggatacaaggtggcagtgactagaaaagataagaacagtgctgtgctctagcataaaaacgtaattatgctatgcaatatggtagccactaaccacatgtgactatcgagaagttacaatgtaattagtatgattaggtaactgaattatttttattatatttcatcttaattaattttattacttttaaatagccacacatggctagtgccttctgttttgaacagtgtgggattcattggtattgataggctggatatacctctagtttttattttgattcaatttatggttaggtgagtctagaaagaacaaaagagaaagagacaatggagattaatcataatagccagcatttaatgtgtgcttattatatatccaggcatttacctaaacatgtaaaaggtattctgtataatccttgcaaaaatactaagattattgctattttacagatgaaaaaattgaagcataataagaattttacttgcctagaatcacacgagtaaataaggggtgaagatggcattcatacacaggtagttttattagagcccattcatttacactacatagattcaggaatgaggtggcatggagtgactggggccatggttcccaaactgtgccaaagtacaagctcacaagggtattgtggaatatttttaattttcagaggaaacacagcaatattttatatttcttaaacactgtgtgacctattaacttgaggtgattcacagttggaacattagattgtgctacattccttttgatgacaatatatctggccaggtgtggtagctcatgcctatactctcagcactttgagaggccgaggtgggcagatcagttgaagtcaggagttcaaggccagcttggccaatatggcaaaaccccgtctctactaaaaatacaaaaattagccaggcatggtggcaggcacctgtaatcccagctactcgggaggctgaggcaaaagaatggctcaaacccaggcagcagagattgcagtgaggcaagatcgtgctactgtactccagcctgggttacagagtgaaaccctgtctcaaaaatatatatatatataaagacaacatatctttacaaaagatggttttagaaggtccctctgataaaaattaagtattaagtaaaaaaaaaaagtactgtgtaaaaatcagcatggaacagaaaatgagggtggcagcattggattcctgcatgtgagaagttgagtagtgccaaacagatgtacatatcccgtaagtaactgtttgtggttatttaagaacgaaatttttttttcaatttgtgtgcattgttattttcaaagtgctagtaagttctcaggaaccagctactcactctgttgcccaggctggagtgcaatggtgtgatctcaggtcactgcaacctccacctcccgggttcaagccattctccctgcctcagcctcccaagtagctgggattacaggcgcctgccaccacgcccagctaattttttgtatttttagtacagatggggttttgccttgttggccaggctggtctccgacacctgacctcaggtgatccacccacctcggcctcccaaagtgctgggattaccggcgtgagccaccgcgcctggcctttatatataaatttttttttaattttttaaattaaaaattaaatgtaaatttaatgtaaaaatgtaaattaaatgtaaaaattaaattgtaaatgtgggcagaagtaatagttgtattctaccaaagacacgctatttatgttatattctggtacccgtgtattccgataacagaattttcttcgtgggaggagtcctctagttacctgaattgcttggatcaatattgcgcagatcaagggattatctgtgtccctacccaccaaatccatccttatcctttctgtcggcatctaggaccccggaattcttgcctgagaactttttcttctcccggtctgggcctggatgtgctctcctaaaccctgtatcctccaagttagcactgttgccgggggcgacccagcttcccttgtccagggagcaactcagacacagtctcgcttcatttttattctggggttgtacaatctaaggtatgaaatttttcctttttgaatctctcacggtttgctattgacacagctggaatgaggttgcaaggagagggctgggggctctcctccctacttctagccctatttccgcataggccttcttgctgggaactcctgccctgcggactggaatgggtaccgagatgaaatgctgggtgcgctccggctccccccgcccgccccggggcagaaggtttagggctgggaagaactctgattaggtttacagcccaggttcagccgattgaattagggtgtgtcaccatggagacagggccggcccgcgtgctcgcttgccattggctggggactccagggcaagggatataagccagagcctagaccagtgagccaactgtgcgaaccagacccggcarccttgctcagttcagcatagcggagcggatccgatcggatcggagcggatcggagcacaccggagcaggctcatcgagaaggcgtctgcgagaccatggagaacgggtgaggagggcaccaggcccgcaggacccttggggaggggcaggtgctgtgacccgggaacctggcacactgggcccagagggagctggcggagggagcgagcgcccaggggatgcagagaggcctggcactgagcctagtgtcgggagcaaggcggcagagtcatgcggcagccagcgcgggcagggacgcacgcgggaatcgagctggggtggcgccaccggagcaggaaggggacaggtcggtgcggtctaagctactccgtaaaagcagccgttgtgtgtctccgtgtgtgtgttaggggaacaagtggagagtgagtatatgtatatatccctcactccataccaggaggaggtctcctcaccccctgcgctcttcataaattcccatgctagggtctgggtaaagctgcgaggtacttttggtgctcaaattcggagttcctcctttagaggcaagattactcacctcctttgccagttgcactcctcccttccttccagactggcagtatgattaactcggtgggaagtgactgctaagtggagacggamatcagtcaccgaactgagcaacagtcctgtgctcacttcccccaccccacgcctttgaaaactcttctctcggcttgggtcctggatatcccagtccaagtgacctgcattaggcatcacagttgcttttggatgcccagggagccagggtgttcttgaggggactgatagccaatgaggaagtgctgtgagatgtggctagacatgccatgtggcggcagcttcacacattcatttcctttgcaccttttggggatgccatttgattaacattttaccagcttaattgcttctctccattgtcctgtggctccgttgaccagcccccaacctacctgatccaactgcttccctgagggtagcctggtgtattgtgcaatcatgtctggtttcccgggctctgctttccaagtaaaaaatttcctgtgaaagcttggttagttgtgttcagctctgtcacacctcattgccacctctgaaagcaacgtttggtcttcccagatggatgtgagagaactggacttggaactgggagaaaagtaacacgggttgattcttgctagtgtaggggttctgggtaagtgccctgaggtttctgaagagcaaagatcctcggtggagagaaaggaaactgggaggaggcagggagggggaaggacaggaagaagaccacaggcaggtggaaagcaggagaaagattcaaatactttgtgtaacagagccataggtctttggaagttgttagcaagtattcaattcattttcagattgagcctataagatagatggggccaatttacatcccttgtttatacctgagaaaataatttaaagcacaaattacatgcctaaaaagacaatattgggactagaatctaggtcgaattctgcttccctccagaccagcaattcctaaacctggttttattttattttatttttatttatttattttggagtcggagtctcgctctgtctcccaggctggagttcagtggagcgatcttggctcactgcaacctctgcctcccgggttcacaccattctactgcctcagcctcccgtgtagctaggactacaggggcccgccaccacgcccggstaawttttttttttttttttttttttttgkatttttagtagagacggggtttcaacatgttagccaggatggtctcgatctcctgacctcgtgatccgcccacctcggcctcccaaagtgctggggttacaggcatgagccaccgcgcccagcccctaaacctggttttaaaatcaaaattacatgggcttcagaatctgttttttgtgggggttttgtgtgtgtgtgtgtgtgtgttttttatagggtctcactctgtcaccaggctggagtgccagaatctgtttttctaacaagcttctgctgagaatttgtgtagtcagtcctggtttaacctttgacaaccagtactgtggactgggtctgcttttttgtacagcagtttatctagttttttgtctggaattaacccccttgtgatccagggagctaagaatggcacgtagacctctaccaggggtggtcccattgtgttttattggttaaaacaaaaaagaaatgtagcccttaagtctttggctgaggaaggaactggaggaatgagggttcaaaaggaaatttgagtttatctctgccttcatagtagttggtcttaattacattttgaatgtctttggggaacaggtaaggtaataagggggattttactaggtgggcaccaccctcaggaagggcttaatcccattttgagtactcttcttgggctccctcctggccaagcccttttaccctccctaatttgattatttccttgcacttccccgtacactctggccccttcctctctaaacctttgtcataaggataagtatgcagcttgccagtgttcagtggatccaacactggagttgggcctgttagtagaaacaggctttattaacttttgccaggctctagaatggaggtagtttcatatcagacttgtagtgggcttgattcagaaagaagggtggctgagtagatggaagagcatagtatggcctttccctctgtgccagcttctccgtccctgctgcctcagtatacctgccagcctttttgcaccgaaggtcatttgtctgtgatgcccttggaatgggagcagaattcaccttgatattttttctcccccagatacacctatgaagattataagaacactgcagaatggcttctgtctcayactaagcacygacctcaagttgcaataatctgtggttctggattaggaggtctgactgataaattaactcaggcccagatctttgactacrgtgaaatccccaactttccycgaagtacaggtactggcaagggaaagtggggaatgggactgagggatgttcttggaattctgtggaacacaaccaaggaggccaatgtttctactccttgacctagcatttcactgaagacaaatgttgtaagagaggagaaaagcccaccatgagtcagagtgactttaggagatgcctctagcagacatcccataagagacaggrcatgtgtgtgtcagtggactgaggctaagactcagaagagggccaggtgacaggggccaagtaaagggcaagggttgtttatttggtttacgtaatttctcaaataactaacttctgttggtttatttattaatttttaagatttctatcttcttttccctggagagttaagaatttttttttaagacctgtcagcaggaaaagacctttaatagctatttttttaaactctttaacacaagactggaagagcagagggagaaggtgagggaaatattaacagagggtgtgtgaagggcatacttctctaagggagatagtagtgacgctggctccactggccactcctacccccagtgagaagggcactgcattaaatgataagtgggttagtttttttaagcttatcaacatgtttattttttatactccacttgggtttcctttgtcaactttattactgtttttgttttgtttttttgcataagctcctctatctttgagaatttctcagctcttcctcttggttctagtccctctcccattccctaagggataggttggccgtctattagaagwgactgccagataaaagaaatggtaataatggctgttatgtctgtggggagttatctttgcactcccacgcacccctccgtgggcatgtgttcccataggactgttccgtgggtcataaggaaagagacacttgcatgcgttcaaattctttcccccttgttcagtagcctcttctttaagaagccagagtaagtatactrtgagcttgcttgctggactgaggaggcaggtaattaagttagggcaatagataagaatacatgttttgagaactttgaaaaatttgaagaggtctataattactgcattcactgtactcactttattttgaaacagagtctcgctctgtcacccaggctcgagtgtagtgttgtgatctcggctcactgcaacctccacctcccaagttcaagagattctcccacctcagcctcccgagtagctgggattacaggcatgtgccaccacacctggctaatttttgtatttttagtagagatgaggtttcaccatgttggccagggtggtcttgaactcctggcctgttgatccgcctgtcttgggctcccgaagtgctgggactacaggtgtgagacaccgcacctggcctatttttaattttaatttttatagatttacaggggtacaaygcagttttgttatatggatatactgcgtggtggtgacgtctgtgctttagtgtaaccatcacctgagcagtgaacattgtacttattaggtaatttctcatccctcatccccatcccactttctcacctttccgagtccccagtgtctattatttcactctgtaggtccatatgtacacatttggttcccacttataagtgagaacatgtagtatttaatcttccatttctgagtatctactttttttgctcactttttactctctggcagtatggcttgtattatcttgaaatttctttaaaaagcccttccttctttgtgtgttcatgctgaacatgctgaacgcaccccatatctctaatcttgggttgtatttgtataattatkagtaatgcctggctctctcaccagacttaaactttctgaaagcagagataataatgagtcttttacttaattacaacctaacattttgagcagagcgagtaactcacagtaggtgcttaatggatatgtgttgcatgaaaatataatcccattcatttctctttctgttttgtatacagtgccaggtcatgctggccgactggtgtttgggttcctgaatggcagggcctgtgtgatgatgcagggcaggttccacatgtatraagggtacccactctggaaggtaagtcagrgggataggyccrgttggatctggaagaggcaggagagaactatctagcctctttcactacctagctatctgggctaggtggatttttggtcctctccttccttttctttcacgatgtatgtcatgcatttcagtgtagctgaattaatgaaattttgtaaatttttttcggattgtttgcttcgaaggtgacattcccagtgagggttttccaccttctgggtgtggacaccctggtagtcaccaatgcagcaggagggctgaaccccaagtttgaggttggagrtatcatgctgatccgtgaccatatcaacctacctggtttcagtggtcagaaccctctcagagggcccaatgatgaaaggtatgtatgttactccgttttttttaggtgggtaggatttaaagacttctctaggagctgtgggagaatttttaaaattccgtttatgtgagataattcaacctgtgtcctaggtttggagatcgtttccctgccatgtctgatgcctacgaccggactatgaggcagaggsctctcagtacctggaaacaaatgggggagcaacgtgagctacaggaagkcacctrtgtgatggtggcaggccccagctttgagactgtggcagaatgtcgtgtgctgcagaagctgggagcagacgctgttggtgagaaggggaatttggctggaagcttgaagagggaggggtttagcaaaatgggaaggggaaggagtaggaaataacaggcctcattggacwgagaggatctgatttcagggaagggtgaattaaactgacttattgaaatacaaactggtgagatttggtgtagcatcaaatctccctacgaagcaccaaggggttaacagctgcagtgctaatgaatgatctatccatgatttgatgactgttttttgagacggaatgtcgctgtgttgcccaggctggagtgcagtggcatgatctcggctcactgcaacctccgcctcccgggttcaagcaattctcatgcctcagccttccgagtagctgggattacagacgtgtgccaccacgcccggttaatttttgtatttttagtagagacaaggtttcaccatgttggccaggctggtccttgaactcgcgacctcaggtaatccgcccatcttggcctcctaaagtgctggcattacaggcgcgacgcactgtgcctggccaatgtgatgactgtttctaagaattctaaaaaattcactatagccaccttctgtacctctagctggaagatggaactctatcattaggattgagttcaaaattgccacaaatatagaaatgaaggattgtattggtaattttaagaaatgtgtatttattttaggcaatacagaagataatttagctgcttctttggatttgttttaggtggggccttgctctgttgccaaggttggagtgcagtggcaccatctctagctcactacagttctgactgcctgggctcaaacaatcctcccacctcagcctcctgagtaacggggaccacaggcgtacactaccacacctggctaattttatttattttttgagccgaggtctctttatgttgcccaggctggtctcaaactcccgggctcaagacatcctcctgccttggcctcccaatgtactgggattacaggtgtgaaccactgcacccrgccatctttggatgttttttgagatttttaattcttgttgaaagcgaggctaaagggcaaggaaaagagttatttgaggatcctgacagttggtttccatctttctcactatcaggcatgagtacagtaccagaagttatcgttgcacggcactgtggacttcsagtctttggcttctcactcatcactaacaaggtcatcatggattatgaaagcctggagaaggccaaccatgaagaagtcttagcagctggcaaacaagctgcacagaaattggaacagtttgtctccattcttatggccagcattccactccctgacaaagccagttgacctgccttggagtcgtctggcatctcccacacaagacccaagtagctgctaccttctttggccccttgctggagtcatgtgcctctgtccttaggttgtagcagaaaggaaaagattcctgtccttcacctttcccactttcttctaccagacccttctggtgccagatcctcttctcaaagctgggattacaggtgtgagcatagtgagaccttggcgctacaaaataaagctgttctcattcctgttctttyttacacaagagctggagcccgtgccctaccacacatctgtggagatgcccaggatttgactcgggccttagaactttgcatagcagctgctactagctctttgagataatacattccgaggggctcagttctgccttatytaaatcaccagagaccaaacaaggactaatccaatacctcttggattttatttaatgtcataatgttgtcagaataaagagaaagatgaaataatttcatttttttgtgtaacttggtatggggctggggcacagaccaagattgacatgaaaggatgtgagatcgcatgtcttgtgtgactatctgcttctcagacaagcagttaggaactgagatgagatagtatgtgagggcagcaaaggatgaagaagggcaaaatgatgaaaggtgaggtggaaagaggttatgagatggtaaagaaaagttaacttctggcacttgattgccacttcygtcaggctggtcctgcctctctcccttgccttctgattgtttcatttcctgtttatttgatcatatctgaattagttcactggttagcctcttccttagttcccacttccttaccaaagccctaattatatttcctcttgtttgccttttctctcctactcttctctaacatctgcagccacactctccattcactccatgctgacaaggcagtggcaaacacttttctctgctgccagccactccactgttgactggattgctgccagccccaggcaaacctgtgaagttgtttcatactctgcttctctttgagtgcctccttctctccttcctcttcctttctgggctccagtctttctcttcacttgtgcttgtcagaacctccctgtgatactgcctccaggcatttcccccatgttggctcaccgcactattatctttgcttatcaacttgcattcagctggctggcatgtttcaaaaccacactgccctcccaggcctgtgtgccttttgagaaagaccagtgctggatgagcctctagtaatgacaacattttagttgttagtggtataatacggaagagatattttgcacaggctgctttggagaactttcaaattatcctttgtttggtaactgacctacttaactgcccaayacaaagaaaaagcatcttggagtggctctgtctccttttttttttttttttttttttttgatacagggtctcactgtcacccaggctgcagtgcagtgctgtgatctcagttcactgcaacctccgtctctcaggctaaagtgatcctctcacctcagcctccagagtagctgggaccacaggtgtatgcaaccacacctggctaatttttgtattttttagtagaaatggagtttcatcatgttactgaggctggtctcgaactcctggcttcaagcaatcctcctgcttcagcctaccaaggtgctaggattacaggagtaagccatcgtgcctggccttgccctacaatcttaagattcatttacaaagccactgttgtataaagcttgtacaaaatgagtacaagtcacacgtgggagctcaaaggagggattgattgtatacaccgaacagtgtgaattgggtagattagggaaagctttttttcctttttttcttttgcttaaagtgatggatacttaatattaggtaaagttttatagaaaactttgagcctagtcttgaaggatgaagcaggggaagaggatttcacatcaggatgaggcaaagcagagctgcaaaaagtactaggcatgttcgtgagtcgttgtcacaactggtgggactagatcaggacatggaaggctccggtgagacaggcagaaaggtaattggtttgaggagggctgcatttggcacttggctttcctacccccagtctccctcttggtcagattgaccaggaatcacaatggggccatctgaaaaatatgtcctagagatacttgagtggaatatttaagagtggaatatgtaagctttttagacttagtaagtagatttactaaattcatatttatttatatgaagacataatgtcttcagtttcttttttaaaaaacagctgtattgagataaaatttacgtaccatagaattcacccatttaaggtgtgtgattcaatggtctttagtgtattcacaaataagtgcaattattgccagttaatctgagatcatttcatcacttcaaagggaaacgttatctgctcccccatagccccaaacagccatttatctaccttctgtgcctatagatttaactatgttggactttcacacaaatggaattggacttttgtggctggcttctttcacttagcataatgttttcaagatgcatccaagttgtagcatgtatcagtacttaattcttttttgaggccaaataatattctattgcatggatacaccacattttgttgatcgagtgtctgattttaaaaagccaaccagtccagccaaaaccgaacgtatcagtttaggattgtaggatacgagcacaaagtgaagggaagtaggtgtgggagggctttccagagaaaagacattcttgaaaaaaactggcgatgataccattcatttctggaggggcctgcagaatgcctgcaaaatagattgattttactgagtctcatggtaggtgtccaaacacattgaagtcaggcttgctttcttgaccctatcatgaccatctttattagcatcaataaatattcattaatcatgtattatgtagagaacattgtcctaaaaaccaaaatgtaagttggtataagatgaagtgtctacagtctagatgtgagacaagatgtatgcataaaaagaaataactaggctgagttatttgagccctttatagctgctaaagacttttactaatctcttcatatgttatattgtcattgtttagaatcagctttttcgactgaactgaggaagagggcctaattttttacaaaaggagtacagtaatgtgtgaaaagtagcgtatgctaagtgtcaatgatggtatgtgctacaggaattgagagaagaggaccatcaccggagctggggagtaggaaaggattgatgagacattatttaggccttacagaaatgccaggcacagtggctcatgcctataatcacacatactaggtgggagattcacttgaacgcaggagtttgaagctgcagtgggctttatgattgcggaactgcactctagcctaagtgagagagtaagactccatctttgaaaaaaaaaaaagataggtgaagaggacatggcagaagccattacatacagatgaatccaggaatgtttaatcattgaacaaactgaaatgcttaaagtgaagaaataaatgggaagatgggcagcaagctggagaggagctctgattccaggctcaagagtaggaccttagggccaggtgcggtggctcacgcctatatcccagcactttgggaggccaaggtgggcggatcacttgagcccaggagttcaagaccaagttcgagaccagcctgggcaatatggggaaacctcgtctctacaaaaattacaaaaattatctgagcatgatggtggttgcctgtggtcccagctacttgggaggctgaggtgggaggattgcttgagtcggggaggctgagccttcagtgagccatgatggagccactgcgctccagcctgagcaacagagtgagaccctgtctctcaaaagcaaaacaaaatgaaagagtaagaccttattttctaggcaagatggccagccattgacagtttttaaacgaaggactggtagataaaaattgcactgtagtattttggtggctagaagcctgactaaaagagaggcttgttttgatagtagaattactttcacccaaaattaactgtacagaatagcacaatggttggtgttaagtatttaatttttagtcaggttggggtcttctgtagtgttttaaagaataaattagccgggcacagtggctcatgcctgtaatcccggcactttgggaggccaagacaggaggactgcttgagttcaggagtttgagaccagcctaggcaacatagtgagaccttgtttctacaaaaaatttaaaaattagctgggcatggtggtgcacacctgtagtcccagctattcgggaggctgaggtgggaggctggctcaagcctgggagatcgaggctgtagtgacccatgatcataccactgcactccagcctaggtgacagagcaagactctgtcacacacacacacacacacacacacacacaaaaggaataagctgttataaaatagaatgtagaggcaaaagtgcaaacaacttagagatgaaaatatacacttaagtcaatagtttccccttctttttaatataaaattgtgaataggtatataatcacatagttcaaaaattaagcaacataaaatgtgtatagtgagaactctcacccctatcctgtcctcatatgcccttccttccccacccactggtgaccactgttattagtttcttttgcattcttccaggatctatacaaatataaacaaatacaaattctatttttcttctcttattataaacagcagttagtatgttatatatactttctgtatcttgctattttattttaacatatcttggagatcttttcacatcaatgaattagtgtgccttcttgatgacttacatcaatgctgccaaggatatatgtctgtcacctccagttttttagaagcaaagggagaatatggtcttaattttttttgccacttctcagttcgtttgttgattactaataggaatagacacaaagaggtaatgccacctgctgctcctttaaagcaagaagttgggaagaagagagctattcattctgtgctgtgccttctgcctaattcaatttggcttagatttgtgttgccttttttttcttgtaaataggcccctgattttcataataatgttttgtttctcagggatgccttcgaacaaacactggttatctgcttggtttttctgttactgtaaatttggattttaataaaaataaaattttcctgtctttaatcattttgtctaatttttagttttggcttaaattagatgtgatattcttttggattaatctgaatttgctctgttgttttcgggtcaaagaacccctacccctccatcgggcttttactttcacgtccattctgagtttgtttgttcattgtagaaagcttttactttgtctcacttgccaatctttttttttttcttgttctcttcttctttttgctgttactctttttaaaacaccatttcacttgttagctacttgactttggccttggttttcccttttcctctttattttgaactgtttctatctgagctcctgttgtaatttataataaaaagttagtagaatatagtacttctcttgtgtagcctgacctgatctagttctatcaactgttcttttaccaatcagaggttgtttaagatcaattccagttcacagtattaatctttattattacctgcttgtgtcgtctcccccaaaataataatacatagctaccaccattgtcactgttccactaatgtcatcaaagtatgaaaattatttaattgcagtaagggataagtagttgtttttcatacggttgttttcgcagtgggaaagctctcactctggacatcatagataagatgttacggagtcagtaaagtccctgaaaagcaaaactgagtcatgcctgaaattttttaggcaggtgatggacattagatttccttggatgcttactttgccaatttcctctccccgtcacaaatagaaactactagtattaaaaaagacagaattatggtaagagtaattttggatattttctgtcactctgccattctttatggctgtgcagcttcttaactattttttatctactgactcttcacttcaggatacaccctatggctgttagctggtctgtcaaagatccaggaaactgatccctgcttcagttccacaataccgagttcaggaatgttctcagaccaggatatactgtctgagagagatgccttagagaaccaaactgttctctaagaccgggcaatagtgctgtcattatataacccttacacacatgagatacctctgcccaaggaggggctctaggcagattcacacttgtttatgagcacagataggctgg

SEQ ID NO: 95991 - DNA, 22015 bp, Homo sapiens
  misc_feature (1)...(22015): n = A,T,C or G
gggaggctgaggcaggagaattgcttgaatctgggaggtggaggttgcagtgagctgagattgcaccactgcacttcagcctgggcaacagagtgagactgtatctcaaaaaaaaaaaaaaaaaagtcatttgttaattcctgaaatgctgggctatataattttggtagcctgtttgggtgggagaaacaagaggatcagacatcaagacacagcacccaccagaggtaggaagactagtaagacaccctcccaatattaagttgggactccaaagatctattcccctaaggtaagggcaaataagaagtacacctatgtctgttctcctacttctagtaattgttgtggagctcagcagaaaaaaattgagcttagcaaaggaaaatagaaagtgtgaggagtttttctgagaagctgggaccacaggtcagcattctgatttgcaccttgggtttacgtatcttggagatccagagaatgcctggccattaactttgtttaggatcttcttgggctgatagagtgccaagtgcctgggagaaaaaaaagtcatatatatatttttaaaagaagataaccttcatcttgtcctcaaaaactcactgcatgtaattttgcaaagacactgagcagtacacattcaaagatgaccaagttttacaagaaaacaaaacaacatgagttgacaaaacaacggcataaaattcagatattaggattatcagttatatatattaaaacaactgtaattactgtgcttaaggaaataagaaacaagctggaaaatatctgcaaaaaacaggaaataaaaaaattcggcctagtagttttgaaaaacaatcaactagaacttctagaatgggaaattacattttaaccaaaataaatgacttaatgggcatatctaacagctgattaaacagagctatagagagaattactgattagtattaaaggtaagaaaatgttatccagaatgcaacatagaaaaaaagaccaaatatatatatatgtatatatatgtgtgtatatatatgtatatatgtgtgtatatatgtatatatatgtgtatatatgtgtgtatatatatgtatatatatgtgtatatatatgtatatgtatatggaagagaggttaaaataaatggaaaacaaggtaggaagctctaatagatgtttaatttcagttccaaaaagagagaaaaaaatagagtaaaaacaatataggaggctggctggtctgagtgcagtggtgtttacaactaattgatcacaagcagttacaggtctctttgttccttctccactcccactgcttcacttgactagcctaaaaaaaaaaattaaaaaaatatataaaaaaataggagaagataatggctactattagttaaaatgtatctcccccaaatttatatgttgaagccctaatccctagtatcccagaatgtaactgtatttggagatagggcgtttaaagagatgattaagttaaaatgaggccattaaggtgggccctaatccaacctggtgtccctgtaaggggagtaaatttagacacaaagagaggagctaagggtgtggacccacagaaggacagctatgtgaggcggcagcaagaggccagccatctctaagtgaaggagagaggcctcagaaggaaccaaacctgccaacaccttggtcttggatttttgacctccaggactgtgagaaaatgaatttcagttgtttaagtcacccagtctgtggtattttattatggaagccctagcaaactaacacaatgactgagagttttccagaactaaagaaagacagcagtatatggatttaagaaaacccatacccaaaaacttgacactgataccatatttggaaaaacatgggttttccttatggtatcctgtactcctgttttatgtttctaaatggaaagcttcctgggcgatgcatctgattggtggagcccaggtcacatgcccattctcagctgtaagctgggaaagcaagtgttctaggacagacttacttataatatgtgaaatatccacatgtaaggagaatttttaaaagatgttggacacacactaacataacatatgcctataacagggctattcaaaacttatgttctagtctcagctgttttctctgtattcttttccttcaagagtgcataactcgtagagtctctaactcaatggatgacttatgtaatttgattaattcatttatcaattcatgaaactctagacacgagactattctggctatcatgcaattcccatgaactgctccaccttcacttcatattcagcttacctaaatcctagcgtcacccctccgccctctccagatacgctgaagaagtaggcttccttttttctgcaggtgttatcttgcctcttcaagacacctttgagagtcccctctctttcctcttgatttcacttcatacctaggttcagcagaatcgccctgccctgtaacgctctcactcatcccttcctttccagtcccataacgattacctttttgcagctttatgtttgagcatcttcaccatggccagtcactggtgtttctgactctggttgctcgtcccttcaattaattccgcaaactcatcaatgtttggtgaatttctattttcttctactaatcttctcacctgctgccccagccagtgttcccttgaatgtctcagtctttctctcggactttgctcgtaattttattctaccagggaccaccctgctcccatttttgtctaagtcttaacctcccttcatagtgcagctcaggccaatgccctcttgaagacacccccggatggttcactttgtaaatgtgtggaccttggcatggccaacgccccttcacacctggcacagctacttttcattgttttccttcatgaaaactaaagttcttttgttccacaaaactgtgacagtgacttcaggataaagatcatatctggatccctaattcttagtgcagagcctagtacagaactggaatgcagtgtttgttgaatgaaggaatgaattaaactgcaaattaacgaatgcctgctctggcactgagactcgcagctgtgagaaaggtctctggaggcagacagttgctggtacgaagtcctgagtcaagcaggaaacaaaatgcggatgtcagcagtttcaagtgagacctgtggtgagctccttcctctgccggttttcccttcttaattttcagtctgaagtgagggagtggagaatctttctgtgttagactgtgtcgcgttgggcagatttctccaatcttaggatagtagtggtccctctcactggccttcactttgtaccatccccagcaagaacactgagtctgtgaaccgaattctagtagtcgggaaatggattgaaaggacatccaggttttacttagtttctatgctcagatgctggcagaagccctgcaaatcttttccttttctgtgaaaggaagaggcggtttctgcgtgaggccctatagctcaggggttagagcactggtcttgtaaaccaggggtcgcgagttcaaatctcgctggggccttgcgaaactactttcttgattcaggtgttttttgaaaaactccccttctagtctttctgaactaagtcacagaaaatgtggcaaattagagcttctttcctctgttcagagcttccaaacactagctcagcagaacgtttcctttaggttccagtagtaatgctgctttagctcctggaatgcggcggaatccattacacaggcggtggaaatcaccgtcagcctctgcccacgccctggcttgcggactggcggcgagagccctgctgactgccgggcgggaaatggggacagctaggcgagacaatagccctttaagctattctcaagccccgggtctgggcatatttggagtagagatcaaggttccacttctgaaacgggaagagccagcaatggccgctccggccaggcgtccagaagagagatgcacgttgtgaggcaaggtttcatgtgccagtggggttttgggaaattaagggcccgactttaggggcgagacttgggtcactaaatttgattttaacgcagagaaatgtggccttccttttgaatgagctgcaaatattatctccaaaagcgaattcacacagaaacattgggtttgcccagatgtcctctatttcaggggttcccaacccttgggccgcgcacctgtccatggcctgttagggacccggctgtacagcaggaggtgaactccgggctagctaccagtaccgcctgagctccgcctcctgtgagatcagtggtggcattagaatctcacaggagcgcgaaccctattgggaactgcgcatgccagggatctaaactgcactccttatgagaatctaagtgatgcctgatgatctgaggtggaacagtttcatcccgaaaccatcccccaactcttccccccgcccccgcggtccgtggaaaaactgtcttccacgaaaccggtccctagtgccaaaaatgttggggaccactgctccattccacaccctctccctcccgtgtctgtggacgtgtaagcggaagagccgagattgggagggaagcgcaggaagtgaggacatcagggagcccgggcctaagcctggaggcccgccctctccggcgttcacagttgcgcagtcagaattgtgtgcgtcccaccgcctcagcccccagttctccgacgcccaggtgccggtccccaccctacacacaaacacacgcatccacgctcgcgaggcccctgggtccgcgcccagtgaggccaacagccctcgggcgcccagaggatgagcagcctcggtatgcccgagtttcaggggcgcctgctctgcttgggagcccctcagtgaggcaggggaatccagatttagaaaggttgtcctcagaacctcggacgcaggactgtcttacaagctggctttgtgactctgcagtaattactttccgggtataaagagatttctttctttcccgtctctggttaaggatgtctcgagtagggatttttaggagagttgtttccgtgcttccttcgatagctcagctggtagagcggaggactgtagtacttaatgtgtggtcatccttaggtcgctggttcgattccggctcgaaggagacgctgctgttttggggtttacggttgctcttcgtttgtgcaaaaaatctctgtatcttgacgtgatcaaatctgtttctgtctctcacccttgtccgaaggaaacagcttagccgcgaggtgggctgcgttaatcgcgtcttgaaaagttggttacctttctgaaagatagtagacccgaatcgtcccaccgttgggggaaggcactgttgtcttaccgaagtgtgttatattttggcttctacgttaagtccaaaggccggcagatatatacgtatcgcgcgtctgtcctggggctcagtaccctacagccttgcaaccgagctcagctctggccctcgatctctatttcagccccctccaggttccctccaggccctagcgggcttaaatcgctccccgggctcagtgagacacaagcatgtgacctaaagtctaaaaagctgccttccttcaccccatcctgcatctggatcgaggagaataagccagagaataagccacacttgaaacttggtgaagatggaaggaataactaaataaggcctaagggaaatgtcacaacagaggaaaagaaacaaaacaaaaaaccttcagaacagcaggcggaaaagagaaattcagagtgataggaagcaccactcagctacagtggctcgttggtctaggggtatgattctcgctttgggtgcgagaggtcccgggttcaaatcccggacgagccctcgtggctactgtttttccacccccttttgtcaactactgaaaaaaagtctccgttaaatttgaaacacaaactgtctcgcgatgggctgtcctgccaaagaaagcagcagcgaataagtacgtggcagatggtgctgtcgaccagtgtcaagaccaagtttcatgggttcctggacgctcagccaggggtagtctctgaagggccgcctggcaattgggagcagaagccagtttcccgccatctgctctccgtggaggcagtgctctcgcggctgctgcccgttggggtccagctgaggaaggagcgcggatcccaggctcgttctttgcctgggctgcccctgcggcccctggggcgggtgctgctgcggcgccagctccaagggcggatccaggcgggaggggcctcctcggagaagcggggcgcggtcccaactacgcagaggctggcacgccgaccctccacacctcaccacgcccccatctccgtccgtgtacacacactcacacaaggacgccaaccccacctagatgcaaagcaggattcaaaagaacatctttgcgttttctaccggctccccatcatcgtactagggaggaagaagcgggtgagaaacaaaacttctttccattgtcctgcccgtttctgcggacttgttctgaggccgaggtaggttcacactcctgctcctcctcytcctctctggtagcttcataaggggcgtttaggccggggagtcctttcctagtagaggcagcttgggactccttggggaggagtttgcgggacggggctggagagggaggaatggggagggacgtgaaagtcccgtatttgtatgagttaacgactttacattcccactcaggtttactttgcgcagctgggcacagatgccagcttctattgattagtaggcttggagggggaccacagaatcgccgaacctaagggaagccctaggaggcctgcacttgcccacaactaagaaagctttgctagttattcaggctaatcaccagctttttgaagcaggccttagttttttgcaagcgtaactaacatttggggatcggtgttttctgtttactctcctctgcctcctcacccttaacccaccctcagccagtgttgtgcaattcttagagacacttgccaacagcctcttctctaagccttcctactggaaggttgggatcctccgttttctcgctctgagacagcacgtcaaatgctaatagcagcacatgagtaaagcgcaacatctttattaaaacaatttcagcaccactcagggggctagggaaatctcagatgagccaagaccctccctcgtgacagtaaaaatcttataatcaagtcataatrtaatcartagaaacccaagggacatcattatctgtggcacaggaccaccttcccagaagcagcctcaggtattcaagacttacttaaccacagagccactaacaagttttgcaagaggataggtttattacatacgcttcaattcaagcaattcttttactgatgacaagcmgagtaaaataatttttgaatttatggtaatagtcaatgtaggtttccttcgaacagcaactttcagtggcccctttaaagttagctctgattgtctagaaagtactagtatggaatataaaagttgtgtgggcccggcacggtggctcatgcctgtaatcccagcactttgggaggccgaggtgggtgcatcacaagatcaggagttcgagaccagcctggccaagatggtgaaacctcgtctctactaaaaatacaaaaattagccgggcacggtggtgagcacctgtaaycccagctactcgggaggctgagacaggagactckcttgaacctgggaggcggaggttacagtgaacagagattgcgtcactgcactctagcctgggtgacagagcaagactccgtcttaaaaaaaaaaaaaaaaaaaattgtgtggtgcattggaaagcttccaggccsgcgaatgcaatgagttccttgggcaatacatgtctctttctctgttcctcagttggctcttctttaatatgaggggtggacagagtctcagaggcccctcccactcttgttctatgactccatggagtggtacsatgttagtaacaggacatgaggcactctagtaatgtggagatgaactatcgtttggcagagaggatggaaaaaatcattccaggaaaagaggaatggctttagctattgttsaaaacagataatcaggttataagcaggcaagagtaagaggtttgtcaagttattgttggaagcattggtcactgtgactcaaattaaagtagctggataaaaaagtggaccaatgaaggtcagtgaaacctttctttaggagtttttattgaatctgtatttaagcagattctctgtaattctctgtaaacagttattcccggaagaatgccatgaaatacttgggaaagagggaatgggaacaaagagtgagtgggcacaaagcccagagttggttgaaaagcaaatgtttaatttttgtctttgtttggaaatacaggcatgtcagcaggactttgtccccactgtccttcaatcagtagtgttgcctcttcctggagacgtggttcttcttgccacgtgtgcttttccttctttacctgttacttccgttattgaataagttcatgcttatagacctaaagtgttagaataataaagaaatatagaaattatttagtccattcttcccatcatctaattttataattagtcctaagacagaatgatacatatatactctgtatgaaggaggaaagtgctctaacactagggtccttggaaacaggacccgtgcatcccgtgtctgtgtgcagggacattattggcttgagggagagagagaaaaaaatctccaggaaaggggaatgactttcaagttaaagctgtctgaacatttaaaaaatatatgaggttttttgcaattggcgattccttcatttgtattaaaattactgacaaagatgtgatgttccttaatcatagaatataattccttgttgtattttaaacacaaatgactaagtgcttagatgcattctaatgaaatagtaatttttcccccaaaccctacttttcrtttcaacaaaacttccttgtgccaagtttaaaagaaaaacataaaactgtctttttgcattgtgggcagattgtgtatcctccaaaggttgtccagtgaaggcccagaggcagagaagggacctaactatattcagaggctgctggttgccccacctcagcactactgcagaactctaaaatcagaggctgctctgtttgtgtgagtcggtgcttgaattggtgcttcaggccatggggctgtgtgtgtgcaggcgcatatgggttgtatgctgtggcagggtaccgcttttcgggactcagaggtggtgttgcttgagctaagcctggaaagacaggtcagttttctccttgcttatgaagggttcaaagtctgactccaccattcatctgctgtttgttcttggagtttcctcatgagcagagcatatttacataatgcctacctcacacagtcctggtgttggttgaatgtagtcatgtatgtgagagcttcacaaaatgaaagattgcactgaatattataattattgtgatttcaagtgcatttgttttactagcaggcagcctgtcttttcttgacaccttctcaagtgcagccagactgaatacttggcagctaggtgggtgacaacagaggattgaggatttttaaaaagataacactgtcctagatccaacaccactgtgggcaaatgctgggggtctgtgaaacagttggtaccctgctgctgtctgatattggaaactatgagatctataaggtgatcctggtgacctttggcccactgtttttacrcaagcaatggatctacagccctgctttgatgatggagataagcaattttgcaactacattacaaggatcagaagattgaatgttcagggttagtctcttgtggacaggtaaagatggaagaaggagaaacccaggaaacatggcaagcctgcttctgggggttagaagctgagaagttgagtgtagggggaggggcagtgtactaatagctgtcacacaaccttctctggaagtgctttcctggctgtatgaaatcgatggaataacgtgcttagcatccrttcatgaaaccaaatgatgtgatacgataaataggatgtgatatgataaatgataaatagtacagtggaaaagcatcctactggaagaccatatcttactctgtgacatcttccaaggcagttcttggagttggcccagggagatcagagatgctatcttatggatccagactattatgtgtgaatagggaaacctcagtcctgccatgaacaagagtaagcaccacagacagcagaaaagggcaacttttggacagaaggccatgtttctcaaactttgtcttccagaacaaatctctaatccattcaggtgggttaatatctaacccaatcatgcccagcgaaaaggtgaatgaccctcctygtttgttcaagagcagtgtccttggttttcatgtccctgccaggactgggacactatatattaggaacactatataatcagaacctggagaggcctccaggttcacacaactggaacccatctccaggaacaaacagctggaacccatctcccgttgaagggaaactgccagatttttgtaagattcttcctcctgggtaaactattgttcaatttgttttatatattatttctagccatccatccattttaatgaaaccattttcctccctttaaagcctccaggctcaagctcatgaattaaaaagaaaatggatcagattctaaagtttaaaatgaaaacaggtttcttttgggatggcctatgtgtggataaagagaaattagtgagactgggaggaagtggaagtttaggagggatttctaaattgtgataaaatccccaaaggcctgggggagccatttgctgaaggccatcgggagtcctcccccgtcgtccacccctgttacaggcattacacgtggcttaacaaggaaagaaacagtatgtttttagcattgtttccttctaaccttccctgctaatttctcttcttagaaaagttttggatgctctttcaaacaaagtggaacacatcccaagatcaaaagaaggctcactggcaggttgaagggaagaaggaaggaaaagcaataaagggatgaatatgccttgggtgttaggctcttactttgggggattttgccctaggatgtataaaagtgtgaagccacattgatgaaaatgataactatagttactcatcataaactgtcaagttaactccctggtgtgtaaaatttgatgaatcttttgaatactgaacattgcctgtggggagagggagagaataattcttgtgaatactaacagattcatttgatacagaagataaagttactctaaagaacagttggggccaggtgtggtggctcacacctgtaatccccgcactttgggaagccgaggtagccggatcaactgaggtcaggagttcgagaccagcctggccgacatggcgaaaccccgtctctaccaaatacacaaaattagccaagcgtggtggtggccgcctgtaatcccagctacttgggaggctgaggcaggagaattgcctgaacctgggaggtggaggttgcagtgagccaagatagcaccactgygatctagcctgggcgatagaacaagactctgtctcaaaaaaaaaaaaaaaacaggccgggcgcggtggctcacgcctgtaatcccagcactttgggaggccgaggcgggtggatcatgaggtcaggagatcgagaccatcctggctaacaaggtgaaaccccgtctctactaaaaatacaaaaaattagccgggcgcggtggcgggcgcctgtagtcccagctactcgggaggctgaggcaggagaatggcgtgaacccgggargcggagcttgcagtgagccgagattgcgccactgcagtccgcagtccggcctgggcgacagagcgagactccgtctcaaaaaaaaaaaaaaaaaaaaaaaaaaagaaaagaaaagaaaaaaaggacagagaacagctgggactaattccactgacaaaaagctgacagacagttacgtgtttgggtacagaaggatatatctataggacttttgccaccagatgtgaggctttgcacccttggcttaggcagattcacttttacaccacaaacratctgtctcttactggttttctcccaattccattttaccttgctttttgaggaatttagagttgaatatattgagaaagttttgagtgagggagcagatgttagatattggtggttttggtgtacgcttgctgagatttggttcctggatgtcttagggaatcaagattacaggcccccaactaaacttatacaaaatttgtctctgtaactgagggtcactggacctttgctattgaaactagcaaagcctctattatgtttaatgagaaccatgaaacttcagatttttagagctagcaactcttttattttcttgatgaacaaacctaggcctggagagaaaaatgaagtcaattacttaaaaaatattaagggttataataaggcaagcatgttgattcaaggtgaataatatgagttctgtggaatatacaccagtaagaaacactaacaagtaaatacttcattgttcatccacgatcacgtgggtaatggcatgtttggaaatggcacccgtgaaacctgacaacaggtcggtctttattttgtgatatccttatgggtagattctgaactttgtggcttttactttggcacttatatctaatgaggtgtccttggtcttaatatctaatgcagagcgagtttggacagagattctaaacaggttcaccagctcatactccyttctgtgaacagcaatatccccacaagttatacagcattggcacctcctgcaagtacggtatttcctagagaagacattagtaacattcctatccaccactgccacctaacgactcttttaggtactagcagctctggttccgtttcctgatttctgatttctgggattctggcaccaggcagaagaatgttgactgtgtaaggcagacctttgacattagaagtcagtatttgttcattacagagcaagagacttaattgattacaaatcaataaaactttaataagatcttccaaaaaactagaaacaggaaacacacccaggagactgaaaagcatgatgtaaatgtgaagaacgtggcaagtgggtggcttggcagcccagcagctatactggagcagctgcatgagtgaatacttgttactcctttagggctggctctccattctacaatcatgtacctctttcttgataaactcccaagaacacactttcagcatggaatttcagacttttagagatagcaactctctcaagtatggacaaatgtcggtgcggacaaatttgatgcactgctgaagaataccaaataatatgctaaggaattttttcattccacaataatggagtaaatagcagctggaaatgtttgcattaagttcatagattataatttgtaatggaatcaacaccaaatgcaaattagaaagagagcccactttgctcacccagtcacgtcttcccatgtaaccatagaacattggggtcctgtgtctttctagatccacagtcttgctctcagaacaggctagccacaccacaggcctagtgccaggacccatggcctttttttaagctcagactcccttctgtgaacagcaatatccccacaacttgtacaacattggtgcttcctgcaagggctacagaactatttgatacgaaaatgttcattgacttacacacaagagaagcacaaaataaaaaattaataattaatttaatgtctttgaaaatgtaccatttatttttacatttggggtcataagaattgtattacacttaagaatgcaatacaatttgaagatcagatttttctccctttgtgagaatttctcagtatgtgtgatgactaccaagaaatcatagccagtcataaattcagtgagttactcataaacgaacaagaaccacctacttcttggggaggtaggtctgcttcccttcaactcaggatacaactgctttcaactgctttcttcacattagctgactaattagctagaagcctgtcgtaaacaattttatggttgactccttccctgggctcagggttccctagaacagaggtccccaaatcccggtctgtggcctgtccgcctaagctctgcctcctgccagatcagcaggcagcattagattctcataggagctggacgcctattgtgaactgcgcatgtgcgggatccagattgtgcactctttatgagaatctaactaatgcttgatgatctatctgaaccagaacaatttcatcctgaaaccatcccccaccaatccatagaaatactgtcttccacaaaaatgatccctggtgccaaaaatgttagagaccactcccctaaaactctcttcttagctctcacctcctgtattactatctcatctcagtacattgaagcccccatcttttccccatggatgcctcatttcctattagggaggcatttttttattttttgtttttatttttttccgagacggagtctcgctctgtcgccmaggctggagtgcagtggcgcgatctcggctcactgcaagctccgcctcccgggttcacgccattctcctgcctcagcctcccaagtagctgggactacaggcgcccgccactacgcccggctaattttttgtatttttagtagagacggggtttcaccgtgktagccaggatggtctysatctcctgacctcgtrrtccgcccgcctyrgcctcccaaagtgctgggattacaggcgtgagccaccgcgcccggccgtcatttggtatgtcttaatgtgcctcaggacctagcacagtccctggtacccagtagagacctatgtaatgttcnttaktcaattaataaatacatgaattaaagagtgagagtggattttgtaatgttacgactgayagagaaatactcagtgattctaagggatggggaagaacggttggagctagaggttgtgctcaggaaactattaaatagacgttccgcaggaagggattgacgaagtgtgaggttaatgaggaagggaaaatagaatataaaatttggtggtggaaaagatctgattcatgatgccgtgtcagagagcaaagctcctgtccttttggcctaatttggtgatgctgttcttgggtctaccacacctccttttgccctccgcaggagcctgtgttggaagagatggtgatgggcctgggcgttttgttgttggtcttcgtgctgggtctgggtctgaccccaccgaccctggctcaggataactccaggtacacacacttcctgacccagcactatgatgccaaaccacagggccgggatgacagatactgtgaaagcatcatgaggagacggggcctgacctcaccctgcaaagacatcaacacatttattcatggcaacaagcgcagcatcaaggccatctgtgaaaacragaatggaaaccctcacagagaaaacctaagaataagcaagtcttctttccaggtcaccacttgcaagctacatggaggktccccctggcctccatgccagtaccgagccacwgcggggttcagaaacgttgttgttgcttgtgaaaatggcttacctgtccacttggatcagtcaattttccgtcgtccgtaaccagcgggcccctggtcaagtgctggctctgctgtccttgccttccatttcccctctgcacccagaacagtggtggcaacattcattgccaagggcccaaagaaagagctacctggaccttttgttttctgtttgacaacatgtttaataaataaaaatgtcttgatatcagtaagaatcagagtcttctcactgattctgggcatattgatctttcccccattttctctacttggctgctccctgagaggactgcataggatagaaatgcctttttcttttcttttcgtttttttttttttttttttttgagatggagtctcactctgtcgcccaggcttaagtgcaatggcacaatctcggctcactgcaacctctctctcctgggttcaagtgattctcctgcctcagcctcccaaatagctgagattacaggcatgcaccaccacacctggctaatttttgtgtttttagtagagacagggtttcaccgttttggccaggttggtcttgaactcctgacctcgggagatccgcccaccttggcctctcaaagtgctgggattacaggcatgagccactgagccgggccactttttccttatcagtcagtttttacaagtcattagggaggtagactttacctctctgtgaaggaaagtatggtatgttgatctacagagagagatggaaaaattccagggctcgtagctactaagcagaatttccaagataggcaaattgttttttctgtcaaataataagctaatattacttctacaaatatgagaccttggagagaagtttccaaggaccaagtaccaacataccaacagattattatagtttctctcactcttacacacacacacacacatatacacatatgtaatccagcatgaataccaaaattcattcagggtagccaccttttgtcttaagcgagagataattttgatgtttgaatggaatgctcccaggatattctcttgtcatggttattttatataaaattcaaaaaccaattacattatttcctctgtaatcttttactttatcaactaatgtctggcaagtgtgatgttttggggaagttatagaagattccggccaggcgctgtggctcacgcctgtaatccagcactttgggaagctgaggcggacagatcacgaggtcaagagatcaagaccatcctggacaacatggtgaaaccttgtctctactaaaaatgtgaaaattagctgggcgtggtggcacacacctatagtcccagctactcgggaggctgaggcaggagaatcgcttgaacctaggaggcggaggttgcactgagccgagatcacgccactgcactccagcctgggcgacagagcgagactccatctcaaaaaaaaaaaaaaaaagaaagatcccagtttatcccagtttatcccttattcttcctcaattctcaagatttgtttttaagttaacataacttaggttaacacactctttgtaaaatacactgttcaatctacagactcagtggttagcttcctgttaactaatttctgttgacaggtacttggatattttatttagaaagtggttgccaataaattagttataagtcgccagtttcactgccttgtgaacacataattattgtggtctcagtattccctatggtggcttctcctgctcctggtattgccctgaaatgggccaaaagccgtggctccccaatactcaggttatagaacattgtccaggtaccacctaggagagcccagcctcactgaaagtattcaaatttaggaatgggtttgagaagtaggtagctggtatgtgcttagcacaagaatctctcttccttgggttagtctgtttcaaaactgaaaacactgtcattccttaagaaaataggaaaaagtattccaaacctctgtcactagaaaatttgccatattaccaaatctcaaaaacctctcaggaaatgagaaagtcccagtttctggtaaactatttgggcccttttctcaagttctccaaccagtgctatttccttgaggtgaggcaaagttactcaagatcattgctgccactcaaggccttgatagggcaagtgaaaggcatggaccattattatattgatcacagcataagctgtgaaaacccacatcttctccaaacatctgcttggagcattatcatcgcatagtttgctctggtgttcagggaaatcgctgtttcataggaaatcacatggcagtgggatgggagtgtttcctgacctgccgatggtactggcacctgagcaagcattcctagtcctttttggtctgggcctcttgttctatcacaaccacaagctgtttaaaataaaatgtcaagtcacaggcaggtcattttatcctgcgtgaatcaattgaagaattgaagtcctggtcagctgtgattgttggctttgcaaggaaagagaaggaacactccaaaatgctaaatgctttgaagaatagtgacatgcaaggaagaaaattccatgcaatttggagaagaaacatttttctaggaatctagtagctgagatattttatagtttaaaaacagacttccaatatcttgagaatacagttagctctacgaaataaagaggagtcaataatatatgcaactctgtagtcattcattattttatccagattgacagaagcagaggaaaccaagaaaaatggaagtggtaaaaaaaaaaaaatgcagtaattgccaatatttactgagcatttaccctgtgctaggccttgttataggcgcttagattgattttcttttcataacatccctaagaggtaggtattacatgctcattttgcttatgaggaaatctgctgagagagattaagtaattttctcatggtcacagcctcagtcttttagaccacggtgtcaaaagaagttcttactgtgagtcagggtggtgcagtggagaaagcgtttggggaaaatcctgacccaaaagtgtgcgttgggatgatgtggagatcattcaattttctcttgtagctacagctttgagatgcacccattggtatccacactggcctgctgtcctcaaatatttctctatgtcttgtttacttgagtagtgcagaaaagctgacgtcctgggtctgctctcgcatgcataggtgaggttttctctgtagctagtcatcttgctaaaccatatttttggtcacaaagaatcaggatgagagaaagtagataaaaccatggaaactcgaggtgccaccggaagagcaaaccaaagtatattgatctgctgaagctataatccaagtactaagtataccttcagaagttgtatgcattgttcttggggcaaaaaggaaatcaaacatctgcccttcctcccacaacctctttacttccctctcttcctaacactgtatctcacatctacagctgcaggcacacagatatgacatacagcttgatatctttatgtgcaaaggcaaaagatggctatggatataggaggtggcatttaaaagaacaatatccatgtttgatactgctttcattatcaataatgaaaaggtagcctttcagcagaacaaagtaaggtacaggtcgtttggaagccatttcagtcattcacacagtgtgatccaccattacgaagcagaatttgaaatcaaaagacaatagtacccatatacatcaaactaggagttcaactggggtcagtccttggactgcacatacagagttgggctgcctgactctcaaaacattgcccttgctaatttgcgttgctcacttcctattgaatcagggatgatttttctttgctgtagtgaatcagccctgctacactgcaagaatcaagccgattcacaattcacatcaattccaggagtgacggccagatggcagcatctggctagtcagttggtgagtgagtccacctccaatcttgattaaactctgctgctgggaagtagcaattctgagcataaatgtctttgatatcctgaatattttgggtgtgggatgagagaggcagtagatagtggaaagagcacagggtgtagactaagataggcctggattcctttctttaatctgtcaatgaaagcaatgaatgttctgaaactacatggcaatgctttttttgttgccactctggcttttttttttaatgctataaaatatatgcctatttttcactgccaagaggtgacaacacaatgatgctgcaaccagagaagacagacagctaccaacaactattgacaagacagaaggaacatcaagaatagatgcaagacaaagcaatgtatctccatggcctagattttttaggttatgcatagaaacagcaaggagaagaagacacaatccaagttttcttttgagaatattgtgctgtttaaatttattttttaaacatttcttagcttttcttattagtcaatttcataagcctgggaaacatctttactctatccatttaattgcatttgttcattagcttactcatttcacttattagttcattcaaacagtagctattatcaactgtcttctaagaactgtatctgggtattctggttttgcttttttttaaaaaatagaattaaaaggatttccaaaaggacctgattttacattagaattagaataatacattttaaattaatgtataacatatattattctagaattagaatagattttaaatcacattagaataatagccacatgacaaaaaagaaaagaaaaataataaaattaatgacaaagaaaaacaatagtcatgtgagaggaaaggcaaagcctaaatattcctctgtcctcttcctccacctagattcccagatgtaaggtattaaaagtagtttgtaaactttctgtgacgtatgctgagtctatccaaactgtcgggaattggagcctcccgggaaccaaacactccccaaagatcatacacctacggagttcccccaagagacacacaactgcagtttcatgtaggttcaccttttctctctttttatactctgtccacacaaacctggcagccacgcagtcagtccctgccctgtgtcattgtactggccacagcaacttctctctgtaaatgagaaaggtcttgctttcagaaaagatcatgtttgcaaactactcactcttgaggaagaagggtgggaaaagtagcagagatgagtggggagatggtgcatataagaaggaggaaagaggagactatggagtcaggatgccggcttgctattctcaacacctttttccagtgcccagttcttaccttatttctcctgccccttgctttcttttctaggcacctctaagatactgatggctctgcagaggacccattcattgcttctgcttttgctgctgwccctgctggggctggggctggtccagccctcctatggccaggatggcatgtaccagcgattcctgcggcaacacgtgcaccctsaggagacaggtggcagtgatcgctactgcaacttgatgatgcaaagacggaagatgactttgtatcactgcaagcgcttcaacaccttcatccatgaagatatctggaacattcgtagtatctgcagcaccaccaatatccaatgcaagaacggcaagatgaactgccatgagggtgtagtgaaggtcacagattgcagggacacaggaagttcyagggcacccaactgcagatatcgggccatagcgagcactagacgtgttgtcattgcctgtgagggtaacccacaggtgcctgtgcactttgacggttagatgccaccatgtagggattatcgcgagtggttgaccttacacttactccttaaatagcagtgagtaatgcatttgagctgtcccaggctctgtctcctcagctcatttcctactctttttctctatataactcattctattaaatacattgcaccaaagagatatggagacataaacctgtaatgaatgaggctgggcttttctgtaataagcttccttttataatactggtcagcttagctctctcagatcctatcctgtggaatttagttattatgtgtatttatgtagtatttcaaacatttcaaaatgctttcatctatgtttatcacattttaataccacagcacttataatgatgtcactacatata

SEQ ID NO: 95992 - DNA, 12959 bp, Homo sapiens
  misc_feature (1)...(12959): n = A,T,C or G
ggtgagaaataaatgaacgctcacaaattgagaaatgtaggcaagtaggctattgacttcggcaagcccgactctctatctcagggtttcccagacatcaggcatccctggaccatgcccccattccatttgtactattgactaatattatctgttttattcactcttgcatttatacaacatggtcctaagcaataatatagataacattatggactaatgtgttaattattcactcccattaaaagaaacacataacagtgaacaatttttactatttacgtgtactttctaacatcagtcacttcactttccacctgttgtacatatttcataattttgtgttcagtttcatctatggctgtaaattaaacaattctaccttggaaaatattttcacagaagaataaaggatccaaggacagtcgaaaaaaaaatgaagctcaaggtcaatgatttggtcaaattcatcaaattctgtacaaaacagagactaaatcatgcaggtactatacttttatcatgaaaaggtgctctaattatctgctaaggcagttccttaaatttaccaccaaattgacagaagatataatttttatgatgatctatttccctttgttctgacttcacaagtaaatgcaagatgttaaaaggtgatttattctatctcagtttgtgtaagggtccctgagaaacagaggtcctatcaaaatgacttgctgtccacctaagaagcacttggtcaaaaacagacaaaaccctgatttctagttctaatgccttcactctggggagtaaggaaaggaaacaagcatactctattattgcaaacaccacagaggggatagtgcagtaacggatactacactaacactttgatgcttaagactgattgtccttatcaagatttctttttccttttgcaatattttatgctacatgtttcgttatttcgtgcacacacacacaaattaccacattaaatttcccctacaaaccaatgtatgtgttgttgtattttacagattatgaaacagaggcatagagagaatgaataaccgtccagttctttttttttttttttttttttttttttttgagacggagtcttgctctgtatcccaggctggagggcagtggtgtgatatcggctcactgcagcctctgactcccgggttcaagcaatcctcctacttcagcctcctgaatagctgggattacaggtgcacaccacaatgcctggctaatttttgtgtttttggtagagatgggtttttgccatgttggccaggctggcctcaaactcctcacctaaagtgatccctccgcctctgcctcccaaagtgctgggattacaggtatgagtcaccgtgcctggccctggacaactcttacagtaagagtctcaaatggaaaaagtcaagagctggccgagcgcagtggctcacgcctgtaatcccagcactttgggaggccgaggcgggcagatcacgaggtcaggagatcgagaccatcctggctaacacggtgaaaccacgtccctactaaaaatacaaaaaattagccgggcgcggtggcgggcgcctataggcccagctactcaggaggctgaggcaggagaatggcatgaacccgggaggtggagtttgcagcgagcgagattgcgccactgcactccagcctgggcaacggagcgagactccgtctcaaaaaaagaaaaagaaaaagaaaaagtcagagctggtatctggacaagactatacataatctatacctgacatcactgtgacacaaaactcatatgacaacttcatttacagagacactaacctatataataattcatttcctgtgagctctgaaatctcagcaaatgcatctatgtgctcaaaatgcaatggggataaagagaggtggcttaatgggtacaaatataagaaatgatataaaaaataagacctggtgtttgatagatcaggaggacgattatagttagtgataatctactgtgcacttcaaaatagctagaagagaataatttgaatgtttctaacgtaaagaagcagcaaatatttaaggtaatggttatcccaatttccctgatgtgatctttacatattatacgaatgtattaaattatcacatgtaccctgaaaatatgtacccctattctgtatcaataaacagaaataaggccaggtgcagtggcttatgcctataatccaattattttggaggtcgaggcatgcaaatcacctgaggtcaggagttcaagaccagactggccaacttggtgaaaccctgtctctacaaaaatacaaaaattagctgggtgtggtggcgcacaccagtagtcccagctgctcgggaggctgagaaaggagaatcctttgaacccaagaggcggaattagaagtgagccgagatcgcgccactgcactccagcctgggagatagagtgagatttcatctcaaaaaaaaaaaagaaaaaaaaagaaatatttttaaaatatgcaatggtacatgaatgcaattttccagtttcctaggaaacaccctttctttcatccctcctaagacacacctctccataattccacctgagctctgtttccatttcttccctttccagatagggaaagaacttcttatagttgaggaaaaagaagaaaggcttagtcctttcctctttcatgccagaaacttgatcaaaggtgtcagatctacttattcaatggttttcagaggagacatgcaggaggacccacacaagaaggaaggcctagggccacctttctgaggttcaagagaccaggaagagctcagtacaccaactatctttagaacttaggtaagtaaaatattactccatttgctgcaatttaattaacctgcaccatattattatgacaatcttgtattacttttaatggcaaaaatcgcaattacttttgcaccaacctagtaaatagtgtgcattgtctttcccatagatagccactgctgcattagggaaatctgtgtgcaggaaggtatcgatggtttggtacctccctgtcagcaggttaagagcaaatattgcaagggtaccctggggctgaagaaattgcaagcattgaacattatatttttgcacataaatgctatgcaaaaaagacattgatcaatgcagtgtactcaacagtggtttttaccacaaatgcagaagtctttgtctgggataatattttacaatgttcatcggtttccaaaaaatgacttaacactagggcgtaattctgactattcctctcattggaagtgtggatcaggtctgaaaatgtgtcgttaaattaggctgcaagacaagttatgctaataaaataaagagcccgggtgaagtgccttgtgtctgttcaagacaaaatcatgctgaagttacagagaattttgtttcgattacagagatcataacagataattttctttaatgttgacttatactttattcctgcttcatataaaacatcttctctcaaaggtcataaatatcaaagtagatcatttgtactacttctgctggcaaatgaaggtagttggaaatgtacgcaggaaatctacacaagggacaatcagaaaaaccttatgagcatgttctgaatgcaatttttatggctgggagcagtggctcatacttgtaatcccatcactttggaaggccgaggtgggcgcattacctgaggtcaggagtttgagaccagcctggccaacatggtgaaaccccgtctctactaaaaatacaaaaattaggcgagcattgtgtcgagcgcctgtaatcccagctactcaggaggctgaggcaggagaatcacttgaacttgggaggcggaggtggaggttgcagtgagatcacgccactgcagtccagcctgggtgacaagagcaagactccgtctcaaaaaaaaacaaaaaacaaaaaactccacaattttaaaggatgaatatggttgcaaattgggcaggttatggtctgcttaagacacttcaataagtctgatatgtcataagcacagatgtcttcaggagccaggcaggtgtcatcactgaacagataggataaaagtcaggagggagagtggagtcagagaacagccctgagctagagccccttccacagacgcagctgttactcagctctaattgatacaacaccaatggtgcaccaaccaccatcatgtgatttttaaagataagacagtaatgaaaacttttagtgaactattccaatgtcaaactttatcttccaaaccaaacatcataaatagcattgtgtatgctgaaaagaagcactgtttagccaagtacctgccctggggctgcagtctatgtcttttgcctcatactatagacacttaagtgcaaatgtttctagccagtgtggctgtcagcatcacagaggggatactctacgtatcattcacctttacattctcatcacctacaaaaatgatctccacacaatatacatgaaaaaataaacttgcctcatgataaagctgctaatgaatgtcggccagaacaggacttcaaggcagagcaatattagctgcgcattgagtcctcaccaggtcaccattgtgtccacatttacctaaggaccccagtgataaaattattgcatttctaaatgacaggaaaattggacggtagtaaaaattaggcagattaactgttggaaggtatattatatcatttaagggtctactttccattttctaatctcaaagctagaccagatttaacatctgttagtacccaggccttacctttgcaattcacttctcacctctgtacaatttccccacatcatcccctgtgcccagaatgctcatctcttctctaaatcccctgaaaatcccctgcttatcctttaggacctgctgaaataaacttttttttgaagttttccttatttctcaagccaagtgatttccttcaccagcagtgtccctatgacaccatgttcacacaaatgctattacctctatcacactgtaatacaattatatgtctacaagtactttcctgtgtttctctgagggccaagaataaatgtatgctttgtgtatcaaactgtacacttgacctctatactttcaggaatacagtgctctgtccttaaatgttcatttgtaaatacagaaccatattcttgttaatatcacaaaatgaaacttaccaggaagatgaatgacaaccccagaacacactgttttgtagaaaataccataggctgaaaagatcacaggaataccgagtgctaggttggaatctttcatgacaccaaatgttcattcatcctctgccagattttacaactgtcctcggtgtgtttttaggttatgtaactttacacaaagtggaatcaataatcagggcaagacttaagagaaagtggatccaatgcaagaggagtaaagaaaaaaattcctcaattgtatggagcagattgttttaattatctacagaatcttgtgccccaagaaattaatagctcaagtttccagcaagagtggtggatgagatggagagcatttatgtgagagagaaccaaggatattactaaaaatggaagggaagctgggtttctcctgggcaaacagccctctgtggctctatttctcctaactactatgcctgccttcgtgtcatttagtcatttaggggcctgccagaggacagttataaaatctgtggtcattctgccrgcagcgtatagttttcacccagagtccagatcccaccggcaaaactctgtctaacacaggatgacttggaattagagtccgtatagcagaaagagcagcagggctgtccttgggtatccgttgctcagccaagtcatcaaataaaaaggatgattgcacaagtggaccatgtgtcaatctgtgggtttctgcatggccagacccaccaagggaagctttatttaaacagttccaagtaggggagaccagctgcccctgaaccccagaacaaccagctggatcagttctcacaggagccacagctcagagactgggtamgtcaacaatccccagagctgggacaggaggggcagcgacagggcagcacctgagggagaggtgagctgaagttagtgcttaggagatgtggcacactttggggacaggaagaaaaggaaatgcgaccccagagtggcagcagaggggcctgtgggttgagacactatagagtgtgtcataaccgagacyggatnggggagtagttacttctcttcttttcttacaggaaacatggttccaaaactgttcacttcccaaatttgtctgcttcttctgttggggcttatgggtgtggagggctcactccatgccagacccccacagtttacgagggctcagtggtttgccatccagcacatcagtctgaacccccctcgatgcaccattgcaatgcgggcaattaacaattatcgatggcgttgcaaaaaccaaaatacttttcttcgtacaacttttgctaatgtagttaatgtttgtggtaaccaaagtatacgctgccctcataacagaactctcaacaattgtcatcggagtagattccgggtgcctttactccactgtgacctcataaatccaggtgcacagaatatttcaaactgcasgtatgcagacagaccaggaaggaggttctatgtagttgcatgtgacaacagagatccacgggattctccacggtatcctgtggttccagttcacctggataccaccatctaagctcctgtatcagcastcctcatcatcactcatctgccaagctcctcaatcatagccaagatcccatccctccatgtactctgggtatcagcaactgtcctcatcagtctccataccccttcagctttcctgagctgaagtcccttgtgaaccctgcaataaactgctttgcaaattcatctggaagtgtctgtgtgtcttcctcggccgctctgctgtcatttagtgacaatctgctctagagatttgggtttatcatgaatctctccccctcaatatctgaccaaattccttgattcccccatcatccttcatgtgatacctgattccaggcctgccttaaaaaaaaatccaattgagtcaacttagcattggtctccctagccttaatatctcctctaagcaattttccatccactgactcctcccccaacaccaacctataacttgtgtatagatctccacttgttttagttgtattccagaattgagcccaatttgatattgaggtcccatttgatgctttatggtccgactatggtttttattgacatgatttctatcccaagaaaaaaagagctgcagtgaatcagctgaaaatgcacgtgcttcattatgatttatgaatgataaattttgatagaattgaacgttatgatagaaaatagaaaagaagaaagtagaaaaagtcaagaatgctataaataaggtgaaaccaagataaagaaaagtttagcctcagggatatttcttttaaatgggcacatcaagtctccagctattagcaatcgtaatagaggtggaaccagggtttgagtcaaatgtgcaataagataaattgttccgacagcagtaaggacagattgtaatgctgactggaggagaggtggacatctttcccaaaagttccatgtcctggagatggggagccgctggtcacgtgggaaggagaagggggaggaggaggaggaggaagtgggagcactcatgaaggtgagttggctcctgcccattctgccctccatagatgttcccaatggcgagtcaaaggttcattcaacacctgtcaggaagggcacagcctcgagaattcaggatttgtagacccagagagagaagaaatggatgatgagagccgctgccctggactccaacacagggcttcactcaggaatccatgagaaacaggggagaaaaaggggaagccccttcctgcaagttgtggacaggtgcagcattcaagtgattgttccaggaacagagtgggtctttttgaatggcccgactcagaacgcaagagaggtacgatgccatcagatctgcaccttggtccttcagtctgagatttctgacttctatatttctcctcctcttccagaccctgagaaacagcaatttccattcctcagatgactccatgtcagtaatggtgctttaattggcatcagacagcagctgtattgaagtctctcctctggagaagctattgagatcttgcttctccaaggtcgggctgtgaacttaaaagtttgcacagagacactgagtttgggaaatctcagtgctcaacagaatccactgactctaggtaaaacagggcatgtcaggaagtgagtgcagtcttcccataacctcagagtagcagaaggagaaggtgggactctgaaagctggagccacgtttcctgtgaagaaagatggagtggaccttccttgcttcaggtaccagatcacaggtctcttctcagtcggggatgcctcatctctaaaaccacaggatagagggatcagtccccacctgcccccacaccctctccaccttgtgacttcatcctctctcgtcattcattccttcgttcattcattcatccagcagtcatctactgagcagataccttgctccaggcacagtttgagggagtgatgatgcaacacaaaccaagacaggtccctgctcttttgaggccacattatacaaggataaaaataaacatacaaaattgttctaagcatacaaaattttgctaagtgtcaggaggaaaaatacacagcatagtacacagaaaattacacagagcagcacaatatagaggttctgtatgtgccacaaaagtgacagggcagagtgtcaccaggaaagacttatctcagagaatgaaatctgaacaggaggaaaagcagccagtcatgcagacaccagatggagaatcatcccagcaaagagaaagagagttcaaaagtcctgacaaataccaaggctgtaagaagacttttcgttctgtgtttacgataagttgattaaaacatctgaaggagaatgactaccattattcgcatctttgtatgtatttattccttaatgtaataaaacattttcagttttaaaaaatggtcctgaatggatagaggtttggcgtgttagaagcacaaaagttgtttggtcaggacaagatcatcatagccatgagtgttaatgataggagttaatgaggttcagacccttcatgcctgtgaagatggaagaataaagtaagttcctcatggggcacaaatcgagcatgttacatgcaagaataacattgcctaaagatctgtccagctgctgtgcaaaacacaactatttgggagacaagagtggaagcaaggccccaatgaaggaccacaagttgagggagagggaaacaagagtcttccaatctcagtgaatctcaccatcatcctctcatgctgcagccccatgctattcccctccctgttgccatggcctctctccagcccctccatgccttccacatcatcttcctgccatccccatgctgatgactgggctgaggtcagaggcagctcccctctcccaggacgtgagacgattcaaacaagaccaaggaggattctgtgcttgaccatcaggaaaccctggctggactcactgccccttctgcagtagacatccaagattttctgattgccctggacccaaggccagcaccacagagactaccattagagaagttaagtggtcacatccgcatgttccaaagacgtgatccttggagtccacttcttttccttgaacctcccatgtctgattttataaaattctcttaatatcaaatcttcaggaagtcttgcaggagtaaatgccgttaattgttctgtaagccggcagggagggtctccaggaattgtaagaatttaatcaacttgagcaatcagcctgttttacaagcttgctggtgggaaccagctcctggcataacccagcaacttacagacaaactggcatgaacattcctcattatcatgctaaagtctccacccaaggaggaggctcattaccataacatgtgaactatgtgctggcagaatcactcactgtgtatgggcaactgggactcctcctctacaagtgatgatacaccctctgccctctccatcaccacatagaatgttcttctcactttccatcaggaagacactgctttggagaatactcccagtgggcttcttacttgaaccaagtaacaaaacttatttatcaaaatgtacattctcatagagagtctttgttactcaccagggaaacaagccctggttttttcagctaccagctctaacatattctgtaaagtccagcacagaaggaaggttaattcacaatgctattgctttcattttatttcactttttaataattgggtacatatcagggcagatgtctttaggtgggggttgaatggaaggtcaaggagacaaatcatcaaccttggaaagatattcttgcagagattatgactacacttgggattcatgaatatgagaccccaccagcaaagtagcctgcaatgttcaaggatatccaagtagatcaagcattttaatgagaaaacgacaggctttgtctttcaagatgtccatgaattgactttccaaaagggaaagaaggacccattttcagggcagaagagagaagaggagaggggtttaggctaaacattgtaatcaattttgcctgataatgactttttgtttcttggttcatttttatttatttatttatttatttatttatttattatttattttcccaggctggagtgcagaggtgcaatttcggctcactgcagcctctgtctcccaggttcaagcgattctcctgcctcagcctcccgagtagctgggactacaggcatgcactgccatgcccagctaatttttgtattattagtagagacggggtttcaccatgttggccaggctggtctcaaactcctgacctcaggtgatctgccctactcggcctcccaaattacgaggattacagacctgagctgtcgcacccagcctcttagttcatttttagagatgaggtctccctatgtggcccaggatggatttgaagttgtggactcaagcaatgtttttgccttagccagcccagtagttgggtctataaatacacaccactgagcccagatgatactctcattttatgagctgtgtttccactctgattacataaggaagtgaggcaattagtagggataggagcatagaaattctgtctacattcctatttcaaattacctatgaaaaacagacttgtttctaaactaaaactggattttggttaataaatgtttttctttattaaaatgcattagacttatgacagagttgtcacttttgtctcacgtctgatctacaatgatttcaaaagaagatcaattgactacttcaaaattctcattgtttcaaagatattatggatgtaaaactgggtgatctgagataatttagcatatagggccagccaggttacccaaatgaatatctgggaaactgagtacattacatgcttatcacacatctccactgatttagaaaatatgactgtattagtcagagtcatcaagagaaacattgcagatgtaggtagaaagagacagacagaaatatagatacagaaggatttatcatgagaaattggctcaggcaattatggagtcggtgaagtcccacaatctgctttctgcaagctggcagacccagaaaagccagtggtataattcggttcaagtcctaacgcctgaaaaacaagggagccgatgacatagatgtcaacccaagtgtgggaacgatgacacaagatgtcctagcttaggaagtgaggcaagaaaaatgatgaattcctcctttctccacttttcattctattctggcccttaacagattggatgatccccatccagactagcaatgcaaactactttacttaatcaaccaattcagctgctagtcttatagaaacaccctctcagacacacccagaaatcattaattatttaattaattattaatctgggcacccacaggcccaggcaacttgaaatataaaattcaccatcatgatgacctatggtttccmaggtgcaccagtagatgttaccaaaatggcaccaccagccagaacccacatacattcaccaggtcagtgcacttctcaattcgccggagattcattttcttctgtgacatcacgttcacctggagtggagccaagaaccaggccacagctaataatgagaaagaaaggattctttatttgcttttttacaaatgagagaaaaatttgccaaaatcctttggtaataagtagttatctcaaagacaaagagactcaaaatgaaaatgaaaaaagtcagttacccttcccactgcccatgttcttcctccacatataaaaataggtattaagttcaccctttctggtattaaggactagagtctaacccaataactctgaatctgagtgtgcagatgttaccagatttttcattacagaaaatgacagagacgttcttccactacagtagctattttgtggtgacaacttttactttcccaggattcttcggttaagtgacacacacgggcaactggaagtatttactgttttcacccacagcttccacacttcacagatgtgcaggagcttcagtacagcagttcctaggaacatggataggacatgcgtgacttgttaaccacaatgcaatagcaaatatatggggttcggtgttggtctttcattcggaatatacagttcagaattgtttaaaatagtacatttagaaacaaataatatatcctgctgaactggttaaattggattgtatat

SEQ ID NO: 95993 - DNA, 26308 bp, Homo sapiens
  misc_feature (1)...(26308): n = A,T,C or G
agcctgggtgacagagcgagactcagtctcaaataaataagtaaataaataaatatctcatataccccataaatttatacacctattatgtacccacaacattttttaaatgatacaaccattctatgagatactacccagtagttaaacagaatgaagtaaatctgcatgtactgacatgaaaacatctccaatgcatatgaagtgaaaatagccaagaataacaccatgtaatatgctcacatttatgtaacacttctccccccccacaaaaaatgcaaaatagaataattctgtatgtgcacatttttgcaagtaaatgaaaagaaaatagtctggaaagagacacaccaaactgctaacaagttactccaaggagaaggattgagggaattaagggaggagctttttggttttgaatatctgcaatgttttacgagaagaatgtgttcgtgtttaaaaaataaaacagtacctctccacaaaataagggtagagatccaagagtaggtttcaatttagaggggagaagagaaaagtaggagaccccaaccccctaaggcagcaaaggacaggcttcaaaggctaaatggacaccacattgaatgcctatcccccaagttgaacctaggactccagagattgggccttctacatgttcaacacctcctaccccaactctgagctactactttcccccttttaatacgtctcagaactctctccattttaaattaatatctcttgaggatcctttccttccaaagttgtagcaaagtagaaggttctcatcaacatccctttcctagctattcctgaagacatgtatgcaaattcctttaaatggtggtcctgatccgcagctttgctgatcacttttggaaaattggcaaataataaatttggaaatttgtttataacatcaggcaatataatatataaataaatataaataagtttggaaacatatttataacatcaggcaatataataaaccatacttgtggaatttcaaagcttttaaaatcttactagtttccttcaattactgatctttttgattctgaatttcttttttaaacaactctcaagatccacctctttgaataaggtaggaaagagaaatcctcaagacagtgaagttcaataaagtctcacctttccttcagaacccaccctctttttcaagtcataccccttgctccttgacaccctgtcttatttagtatctcattcaacaaatatcattgaaagctagatactgttccaggcattggttacagagcaggaaacaaaatacacaaagccctggctcacttggagcttacagtctattggagagagtcagatctcctaaaaattaaacaaatatatgttaagttgtaattagtactctggaaaaaaataaagcagagtaagaggctacaagtgataatgggagtgatgttatttatatcaaggaaggcaccactgctactaagaacaaagacctgaagaaagtcagggatcaatcttgttagctggaagaagagtagaccaggtagagagaacagaagcctgtagggagaagagtgactggtatgtttgagacaaagtggaaagaggccagagtgcctaacaggagtaagcaaagggaaaaatagtagcagatgaaatcaaagcactggggtaagaagcagatcatatagagcctggtcaagccacagcatttgagatggggagccactggaacaaaaatctaacatgatctaactttcattttatttatttatttttaaatttatcttattttttagacagggtcttaccctattgcccacactggagtgaagcaggggaattgcttgaaacccggaggcagaggttgcagtgagctgagatcacaccactgcactccatctgtaaaaataaagtaattctagataacgtgatgtcttatcagaaaatactatagcatgctttttttaaagaactttttttttccttttgagaaagggtcttactctatcacccaggctggagtacagtggcatgatcacagctcacagcagccttgacctctcaggctcaagtgataaattatacagctaatttttgcactttttgtagagtcgggtttcgccatgttgaccaggctggtcttgaactcctgggctcaagcaatcctcctgcctgaagttctgactgctgagattacaggcatgagcccccacacctaccctaaaggacattttaaaatcataactagaatatcattattttaaacctaactagaataccattataatatctaataaataattccctaaaatcatccaatttccagtccatatccacatatccccatttattgctggcttgttcaaaccagcatccaaacattgcatttggctgttaggcttcaaatgtctcttttactctaaaacagtcctaacaattttttttttacataatagtatgaagagagtaggccagttgtcctgtcgaatattaatttgtatttttcatactatgtgagcctgaatatcttttccatgcacttatttatcaaatgcaaactgtttattaatatctttcatccacttatctatagaggttttggttttaattatgaaaataaatttgttggtttcttccaggctttttttgtttttgtttttcagacagagtctcgctctcgtcacctaggctggagtgcagtggtgcgatcttggctcactgcaacctccgcctccccagttcaagcttctcctgcctcagcctcctgagtagctaggattacaggcacccaccaccatgcccagctaattttgtgctagagagggggtttcaccatgttggccaggctggtctcgaactcctcacctcaggtgatccgcctgccttggcctcccaaagaggtgggattacaggcatgagccaccgcacccagccggtttcttccagttattggtgacatgcttcagtactattttagttacacttgttctgtatttgactataaagaagttatatcttcacaatatattttcagtaattctcactctgaccaccataataactaaaaaagaaaaagaatcaataaaaactttaaaaatacatttttaaaaatgtgtgtgggatggtaactactgtcatgaaacagaatacattagcctagtagataacaacataatttggagtcacccagatctggccctgccttttaggaactgtatattatgagctgaattgtgtcacctcaaaatgtatgtatttgaagaactctcattatctcagaatctgcctgtatttggagataggacatgtaaaggggtaattaagataaaataaggtcatacgggttgggaataatccaatatcactgatgtccttataagaaaaggagattaagggccaggcaccgtggctcacgcctataatcccagcattttgggaggctgaggcgggtggatcacttgaggtcaggagtttgagaccagcctggccaacatggtgaaaccctgtctctaataaaaatacaaaaattagccaggtgtggtagcccacgcctatagtcccagctactcaggggactgaggcaggagaatcgctcaagaacctgggaggtggaggttgcagtgagccgagatcttgccactgcactccagcctgggcaacagagcaagactctgtctcaaaaaataaataaataaataaaataaaggagattaggacatagatgcacagagaggaaagacagcatccatctacaagccaaggagagagggaggcaggccttagaagaaatcagccatgtcaagacctttaccttgggcctctagccgccagaattacgacaatgtatgtagttatagcagccctagcaatacactgtgtgatcttgaataaattaaatttttctaaagctcagtttcctcaactataaatggagataataacatatgcctcatgaggttgttgtgagaattaaataatgtatgtaaagctcatagcatagtaagaactaaataaattctggctattattcttatgaagattaaatgaggttatgcatgtaaagcattagctcagcctctagtacacaagaaagttctactaagtattagctatttttaataaattttcatttcataaaggcttatatttttcctatctccaaagtatttccttttagacctagtctaatttatttgtgtcataattaagtcagatgtaacaggctttgtaccgctgaaacaggttaagcaatcctatccaacaacatttattgagcacttacattttgttagatttatttccaactacttgatatgctttggtgttattgtaaatgctaccttatccaaaaattttatttatagttgtttgaagctcttttataagcatggaatttattttcacacgctattttctatcagtcttgctaggctttgtattaaggtaaaatttttatcctgtagtttcttctagcttttaaaatattcataatcaaattacatgcaaataatgagattttgggttttttctttctaaactttacatcttttgatgaacaaaaattaaaatgtatcaatttttttttctttgtttttttcagacggagtctcactctgtcacccaggctggagttcagtggcgggatctcggctcactgcaacctccgcctcccgggttcaagcgactctcgtgcctcagcctcccaagtagctgggactacaggcgcccgcgaccacgcctggctaatttttcactttttttttttttttttttgtaatagagacgaggtttcgctattttgctcaggttgctctataacagatactatgctatcctaacaatatgtttctaaatgatattagtgccaaaaccaggattacccagtgattttgttaatacaggcttattgaatcggagggtctggggtggggaatttgcttaagtatgcagtccccatactcggtgattctcatgaagccaaacatttgggcgcccctcacctgatgtcaccaagaaccagaagaccaattagaattttcgtgggcttcctgccccatggttccctctgttcccaaagggtttctgcagtttcacggagcttttcacattccactcggtttttttttttttgagactcgctctgtcgcccaggctggaatgcagtggcgcgatctcggctcactgcaagctccgcctcccgggttcacgccattctgcttcagcctcccaagtagctgggattataggcgcccgccaccacgcccggctaatggctaattttttgtattttttttttttagtagagatgggggggggtttcaccgtgttagcctggatggtctcgacctcctgaccttgtgatccgcccgcctcggcctcccaaagtgctgggattataggcgtgaaccaccgcgcccggcccggtttcgttttgttttttttttttttttttttttccaaaaatgggcggaggagagtagtctgaattgggttatgaggtcccctgcggggtacctcacctcagccattgaactcacttcgctggccgtgagtctgttccaagctccggcaaaggaggcatccgccgggcccctccccgaagggcggggtccacggcatctcctgcccagtctgacctcgcgcggagccccgttctctgggaactcacctcccygaagctcagggagagccctgttagggccgcctctggccctagtctcagaccttcccaagggacatgggagtggagtgacargacgcactcagctcgtggccccactgatgagcttccctccgccctatgggaaaaagtggtctcatacagaacttataagattcccaaatccaaagacatttcacgtttatggtgatttcccagaacacatagcgacatgcaaatattgcagggcgccactcccctgtccctcacagccatcttcctgccagggcgcacgcgcgctgggtgttcccgcctagtgacactgggcccgcgattccttggagcgggttgatgacgtcagcgttcgaattccatggcggcgcggcggcgacggagcaccggcggcggcagggcgagaggttcggagctcaatatcgcgggacggcatgcggggggcgggcagtcagaaaggaacgatgccacctactgtgacccccttccccttccagctccctataacctgcacttggctaccaaaccagttggggtgctaaattttgtaaatttcggttttcagagctttggggattacataattgtgcataaagccttgcggagctgtaacaactaatgtgccagtactgttgttaatacctaatgtcatccaatttacaaaaagtaattgtaaggcacaccattattttatacacaacaaaggataagcactgaaaatggtgaactgtgattcactgcttatgtcatccattgtaagatgcatcccagttccagagagtaaaatgcgagtcttagacctattgagatacggtattatgtgtataatgttcttaaatgcataggtgcaccctataaattaggttctattgtacttctctagaagtacagtattgtacaatattctaatattggagtaagtgaagtaggaagagatcaaatacttctccaagtttccacagagaaaagcagcagagctaggctctaaattaggcacagacccttgagcacttaactaacctttatcmcatacggcctcatgtatgaggtgggtatttgggggacattgggacacaagtaaaacagataagcaggcctcaatctatgagcttacaagactcctgggactcccttttattttgttttatttcatttggctagaatagcaatttaggaagaattacacagactgttacacaaaagtagtgtgggacagttgttattgcctctgtaaacttagaaaattatcttaaaccggcggggtgaggtggctcacgcctgtaatcccttgggaggccgaggagggcagatcacttgaggtcacgagttcgagaccagcctggccaacatggtgaaaccctgtctctactaaaaatacaaaaattaactgggcatggtggtgcacgcctgtaatcccagctactcaggaggctgaggcacgagaatcacttgaacccaggaggcggaggttgcagtgagccaagatcgcaccactgcagtccagcctgggcgagagagtgagactccacctcaaaacaaaaaaagagagaaaattatcttaaaccatttctttaaaagatttttttcaatctttaaaatctacacgtattcgggtgtgtactcattctttgctaatttccaaattctgtagcattaaatgaaagcaaaagagttaataatggcaacacggctccagaagactcttcccctgccaagaaaactcgtagatgccagagacaggagtcgaaaaagatgcctgtggctggaggaaaagctaataaggacaggacagaagacaagcaagatggtatgccaggaaggtcatgggccagcaaaagggtctctggtargagtggatctggggatgatatcttgttatttcaactcctatttcgtccttctttcagggaataattaatttctctatcctttgggcataccacagcactaatctactgccttgaatcttcattttcatgtatttgagatggattggggtctaaggaaagaccaggattggttgggcgggcaaagttaatcctgacaagtttctgttttaccacaacagctgtttttgattcccataaagtagtacctatctgtctttcctcagaatctgtgaaggccttgctgttaaagggcaaagctcctgtggacccagagtgtacagccaaggtggggaaggtaagagactctggaaccratcttcagtccatggatatctcagagagcrtcctttgttataaggactcctgtctgggatgctgttagtactcattttaggaatcctctccaaaatatgatgagtgagtagttttctctaatggcaagagataggagtggtagggcttggggttaataatcagggtgttttttaacatggtgtgttagaccattcttgcattgctgtaaagaaatacctgagactaggtattttataagaaaagaggttcctagaggctgtacaggaagcatagcagtatctgctcctcaggagaccttaggaarcttttactcatggcagaaggtgaagcgggaataggcacgtcacatggcaaaagcaggggagagagagagagacagagagaaagggagagagagagattggagaaggtgtcacagagagagaaagagagaatggggaggtgtcayacgcttttaaactaccaaatcttgtgtgaattcactcactatcaagaggacagcagcaagacagtggtgctaaaccattcatgagaaatccacttccatgattgaatcacttcccaccaggccccacctccagtactgaggattacaattcagcatgagatttggaaggagacaaatatacaaactatatcacatgcgtaccttttgtggttgccatcagccttctacacctcattctctttttaaaccagaaaatggtatcattgttaagggaaarctgttttcttgttctaatgagaaactgtaccctggaatggcatgagttactgatgaatgrggaaaaaagaaggctacctctggaataagttttctttaactcagttagaatcttttttttttttttttttttttttgagatagagtctcactcggtcacccaggctggagtgcagtggtgtgatctcagctcactgcatcctccacttcctaggttcaagtaattctcttgcctcagcctcccaagtagctgtgattacaggtgcccaccaccacgcccagcctgggctaatttttatatttttagtagagacggggcttcaccatgttggccaagctggtctcgaatgcctgacctcaagtgatctgcccaccttagcctcccgaaatgctgggattgcaggcatgagccaccatgcgcagcctaactcagaatcttttgtatagttaaaaaaaaggaagcatgttttcatttatagtaaggttacacccaggttactggtagaacataggtttgcaattctttccttgggagatgaatgttgatgttgctgtagaatgatgacttgagcsataagaaaatttagagcctcatttaggatgtcagggctgaacctatactaatgttgattttttctctctctcyctttctaggctcatgtgtattgtgaaggaaatgatgtctatgatgtcatgctaaatcaggtaagaggcaagaagaggtggcaccattatatttatgagaccatcttcttgataattattgatgatagcatcacagtgttcagatctttaaagtcccttttttttttttttttaaattttgttttttctttttgaaatggagtctcacttcatctctcaggctggaatacagtggcacaatctcggcttactgtaacctctgcctcccaggttcaagcaattctcctgcctcagcctcccaagtagctggggttacaggcgtgcaccaccactcccagctaattttttgtatttttagtagagacaaggtttcgccacgttagccagggtctggtctcgaactcgtgacttcaagtgatccacccacctcagcctcccaaaatgctgggattaccaggtgtaagccaccacgccttgcctaaagtccttcatatgtgtgtgtgtatatatatatatatatatatatatatatatatatatatatatttttttttttttttttttttttttttttttttttgagacagagtcttgctctgtcacccaggctggaatgcagtggtgcaatctcggctcactgcaatctctgcctcctgggttcaagcaattctccagcctcagcctcccaagtagctgggactacaggtgcagtgtctggctaattttttggtatttttagtagagatggggtttcaccatgttggccaggctggtcttgaacccctgacctcaggtgatccacccacctcaccctcccaaagtgttggtattacaggcatgagccactgcgcccggcaagtcctttatattaatattagccattagtggttaaacacctgagtactcagccctagcacactcttatcagatagcagagtcctctgtgagaagatttttttttgcaaatttcatatcatttattgaaattgttaactctctgttcatatccttttgcacattttttttttttttttaaacagacaggatcttgttctgtcacccaggctggagtgcagtttgtacagtcatagcccactgcaaccttgaacttctgggctccagcaatcctcccacctaagcttcctgagtagctcggacttcaggcgcatgccacaaagcctgactaatttttaaattttttatggagatgagaatctcgctatgttggataggtggtcttgaattcttggcctcaaatgatcctcctgccttgtcctcatgaggcactgggattacagggatgagccactgggacaagctgttttgcacattttctaaagttattggtccttttcttactggtttcgaggaactttatataatatggagaatagccttttgtctgtaatacaaaccacttgtgttttccagatttgtcatttaccttttggttttccttatagtacactttttgcccatattgaagttttaaattttttctgtagttaaatttattaatttttcctttttaaaaaattttgggtttttttttttttaattttagagacagtgtcttgctatgttgctcaggctggccttgaacttgtgacctcgtgtgatcctccaacctcagcctcccaagtagctgggactacaggcatctgcccccaagctcagctttctttttaatcaacctttttctcttgtttacctttgtggttttgagtagataatacatttgcctcattaatatatttcctggatatgacttcatgtttgaatttattgatccaacatatataattttaacaaccaattagtatttatttcttactatttcttctacttaaaataccacgagcagatagaaaataccttaaggttagccaggtgcagtggctcacgcctgtaatcccagcactttgggaggctgaggcgggcggatcacctgaggtcgggagttcaagaccagcctgaccaatgtggagaaatcccatctctactaaaaatacaaaattagccaggtgtggtggcatatgactgtaatcccagctactcgggaggttgaggcacgagaattgcttgaacctgggagacggagtttgtggtgagccgagatcstaccattgyactccagccctgggcaacaagagcaaaactccttctcaaaaaaaaaaagaaaagaaggaaaataccttaaggcagccaggtgtggtggctcatgcctgtcatcctagcactttcggaggccaaggctggagaatcacttcaggtgtgagttcaagatcagcctgggcaacatggtgaaaccttgtctctacaaaaaaatacaaaaacaccgggcatgggccagctactttggaggctgaggtgggaggattgcttgagcctgggaggttgaggctacagtgagctgtgattgagccattgcactccagcctgggtgacagagggagaccctatctcaaaaaaataaaaaataaaaaccataaaaacatttacaaaaaaattttttaaaggaaaagaaaatatcaagctgggcatggtggcttatgcctaaaatcccagcactttgggaggccaaggcgggcagatcacttgagttaggggttcaagaccagccttgccaacatgttgaaactccatgtctactaaaaatacaaaaaaaattagtctggcatggtggcgtgtgcctgtaatcccagctactagggaggctgaggcacaagaaattgcttgaacctaggacacagaggtggcaatgagcggagrtygcaccactgcactccagcctgggcgacagagcaagactctgtctcaaaaaaagaaaatatcttaggctcctttttgttctaacatctaatgaccttttttttttcaccagtgggctaaggtcgtayaatggctttagaatgtgagcaagcaggagatagaggtaggaaggggcagcatgcttaacaaaaaagaatgcctccatatccagggctcggccatacaacaccagctgctatgccttatcatggacttctctctcttcactctgagtgatttacttacagatacctctttttagatactggccatattctctctcagtatctccaagtcaggtcaggtyaggtatgggacggatgtggcagtggttttgcgtatcccttgtcccctcccattattgccctgctctcagctcattgtcaaatttctgcagctgacaaacaaaagctgtgagtagaactgtcaaggagtaagtcatttaacagttgagcataacaggtttagacctttggagcatccaaattgttttcatttgggaaataattattgggagtggattgggagctggaaaacacatatagcttagaaaatatctaaatagggagctgaggcaggaaaaaactggaggagccattcaatgtaggatatttgaggttggatagagggttttaggaagcttctaggctcccactttaattcctaagaatccaaagtttaatgtataagccctatttcttctttatatctttaatcttacaggaatctaattttcttgcctgatgctatccttttccttatggaaataactggcacstgtgacgaaggatgagtcattggtttatgtgatttccatttgcaaaactccttttttttgtttttgttttcactcaacatagaccaatctccagttcaacaacaacaagtactatctgattcagctattagaagatgatgcccagaggaacttcagtgtttggatgagatggggccgaggtaatgatttttattgagattttatgagttggcattcagaaagtcagaagcagcttagtgggtggccaaaggattctctgggtttaaattgggtcagtagaggctctgaagtctgggagagccttaggaatcaagttgagcatcttgaaattggggaatggcaggcatcctccttagagttcccactggaaaaactaagagnagcccattgagtctgaaaactcttctatagttgaactgctagtagtgctcatagactatggcagttagcaagtaacttgtatcaacatgattagttccctaaatcctttcacctttcccttctcccttwcctgcctgtttgtcagatgttaagcagagagatcttggagagctggcctgttactcttagggaactatcttatgtgtggcatttcctttgcagttgggaaaatgggacagcacagcctggtggcttgttcaggcaatctcaacaaggccaaggaaatctttcagaagaagtgagtgctgaaaagtgactacaaaaaaatataccctcctcttcttagatgtatattctctaaaaaatttttttttagacagtttcactcttgttgcccaggctggagtgcaatggcatgatctgagctcactgcaacctccacctcctgggtttaagtgattctcctgcctcagcctccctagtagctgggattacaggcgcccaccaccacgcccagctaatttttgtatttttaatagagatggggtttcgccatgttggccaggctggtctcgaacccctgacctcaggtgatccgcctgcctcagcctcccaaagtgcgggattacaggcgtgagccaccgtgccctgccttctctaagaattttataagtgtgtggcttataaaaaacttttcgttttataggtgtgatttggcctaaatgttaatgtcttttcaccctgacattctgtggttgaaacaccaaactgcatccttagtgattaaatcaaactaataccttgaaagtcactaaaaacagaagaatctaatatatttaacacatgactgacaaatttaggaaatttgggataagtggagactatcctgggatagataatattcaactaggggctgagcacggtggctcatgcctgtaatcccagcactttgggaggttgaggcaggaggaytgcttgaagctaggagtttgagaccagcctgggcaacaaagcgagacccctgactctcccccaaaaaaaaggaaagaaaaaaagagaatattcagttagaatttttaaaactttatgatatagatgaagaactttctggagaattggagaacatgtttctttcagggaaagagattagatggatatcttttgtttgaaatctcaatggcttttgtggtgtttgggaaggacaagcattgtttttcccattttttaaattccatttgtctccagagcttttttgtccatttagtgtcctcatttagaattagactaattttgatttatggaaagttgatgtgtaaaggagctcagtgctggaaaataaattctttggagattttctgtcttgtaagtccatcttcatagtagacctttatttgtaaagttttcttacaccttggactctacagattccttgacaaaacgaaaaacaattgggaagatcgagaaaagtttgagaaggtgcctggaaaatatgatatgctacagatggactatgccaccaatactcaggtaactctcactatacttttcgaaagaaacrcatcttctttttttattttattttttagaggcaaaactgtgctctgttgcccaggctgggtggcacaatcatggctcactgcagcctcaagatcctcaggctcaagtgatcctcccacctcagcctcctcagtatcaggaactacaggcacgtgccactctgcccagctgattttttttcttttttttytttttttttkgtaaagatgaggtttcactatgttgcccaggctggtctcgaattcctgggctcaagcagtcctcttgtcttggcctcccaaagtcctgagattacaagcatgaggcaccacacctactcctgtttcttcttactcagggtaaagcagaatagcttagatcattcctrgactgggacaggccaggatatcttgaatcctttctacttctcacctcaggggtgctctcactgatctttgtaatcccaaagggacagtaagaatgaggatagaatgtgcctttctagtctyggctctgttatntactaaggttctttttttttttttgagctggagtttgattcttgttgcccaggttggagtgcaatggctcagtctcagctcgctgcaacctccagctcccgggttcaagcgattcttctgcctcagcctctcaggtagctgggattacaggtgcccrccactatgcccagctaattttttttgtatttttagtagagacagggtttcatcatgttggccagtctggtcttgaactcgtgaccttgggtgatctacccrcctcagcttcccaaagtgctgggattacaggcgtgagccatcacgcccggcctactaagtttcttataaaatcttaggccctatttccagacgtttattgtttttktcgtttttttgtttttgtttttttttgatacggagtctcgctctgtcgcccaggctggagtgcagtggcgcgatctcggctcactgcacgctccgcctctgggttcacgccattctcctgcctcagcctccggagtagctgggactacaggcgcccgccaccacgcccggctaatttttttttgtatttttagtagagacggggtttcaccatgttagccaggatggtctcgatctcctgacatcatgatccgcccgtcttggcctcccaaagtgctgggattacaagcgtgagccactgcggctggcaccagaagtttattgttatggaccaagagaggagtgataaaaaatcaaactgattaaacaattaacatttaaatttgttttcacttctggatatataccaccataaaaaatttaatttagataaactgaggtataccaggatgctgaaactgtccggaaacagtcacatatccaaaaaaatggagaagttttagtcttttttaagatgggaagatctgagacataatagctgtctttacacactgacgtcatgaggaaagccttttttttctagacttattctgagttgtaaaatgtgggaggcagaacttggatggtcaaccctctatatccatggattcaatgaactgagaatcaaaaatgtttgaaaaattgcttctgtactgaacctgtacagcctttttttccttgcttstcattattccctagacagtgcaatataaaaactttacaaagcatttacattgtataatattgggtgttataaggaatctagagatgatttcttagattgtcttktgttttgtttgttttttgctataggatgaagaggaaacaaagaaagaggaatctcttaaatctcccttgaagccagagtcacagctagatcttcgggtacaggagttaataaagttgatctgtaatgttcaggccatggaagaaatgatgatggaaatgaagtataataccaagaaagccccacttggtaggacttcacattttcttctgcattctctccttataattcctagctcctttaatggatactttattatcattatgatttaaagcttkctcatagtactgaatgaagaaaatgggatttggggtgacaggttgtatggagggaagaggaactattttgaaagttgaggctgggtgtgatgggtcatgcctataatcccaacactttgggaggccaaggcaggtggattgcttgagcccaggagtttgaaaccagcctgggcaacatggtgagaccccatctctactaaaaatagaaaaattagccaggcatggtggtgtgtgcctgtgatctagctacttgcgaagctgaagtgggaggatcacyggagcccaggaggttgaactgcatttagctgtgtttgtgccacggcactcagcctgggcaacaggagtgagaccccatcttaaaaacaggaaaaaaaaaagttgaaagatgaaagtcttttttagggaaggatgttaagtacagttcactagatgggatcctagtttggagtctgatctctgggtgggcctgcagggaagctgacagtggcacaaatcaaggcaggttaccagtctcttaagaagattgaggattgtattcgggctggccagcatggacragctctcatggaagcatgcaatgaattctacaccaggattccrcatgactttgggtaaggcctgtgctgttacttcactttgttcttctacctatacatatcccctgtatccatcagcagcagctataatcttttaaatcttttattcctaagaaaatgrtcgtcttgaataggtacagaaacaaaatgatatataggtagcctatttaatcagcttacaaatatgggatgcaatctccyggcttgaccacagccatattctctgacaaagtggaagttaccaacccaagagagaatgggtctagctatccaaccacccaagtaaaacaccttcaggcatatcacccccttttcctatttgagtaactaaaaccacacaaacaccatttctgtgaactcaagtgatattagatagacaaaataacattttacatttgttgattctgttttctggtttacatccgatttctatttcttttatwgctttatagagccccgtgacctagaaataaccctgagtggtcaacaggtctacctgtgcttctagatagaactgtatccaactgttccctgttgatatcaatataacttatttttaaatgattttataaaaaataattttaactctagtctcaaaagtcaaaatccacatagttcatcttataccgagtatatatttaatattattttatatatttggaagttaagatctctttacagatctctttctctctcaaatggaaaacctgtttctcatacctgttttctaaaggacctatctgtcattttctatttttagtcatgcgccttttagccacatgtcagaaagctcattatgggttatatctctgttcttagactccgtactcctccactaatccggacacagaaggaactgtcagaaaaaayacaattactagaggtgagatatgtatgatttgagaagtattatatcccttataccagtgtcctcccacattgattctatatctcatcttctcaggctttgggagacattgaaattgctattaagctggtgaaaacagagctacaaagcccagaacacccattggaccaacactatagaaacctacattgtgccttgcgcccccttgaccatgaaagttaygagttcaaagtaagaaaaatgatcatttattttcatattcttgcacccttaaccacctcccccatcccactgttctctaactacttcttgtcaagagcaaattgtcaattagggcagactttttatgtactagggatttgggaaggccaagcttttcctagctgccttgtaagactgtttgggagcagaaaggtctgccaagttatatcagaatccccaaattcttcagttcakctcagtctcttgtagagtctacatcagcctttttgtcttatttttcacaggtgatttcccagtacctacaatctacccatgctcccacacacagcgactataccatgaccttgctggatttgtttgaagtggagaaggatggtgagaaagaagccttcagagaggaccttcataacaggtctgagtctagctttgcgtttggaaagacactccttgcccgaaagtacagctgtagaacttataagagggagtcagaggaaggtgttggcttttttatgyttatggcctatctgtgcagaacaacagagtacaataatattggcttttccttaggatgcttctatggcatggttccaggatgagtaactgggtgggaatcttgagccatgggcttcgaattgccccacctgaagctcccatcacaggttacatggtgagtgaaaytgaactctgggaggagcacaggggaaagggatacagtaatgttctcagtgctttttttcctagattaggattagatggttcccctccccaagagttaagccagctcactgataaccttgtcatctcttactgtgtccctctttctttaaattcytaaagatacctcacctttccctcagaaggcggaaattcacaggggcttctaccctctctagaacagaattgtgaggggaaatggagaagggtctatattgtgtttaagggaatggaaaaacagggtcagtggtatgcaccttctctctaacacagtgggttagaagctgaccttggtattcatgtatatatttcagtttgggaaaggaatctactttgctgacatgtcttccaagagtgccaattactgctttgcctctcgcctaaagaatacaggactgctgctcttatcagaggtgagacaggagtatgtctgtgatctctagtttattaattccagtttttttccratgagaaaagtttgaccccagaaccaagaggtttacctgggatagcttgagagaggaccaagtacaatttctagtacattggattcctctgctggagtaggggaaaaaagtactgatgggattttctgtttggctttggagccatctaattcttagtaggatatgggaattcaaaggttttttgctttgcaggtagctctaggtcagtgtaatgaactactagaggccaatcctaaggccgaaggattgcttcaaggtaaacatagcaccaaggggctgggcaagatggctcccagttctgcccacttcgtcaccctgtaagtactcagaaccaggaggactagaagactccttttggccagataagactacgttctctattgcagcttctgaaccagagactgatgttgacacactttttttccatttggcaggaatgggagtacagtgccattaggaccagcaagtgacacaggaattctgaatccagatggttataccctcaactacaatgaatatattgtatataaccccaaccaggtccgtatgcggtaccttttaaaggttcagtttaatttccttcagctgtggtgaatgttgatmttaaataaaccagagatctgatcttcaagcaagaaaataagcagtgttgtacttgtgaattttgtgatattttatgtaataaaaactgtacaggtctaccactggcttcttcgggctttatttctccaagaacatatttcttctgacattagtagatctccatttccaggacagaaattactcattgctctgagggttattcagtatcctgttcttagtggcatctgtgcattgagggacactaatgggggcgctaatgcttttacctgtttaattcmatttttctgcaaactggaatttgttgagtattatcacaggaagggtagaggcaacaaaggctaagtcgtgtttttctttcccatgcatatgtattcacttgcctttttcaaatttatccactgcagcctaggtctcccactactcaacatcctaggactcatcacatgtccaaaaatttgggaagcccttggaggactgtcactaagcctgaatacatcttgaggaggaaaggaaaaaagtggaatgagtttttacataacctgctccaactaagaagtactaaagtccaggtcagatcctgatatggttaggctttgtgtccccatccaaatctcatcttgaactgtaatccccagaatccccacattttaagggagagaccaggtggaggtaactgaatcatgggggcagtttcccccatgctgttcttgtgatagtgagtgagttctcacgagatctgatggttttataaggggctcttcctacttcgcttggcacttctccttcctgccaccctgtgaagaagggcttccccttcaccttcctctatgattgtaaatttcctgaggcctcctcagccatggtgaactgtgagtcaaacctctttcctttataaattacccagtctcgggcagttccttatagcagtatgaaaacagactaatacagatccaaagacttcctgattgtatttaaacacacaacacagataaacaacacacttccttaagtaacagagaagtttgtttaaatttttcctgtaactttttagaaaccaggtttccaatatctatcaaaatttgaaatgttcatgccctgttgacctaaaacttacagatatatatgtttgcatagatgtcactgaggcattggtgtacacaaaaagatcatagataaggaactagtcaaatatatctactcactgaagtaacctgctattaaaactgaagtagactgcatacttttccaaagaatagaagagaggaaaatactttgcaactaattctacaaagcagaatgaaaccaaaaccagatgaagatatcacaagaaaataaaattatagaccaatatcccttaacaatataattgcaaaaatcaacaaaatactaccaagcctaatccagcaacattataaatggactatatacaatgatcaagtgagatttatcacagtaatgcaagattgaaaaccaaggtagggcaaaaatcacatgatcatctcagatgcagaaaaagcatttggcaaaatgtaacattttttcataatgaaataaaatccaacaaagtaggaatgaaagggagcttcctccaccctatgaagaacatctatgaaaaactcacagctaacattacaatggtgaaagattgaaagcttatcctctaagatcaggaataagaccaagatgtttgcactcaccacttccattcaatattgtactggaggttctaaccatggtacttaagcaagaaaaaaaaggcatcaagattaaaaaggagataaaactaaatttgcaaattacgtgatctatagagaaggcccaaaagaatccatatttagagctaaaaagttcagcaagattgtaggatacaagatgaattgtatttctttttttttctttttctttttttttttgagacggagtgtcttgctctgttgcccagactggagtgcagtggcgcaatcttggttcactgcaacctccacctcccgggctcaagtgattctcctgcctcagcctcccgaggagctggggctacaggtgcccaccaccacgcctgcctaatttttgtattcttagtaaagacagggtttcaccatattagccaggctggtctcgaactccttaccttgtgatcctcccacctcagcctcccaaagtgctgggattacaggcatgagccactacacccagcctgtatttctttttattttatttatttttctggagatggcattttactcttgttgcccaggctggagtgcaatggtgagatctcagctcactgcaacctctgcctccgggttcaagtgattctcctgcttcagcctcccgcctcggcttcccaactagctgggattacaggcatgtgccaccatgcctggctaatttttgtattattagtagagacagggtttcaccatgttgggcccaggctggtcttgaactcctgaccttaggtgatccacccaccttggcctcccaaagtgctggcattacaggtgtgagccaccacgcctggcctatgaattgtatttctatttctacacactagtaaagaataatctgaaaaattaagaaaacaattccatttataatagcgtcagaaagaataaaacactaggaatagatttaaccaaagaagcatgaaacttgtacactgataactacaaaactattgaaaaacattcaaggccacctttatttatttatttatttatttatctgagacagagtcttgttctgttgcccaggctggagtgcagtggcacaatcttcccttaatgcaacctctgcctcccgggttcaagtgattttccggcctcagcctcccaagtagctgggattacaggtgtgcaccgccacacccagctaatttttgtatttttagtagagatggggtttcaccatgttggcaggctggtcttgaactcctgacctcaaggcccacctcagtctcccaaagtgctgggattacacacttgagccaccatacccagctaagacctatttatttaggtcttgaatttctgtcaacagttctgtagttttcaatctacaagtgttcgtagattggaaaatttattattaaaatggtaatacttcccagagcaacctatagattccatacaattcctattaaaattccattatcctttttttttgcagaaatggccaagaaaaattcataaggaattacaaagatcatgaataacaaaaacaatcttgaaaaagctacagtactcaagacaatgtgataatgacataggatagacatagaaatcaatgggatagaattgagagtctggatataaacccaagcaaatatggtcaattggttttcaacaagggtgccaagaccattcaatgggggaaaaatagtcttttcaacaaatggtgctgggacgacttggatatccacatgcaaagtaataaattaggaacactatctcacactacgtaaaaattaaaatggatcaaaggcctaaatgtaagctaaaactaaaaagctcttagagcataaggagaaatctctgtgaccttggattaagcaacagtttcttaaatatgacaccaatgcacaagcaagcaaaagaaataagttggtcttcgtcaaaatttaaaactcttggccgggtgtggtggctcacgcctgtaattccagcactttgggagccagaggcaggcagatcatctgaggtcaggagtttgagaccagcctggccaacatggtgaaaccccatctctagcaaaaatatgaaaaattagccaggcgtggtggcatttgcctgtaattccagctactcaggaggctaaggcctgagactaacaaatctcggcaaagatatggacaaataaaaatcctcacacattgctagtgcgaatataaagtggtgcagctgctttggaaaagcttggcagttcctcaaatagttgaacataagagttatcaggacctagcaattccactactaggtgtataaccaagagaataaaaaagcaatgttcacacaaaaatttgtacatgcatattgatagcaacaatatttataatagccaagaagtagaaacactccaaacatccatcaaccaataaatggataaacaaaatgtggtttattcctgttagatatgttaactatcttgaccgtggtaataattttattaatatatatatatgtcaagctttatcgaattgtgtattttaaatatgtgtggtttattgcatgccaatcataactcaataaagctgtaaaaacataaaaagtatatccatccaatgcaatattattccgtcataaaatggaatgaagtactgatactgcatggatgaaccttgaaaacattattctaattgaaagaagccacacaggtcacatattatatgattccatttatccgaaatgtccagactaggcaaattcatagatacagaaagtagattagtggttgccagtggctggaggaagagagaggggagtgattgctaatggagtcaaggtttcttggtggggtgattaaaatgttccaggattagcggtaatggttgcataatttgtgaatatactaagaaccacagaaccgtacacttcataagggtgaaaatgaattacaggccaggcacggtggcttacgcctgtaatcccagcattttgggaggccagggcgggtgaatcacttgaggccaggagttcaagaccagcccggccaacatggtgaaaccctgtctctactaaaaatacaaaaattagccgggcgtgatggcacatgcctgtaatcccagctagtcaggaggctgaagcaggagaatcgcttgaacccaggaggcggaggttgcagtgagtcaagatcacaccactgtactccagcctgggcaacagagtaagaccctgtctcaaaaaaaccagacaaacaaacaaacaacaacaaaaagaaaatgaattatatcacaataaaaatataccaagtttttgtaatataaatatatatatatatatagggggatcacttgaacccaggagtttgagagtacagtgagctctgatcatgtcactgcactccagcctgggtgacagagcaagatccagtctcaaaaaaagaaaggaaatcagaaataatttcaataactaaatgtcaaagggaaatagaaagtatcagggaaaatggaggtgaatagaaaatcatgattagaaaaccgcactaataatactgcagtcaagatccatggatgaatgctaagattagtcgggaaaatgatatttgcatagcctcaaaaaacctacctccagatgtataaatttctttgatacctctctcttctagaggttttctttccttccccttgagtatgggctggacttagtgacccgcttctaacagaaggtatggcaaaaatacctggcaaatatcactttaactttaaaagtgatcaaggttaacaccaccagttataagttatgttaatatcatatgcacccaataggatgcagtatgaaggcacatcatctcttgaattcatccattaaatccataatctcagcctattcatgaaaaaacagaaaacaaaaccaaactgaagaacattctacgacattcttcactcttgttgcctaggctggagtgcagtgatgtgatactcgggaggctggggcaggaggatcactgagccctagagacatgggttgcggtgagctgtgattgcaccaccacgctccagcttgggcaacagactgagaccctgtctcaagaataaataaataaataaataaatttattttttaaaagtgtcaagattttgaaaagactgaaaatctgtcacagttggaggagactgagaaaacgcaatgactaaatgcaatgtgggatcctggattggcttctggaacaaaacaaagtcgttagcggaaaaattgggcaaatccaaatcctgactgtaatttaattaacatttttaaattaacttactggtaatttaattaacaaatgttaatttcctagttttgataaatgtagcatggttatgtaagatgttaacattagaagaagctgggtgaagggtatcgaggaacactttgtactatctttgcaactcttctgtaaa

SEQ ID NO: 95994 - DNA, 139035 bp, Homo sapiens
tcacatctacacacatctacatctgcataataccacatgcatggctagatgtaacacatgcacatatcaatgtgtcacacatatttacacatatatgcacactcacatgtttactgtatttgaaatttttggttgcaagtaacaggaaacaaactcaaagacacctaaaccataaaaggaatccataatttcacaaaggttatttcattccctctttcctctatatgccaaggttgatcctctatgtttgtgaaatggctgctaaaaacttccgtattgaggtgtagcaggaagagtatgtctttctggatagcttctttggaaaagtgaggaagcttttttcttagaaatcttaacagaccttctctcattttttattgttggaattgggtttcaagcccatcactaatttaatccctgtaaccaatgagatgaaatatgaatatggccttaaatgaatccctggagctgacaagttattacgtggggcccagggtcagattttccagaaacatttaggctgcatagggtaaaaggcagatacccaatggaaaatcaaattctgttaccaaaaggtaggtcgtccaagtcctgggtggctcatgttagtaaatgttcctacccctggctcctgcacacgtacacacacacaacacggctgtcagaatttccacaaccaaagacgccctttgttactgaattactttctacacctcatgttttgacagattctgtctactaagaaactgagagcaatatggtaactaattcatttttgcattttcatgcctgagaagctggtattaccacaatgagtttatgtaattccagtcaatattaaagcaatacaattgatgtttaggtagcctgggagaccttataggaagtaaatgtacagtagtaattagaattattgaaatcttaaaaatagcagattacttgcaggagtcggcggcctttttgagaagcaattttgtaaaatttgccttctgaggtcaaaatttggctagacctttcttggtaaatgcaggaaatcatgatgaataatccattgcaccaaccactgcaagtagatgtaccctttgcacctgccccttcttcacgttcccttccacttcctttcttctccaatgacatagtatcactgaagaggctctcctctggaagaaaacactttgaagtcatttaactatgttaaaaaaaaaaaaaaaaagctcaaggaagcagtttgttttcagagagtgtatttatcagcaactctccactctcagtagtttagaaaaataaaagtttatttcttatttacactgtagtttaaagtggattgttcacaggctgttatgtggctctgctccatgctgtgatacagagaaccaggctccttccgtctgagaattcctagggtcttagagtcttccagtggagcctgtatatccagccagtggatgaaagaagaatgatgatacatggctgaaacatgaatgattatgcaggcagattgtagtgtcccagcctggcagtggtacacattacttctgcctacattccactggccaggacacatagtaatgtggtcacaaccatttgcaaagttgctgaaaaatgtagtcaaaaagtgtggcaagatggaaggggaaacaagggcggctagaacacacaggcatctttgctacagatagactaacgttcatttagaatctttttctcctacacaggtatgcaggagcattttgaatgccagagtttttgaatctcagcaattcaagttgggagggtcaagatcatgactaatagggctgaattcttactaaagaacagcttgttttacagttaacaaataaagttttgtgcaagattttttttttcctttttacctagaggtccctgaatttacagtttcttcatgatatggtttggctctgtgttcctacccaaatctcatgttgaattatgatcttcagtgttggaggaggggcctggtggaagttgattaaatcatgggggtggatttctgccttgctgttctcatgatagtgagtgagttctcatgagatctggttgtttaaaagtgtgtagtctcacgcctgtaatcccagcattttgagaggctgaggcgggcggatcatgagttcaagagttccagaccagcccgaccaacatggtgaaaccccgtctctactaaaaatacaaaaattagttgggtgtggtgatgcatgcctgtaatcccagctactcagacggttgaggcaggagaatcacttgaacctgggaggcggaggttgcagtgagccggcattgcgccactgcactccagcctgggtgacagagcgagactccgtctcaaggaaaaaaaaaagtgtgtagtcccccttcacttgcactctcctcctgtcacatgaagacatgcttacttccccttcatccttctgccatgactgaggcctcccagccctgcttcctgtatagcctgtggaactgtgagtcaatctaacgcctttccttcataaattacctagtctcaggtagttctttacagcagtgtgaggactgattaatatacttagcagtcccaggacttctagaaagagcacacctgtagacaaaactataatgcaagtaacttatgtttgcttggggagtagacagaggttggtgacactcgtgaataaaaaggtttgttgtgctgttctgaggcagtaccttcagaaggtggcaggacgtcagaggaactactgtggctgtgatgagcggcagttgaacatagaacctcagagcttcacccctggagaaggcttgagtccctagaatcagtggacttgaagagaccatagtagacctggagagtgggcatcttggcattaactggtacagaccaacactgggaggtaggggaatagaaacacaggtattacaaagaattttggttttcataagacccaaattttcttgtatggccctaaaatgaagcagagggggcccaaatacagtaatgacaaattaaattaccagccaatcttcctggatgggaccatgaagtcagactactttttgtatacagaaaaatctaaaatacaataattctttcttacctgagatgatggctgcaaattcatgccttagagccatttgggccctagtgcagggcagatgagtgaaatgagttctcagaaacgtgagaaagatacagaggggtgctgggttgcaatggaaggtcttaggggaggggtggaaagtgagttcaaggagggctacagttacgaaaatgtgttctgtggactcctagaggtcctcaagacccacttgggtgtacaccaggtcaaaactttttataatgatgctacgatatgatttgccttttccactcttgtctgtattcttctgtgagtgtacagtggagttttctagagacaacaaattgaataagacgcagataggaacattagctgtcttctattaaaccaggcatgcaaagagatttgtaaaaatcttaaacagtgacactcttctcactaaatatttttgtttgtttgtttggggttatatggttatttttcataaaataagtaacttctgttaacatgctcttcattgctgtttgaagtcaacgataaatgtttttttaaaatctcagttttaatttctaatacagcaaatatatttaatataaaatataacccacatgaaagaaaaaaagttctttaggaaccacaattatttttaagagtgtaaagagatcctgacaccaaaaagcttgagaatgttggattagaacaacaacccaatcaatgttgagagaaattaattctgccacttgtggactaataacttcagagtatgtgaagcactgagaagatagattgtttcttctggagaagtatctttagaagagcagtagtaattagccaggggcgactggtgtagacagccattagtgaaataactgaattttaataccactttatactgcaacttgcaaacctaaaaaaattgcaatactgccatctagcgttctatcgtgaaaacatttcgatatttattttttctctcaatttacaattgcttcagaactgaatgacaacataagccaaatttaatagtttgccatgcatttgttaggttatttcaccaaacatgtacctttaaatatcttcagtgtcttttccaatttctttctgtatataatctcttcttagagttaggataactggagaaggtaggatttcaacctacttataccttgtttcaaactttatgttcctgtcattacacaatgtagaatgatttaatggcaatgtagagaaaccgagtaagtaactttcctcacttcggttatacatacctcctctctttccatagtctttttttttttttttttttttttttgagatggagtctcattctgttgcccagggtggaatgcaatggtgcaatctcagctcactgaaacctctgcctcctgggttcaagcgattctcctgcctcagcctcccgagtagctgggattacaggcgcctgccaccatgcccggctaatttttgtatttttagtagatacagggtttcaccacattggccaggctggtctcgaacgcctggcctcaagtgatccgcccgccttggcctcccaatccatagtcatttttttttaaataaactttttattttggatcaattttagatttacacagaagcttcaaagatagtacagggagttcccatggcccctcatccagtttcccctactgttaacatgtacatttctgtggaaacccatacccactgggttcctggcacaatggacagaagttccacaccaatgaacatgactgaaatttcagaaacagaaacttgggggtcagagagggtgggctggggaaataaaaaagtttacatataaaagaacaggacttgtattctcatcaaacttgtcagtagccacaccagaagctagaaaatcaggaaccaatgccttcaaaattctgagtgaaaattattttcatcataaaatcctgtacaaaactgcatattaagagcaatgttagactaaagacaattccagagcaactacagagttttgaaatatttatgtcccatgccccctttatcagacagttatttgaggatgtgcttctctaaagcgggaaaagaaacagaaagaccaggggagaggtgaaggagcctctctgaatgatgtgaaggagatcgtgggtcaaagctctgtggtgtcctaaaaaataaacagtgcagaatggagcaggaagacagagttgtttgaacaactcagagatgtattcttctgtcagagtgtttggggatgaattagtaataggtgtaaagaagatgaaataaacataaagatcaggcagtggattaaccctagagaaaattaaaagttgcatggaagcatggtatgtatactatatggctcagctttgagccatacagactcatagaaatataaatattgaattcatttaaatgaaaaggtaattttatcatgttggccagatgggagaaggtggaagagaaggagggaggaggaacagagagagagagtgctagatcctctgccctatacccagaagtcaataattatctaaaattgaaaaaaataagcagcaacaccctattatttacacaatatgggattaaatatcagaagaaatggttaaaagtggttacctctacagagtacggatcaggaattgggatgaatgaactaagggaaaattctagtaggatgataatgactttttaaaacaatgttcatgttactttaaaaggcaaaacatcaggtaaatgggtgccctgccaaatcagggacttagcacccagggttatcaactctgttaagaatcagggagtgctgggggaagaaagtataaatgatggccttgtacaaagtatcttggattcttatcaaggctgtggcagtcaagtgtcctttgcccctgcttccttgttgtttgcataaatatttgtattctgaggcttcattctagggtgagagctcattttctgtttgcacaattgcctggctcctctggccaaagggtgctctgcttctggcagctgaagatcccagtagacagcttcttaaaccatggctttccctgcaggatttggatgggcggcagccactgcagcttatcaagtagaaggtaggggacactctctccccttcactggggtgggagtgctttatttctggtgtgtcctgtgtacctgaggaagatggtggggtaaggaggcaaaaagaaaagcaaagaattgaacagaccacaatgttatcaatgaatttgtttcccttttcaaacatgtcaggggtgggggctcacattctcttgtctctttaggcacaaggaagggtggagggatgaagaggtgaaaaccaagctgtggctggattttcagtcagtccaaactcagctgagacatcagtttacattggaccagctgcttttataattgatttttagaatccatttgccccaactcctctayaaaggagaatcatttttttytattggctggaagaatattgggtcgattttttcaaagagcccttcattaattgggaaaagttccctgttctattcttagtgagcgccaagccaagcctaatcttgtatgccaccatatttcctggggcagctgagaagtaaatagaagcaaatggtaaagagcacccagagtgcctgtggagcccaagttctgatcctcatcctaccacacacaagtgtgtgaattctttgtcctccttgagtctcagtttcttcatctgtgaaataggaagatgagctttacttttctaaaacacrtatgtccccccttcccctccacaaagggagttagagattgttaatagctaccatggagaaaatatttatttggtcaaataagtatatgaaaccctggattaaacaaagcaaagtgagttattgtggtagcttcctaggattgccataataaaatatcataaactgtggggcttaaacaacataaatttatcctcttacggttctagaagccagaattggccactggaggatgtaattagccaagttaagatgagatcatactggagtagggcagatatgcaatccaatatgaccggtgtcctaaaaagaaggaaatttggacactgagaaatttggaaatttgaaagaagaaaaattggacaaagagacaaggagaacaccgtgtgtgagagagagattggaatgttacagtaagctaaggagcaatagtcgccactaaaaattagaaagaggcaagagggattttacctagagacttgggggtccatgagcctgctgacaccttgattttggaactccagcctctagaactgtgagagaatacatttctgttgttcaaggctttcattttgtggcactttgttacagcacccctagaaaacttatacaccgagaaaaacaagtcaatcaatcaatgaaataatgactgctatggtaagtgctatggtgataataggatgttgtgggaaagggtcacgtgaaaaccagttcttcaggatgggtcatcaaggaggatctttgtgaactagcatcattccgtctaaacttaaggtatgaggaggagactgccatttgaatatggggagatctttctagacaaagaaacaggacaagttgatcctggtacaacccatgctgcctgtgattcctagcttcaattgctatttccccatcctctagaatgggaaggaggaatctttactacacagttgtgataactgccatgtagaagacatctcccactgggggattatgtatattattgcacatatatgatctgtgatacaaggctcttttaaaggaacgtctgacagtgtcctggttggctgagattccatgccacctttttcgctacatgggatcttctttcatcttcttccagataatttccactttgttgtagagggtgactgaataggctgaccctctgggaataaaaacaaaagcaatgatctttgttagtttccgtctcaaaagagaggtcggaaaaatccgagaaagcatggtagagcaccagaatggtgtaaatagaatcagattctagaagcaacatagcattggtgattattaagatgagctttgggggaagactctttagacttggattccatctctccttttactagatttgtgactttgtccaaatgactcatcttctctgtgcctcctcacctgtaagatggagattattatggtgtctcctgtgtagcacagctatgaggtttaaataagataatgtgtgttaagtacttggcatttagtgagtgctcgatgcatcatattcatatctgggaggatcacaaaaggattacaaagaatgattcactatggaactctacagttaacttggcataaatatgcagttatacaagacaatagagtgggtttcaactactaactttgagttcctgcccacttaggacctggaggtaacattaactggcccattctgagctcctctcttcacatgatctcaatactgttgcatctcttctgtctgcttggagccagtttgtcctatgctcttcggacttaggcttgcttctgccatattttgaggtctttatttgtggcctctaacctgctgttaactatctatagtttactaggtagggtacttgatccatcatgctctgccaagagccatcagcctgctatctttgtcaactcacagcataacttttgcatgcttgcttgctttccaccctaggagctcttcctgatccttttgtgctgtgtgtgaattttagctcaagcacttactagcagagtgactttgggcaaataatatatttaagcctcagttttcttatttgtgaaatttgaaacatagtcatactctctctgtagattggttmtagggactgaagaggtaagcatatgtaactgtggtataagagtgcccccatgtagtgctcaccaaatactaatattaatgccaatactattattatttttctttctcctggctgtattctcttgcactctgagagaaggagagttacactgtctactccatttagtgggaatggtcatttcttgtttggactgctagttagaatctattccctccttgctcatgcttgactacttcaccagcagttgccaggagagttactgtttaaccatttctcccaccatcgactggattacagtgcaggaagttcactcgtggctttatcaaatcagcatggcttggatttaaagccragaacagcctgtctctttttgattttgataatctttgcagttttgtgctgccctggccttggaaggtctgtagatgcattggaagtcaggagacactcagcagagctgaggactgagcctgaattgtatttgtaaaaaaatctaacacttttaaagatttgttataaaacattaccacgtatctctttctactgtctctctttccactgtatttcaaaatacagttgtctgtattggtatatttgttttcagatactctcttgaaatccctgaagaataactagcatactctccctcaccctcactgcgaaaatggagatattttgtctccatatagaaaatactgtcagggtctttgcaggtgggccccactgagaggggcagggactgggccttatcaccaggtctcctaacacattgactacttggttgcgtattttgccggaatcacggcctttcctttgtcctgtccttgttcagatcctttcttcctctcctctggctatttcactgtttatggtcttatagaagagtttaatgttattacataagagttgactgcatggtgccttgagccttttggaagaaagcacaatacgaatctaataaataaataataaataaatggtataagcaggaggaaaattatgtgttttaggtgagttgtaaagaaccatgtaaaacctaaaaaatgtatttgttagactaagaggcagggaagaaagtgcaaaaaatcatcgtacatacagaagtgagtctcccgcaatgtttttaagtagagaaaaattcccatgatttttaaccccttgtgaagctgactctgtcctctgtgtttggctggagggaacgtgaggtgcaaaaacatcaggtagctccgtggcattttgtttactttgatggtaggccacggaagagatatgaaaatgacattgaggacccaattctacagttcttatgagcttctaactcccggtgatttcagggaaggctcttaaggagcgaacatgctttgcaaaatcccacaaatcctaagcaaagtctaaactactctgttaatgcttcctagtgggatctgagtttgtggtttttaaggagccaaagttctcagttttaggaatgccattgtgaatccttgatattactctaatataacagttgattttaagtttgactttggttttatgtcggcagaaattggggattgcctcagactttggccatctctatttgccatacgttaaaggtggattcttgtagttaagacatttgtgtgtgtgtgtgtgtgtgtgcatgtgtgtgttcccttaaaaaattggaaaaagaacatggcagctgtattttttggttataagttgagtttatggtgtttctatataggctgttttttctttggtcctttttttaaaaaaactcaactgattcacacaaacctaagctggagacacacttcatctactcgttgtaaatgtcagcacaagccccatatttctctaagaccacttcctgattgctttcttcactcaacggattttaactgtgtgtcttggtctctattttctgccaaatcccatggattaaacatcgcagtctgagacttgatctcttggctgctcttggtactcttcaagaagaggaatatccagacagatatgctccttgtctggaccacctaagaaagacggaagggaagcagacttaaagcatggtcatttatttcttggtatgtaaggaaacagggagcagagaagtgggcatttacccatgaaatttatcatagcttaaaagttgacatgacagaaaccattcttatttctttcccccagtttcaaatttgaaattcacaaaaatatcaaatattgccctcctttttcattgtaccatgaaattaatgatgtaggcatcattggaagagtacaggcttagagagggatgatattcaaatattaatcaacaaatatactcgccatgctcaccaatcagatgccaactataaatagtaggcatagactagactgacatttggattgaccggtcagagtggacgtcagccatacacaactaccaaggccacatttagatgtattgattgaatttcaaccttgggcttaggagggggacacatctaaaatatattggactctgtttatagactactagacagtttaattatttaacttctctaagtctccaatttctcacttgcaaattcctaatgctgatctctctctctttttaaaaaatttcattggatgaatgttggagacctttttcttacattttgtgcttctttggatcttgattaatttcttcaactttttattccaaatgacgatactttaactgtgtttggactttagctgaattcattctatttttcaactcctctattgaatatttatttttggcactcatatttctaatttttaggaatgaattatttaattgcttctgtttcaggagacatattttattttctggatgttgtcacctctcaaatctctttaataatgctaattaaaaaaattaagttcctgatccagcaatctcacatstgggtatttaccccaaagatttgaaatcagtttgtaaaagagatgtctgtatttccatattcatttcagcactattcacaatatctatattggaatcaattttaagtgtccataaacaaatgaatggataaagagtatgtggaatatatacacaatggaaaactattcagccttaaaaaaaaggaaattctgtcctttgagacaatgtggatgagcctggaggacattatgctaagtgaaataagacaggcacagaaagaaaatactgcatgttctcacttacatgtagaatctaaaacaatcaaactcatagaagcagagaagagaatagtggttacatagctagcgggtgggggaatcttgggagataatgatcagagggtaaaaaacctcagtcagataggagaaaaaaaattttttttgagatctattgcatctcaaaaaattattaactatgtagttaataatatagtatgtttcaaatttgttaagaaaataaatttcaaatgatcccaccataaaaatgttaagtatttgaggtgatgaatatgttagccagcttgatttaatttttaaaattcgtattcatcaataataacatcacttcatactgtgttaatatacataattataaatgaccaatttacaatgaaaacttttaaaattaatttctcttttttgtgtgtatcaaagaattttggtccttatgtttcgggttacttgttttttgtcaaatgccatatgatgtttatgaatgaatggttatcttgattaataccagtaactgatataggcttcctttgaagttagatagttctatgaactgagtcagggttggctctataagaaaacagagttctatataagttggtgggatctattgacagtcagttgtctcacaaaagattatgcgtgtgagtggaaacagccaaaatttaraccttgataactgccatatagcaaggactttaaggaggagtgtgcttgattttaacttttgtgtttcctttctgcacgtcctttcaagttcatgtttttagctctagagtttgttctgctttttttctatggcctcagtacccatgataggagtcctccccagtcacacgtctcacttttatgaagcatttcttaggacttcaacatggggtaaaggcagaaccaatgaccctgtttatggagaagaaaaacccatcaaacaagctataagataatcctttaattaccataatgattgctctgaggcctggacttctgtctgaattggttggcccagaaaagtactttagtaaatgttttgttctattgggaccttttttgtttgtttgttttcagctcagttgtggattccttctcttatttactgttatttcaatggggttgtgagaagaaaaggaattaaatatgttcactgtattccccaccttgaattggaaatatttaaagactttaatataatattaacttatgtagaagtctttattaacatgcattaatatttgaaagtgcctcataaatcatgaggttctatgcaaagttaatgaatgaattgcccccttttaccattatcatcctccttgtcatcactaatatatccaacttctagaagttttctagtcctgtgctttttaatgaagaagatgagtgctatagactaaatgtgtgtgttcccctcaaattcataggttgaaacactaatccccatatgtgatggtatttggaggtgggggctttgggaggtgattaatcagtgatatggtttggttgtgtccccacccaaatcttaccttgaattggagatcccataattcccacatgttgtgtgagggacctgataggagataattgaatcatgggggcagtttyccccatactgttctcgtggtaatgagtaagtctcacaaggtctggtggtttgataaggggtttcccttttcacttggttctcattctctcttgcctgccaccatgtaagatgtgcctttcaccttttgccatgattgtgaggcttctgcagccatataaaactgagtccattaaacttccttttctttataaattaccgagtcttgggtatgtctttatcagcagcatgaaagcagactaatacagtcaggaaggcagagccctcacgaatgggaattctgcctcatattaaataaaagagatcccagccatgtgggaatgcagaaagaagtcagccatctatcaaccaggaaggcatcttcaccagaacttgactgtagtggcaccttgatcttagacttccagcctctagaactgtgaggaataaatttctttyctttttttcktttttttaaattttactttaacttctgggatacatgtgattaacgtgcaggttacatgtgccaggtatacatgtgccatggtggtttgctgcacctatcaacttgtcatctaggttttaagcccgcatgcattaggtatttgtcctaatgctctccttccccttcccccacaccttgtgacaggccccagtgtgtgatattcccctctctgaagacagcatggtgattcctcaaggatctagaaccagaaataccatttaacccagcaatctcattattgggtatatactcaaaggattataaatcattctactgtaaagacacatgcacatgtatgtttattgcagcactatttacaaaagcaaagacttggaaccaatccaaatgcccatgaatgatagactggataaagaaaatgtggcacatacacaccatggaatactatgcagccataaaaaaggatgagttcatgtccttttcagggacatggatgaagctggaaaccatcatcttcagcaaactaacagaggaacagaaaaccaaacaccacatgttctcactcataagttcgagttgaaccatttctgttctttataagccagtcagcctatggcattctgttataccagccagaatggactaagaaaatgagctaatgtggaattaatggaatttcagacagtataacaagagaaagcaaaatattcagatactgtgagaaaagtcatagtagggggaggtgactatgactgagaaagaaaacatgtctcatcatctgcttttgaggtcagctgatccaatccatttgcatttttcataatttattacctccctcaattcctgaacacagattctgcatctactaagttttcctgtacctcagctggcttcatgggcagtgctgaaaggtatctgctgccctccctatgtgtatatgtaagttatttattgataagtgtcggtctgcctgtttgtatattcttttttttttggaaaggtttatttatttatttattttgagatggagtcttactctgtcgcccaggctggagtgaagtggcacgatctaggctcaccacaacctctgcctcccaggttcaagcaattctcctgcctcagtctcctgagtagctgggattaaggcacttgccaccaggtctggctaatctttgtatttttagtagagacggggtttcaccatgttggccaggctggtcttgaactcctgacctcaaatgatctgcctgccttggcctcctaaagtgctgggattacaggcgtgagccaccgcgtctggctgtatattcttttgtatcagcaagattctgagtagagtgggtgctagtcacataagtttagaaatattttttgtattatgaaaggaatacaagataattttagaacatttaaaagatacaaataagccaaaaataaaataattagccagtagatatttaaaattttagaatatgtatattttcagtatttttctatgtatctgtagacatacatgtacctatacacttatttctctgataagagcattctgtaaatggttgtggttttcttaacacacttagaaatatcttgataagctataacacttctctgcatcctttctcctcttcctgttccctctctcccttatctgtgtttctacagtgcacaaggatgttacacagaaagctaaatgtgagccaatatatttaactttgagaaaccagataaaaataactgtatcttaattatttgtttggtgtaggggttctatctgttggaccacacagtcatacatgaatttttttgtcattactaaattagtcagttaagagaggacatttgtttacttgaataaatatgtgccagccttgtactggaggaaaaaaaggtgttggttgtgctgttccttcctcggcttgcccatctggtaggtgttgcttcctagctaaattcactggtgcacaaggttaaatgaatctttaaaaattattagaccgtcacacaagtgcccaaaccagaaataagctagactgttcctcttactccttcattttaccaattcctttttattctatctcctctaaacctcttgattatacccatcttcttcattgctactacctttccttctggaacttagcattycttatcttcttaaagtttccttctgtcctctccactctcctccaatttctcttgcatattacttctagcatggtcttttacaaatctgaccacattattccattttcagagagagaggatgagctctgaaatcaaacagactggatttaaaccctgactccacttatcaattgtatgatcttggaagatatctaagctttgcaggcctcagtttccttatttgcaaaatgagaacggtgatagtgcttatcttgggatcattgtaaatataaatgtgttcataagtaacaaatgcatagaacaatgctgtgcaaatcttaactgttcagtaaatgtcaacaattgttaaaraacttgaaatgtcttctgaccttctgcaggataatttctgaactttttgaatagcagaagaaaaccctgcaattttctctctgactgcaactccagtttcacctcttgcttcttctctatttgtatcctactctttgaccaaaataaagcacatggaatttgctaaatgtgccatgaccttcatgcctctgtacctttgcacatgctgttccctttgcttgaatatacatgactattggcatcaacagagatcaaaagatgacaaagatccagcctttctcacttccaggctggagcttgagctactccagcacactgcctctttcatcttttatgctactctcccaagtgtgttactgtgaacttggcagtggtagtaaagggctcgatgactgatgggggtgaagagaacccctaaaagaggtttttagtatatacgaacaaacattatattaacaatttggaacagcatggataatatgcctttttacctgggggcgtttgaacataactccatgtatctaaagaggactaacatcatgagaggtgttgatatgactgttgcagctgtgtgtttgtattttgcatgtcgtgggtggtgccgtcagcagcagctggggccctgctgttttccttctgttctactatgtggccctcttccttggggcaccctcaaccagacgagcagatctatattggctttggatctttctcaaggtgcctgctcttcctttcattagcgtggataatcagaatttgattgtaaagtatgcccaggccaaatacaagggcttttaaaatcgtctgctgttttagattatccaggccactgatcccccttccttagcgtggataattgagagtggactgggctgaagaatgttaagcagaaccaattgacaaaataaatgagattttaaaaatcctttagattttaataatagaaaaaagttttttttaaatctgaaagagcttattttatatttcaaaactgtaaatttattyggctttaaattacttcaaaataggaaaatatttcatatgatgcacccatttaaaacctatttaaaatgtatactaattacaatatgcacttaatggagttaaaggaagaatggaacatacagacaagaggttggaagtttctgattcaatgtgaaatcttcttataatcatgtttatatttcatcaaggtaacaaagagagggtaggagccacttccaaactctgaaaatctctctcttgatagtggaggctgcaattctttgctcctagtgaacaataatcatttagagacaggcatttaaaaatgtatgtataagatgaacagaattctgatttctgggaatatatgatcaaattcacctgtcattatttcatctttccccatgccccatgcccctccaaatgcaggtagaaatgtatttgcatgccatttgactgggaactgagaggacattttcccaatggaacaatgctgtaaacgggggtaggtgtcaataaatacccttcaggtgtgtaatgaggataaatagatttgggggtttgcctgggaatttgaaacataatgtaaaaggcaatggtgagtttctgggcaggtgactcataaacaagttttttgaaacattacccatttttacgttgggaattgccaagctcagccttaacgtctcccacaacacctatgaataatcatttaaatacaggctttgagacttggggaaaaaagcrtattatttactctaaagacaataatcttccttggagtcattgtagtccatcatgcagatgcatacttggggatctttggaaaagcaacattttctcttgatggtccattacttcatttatcttttaagttattatccaggactagattgcagacacaggttagggctgcacatcagccactctgtaacagtgtgggagactaaggttctttcacagggagaaatatgacaaagcggctttgctcgttccctattgcgtttgtgtgaagagcaggatacagtaatggaggtaatggggactctagtgcatcttttggttccttatagtgctgagaacttggcaaatgtaggcacacataaattcttgttcccgagtggtttgatgaagggagaactgagaggttctcagcacagatattatacagctgagaccaaatatccccctagggtcatcctactactctttccatggctgaaataaagaccagataccaccatactaaagctgtgatgtggttggcttgttgctggatgacttttctcatgcttggagaaaattacgtaagaagattgagaaaagttctatcccaaagatccgcatctgcaaagacgagcaagattgcaatgtctggattaagttctctagaatttaaagttctgtctcatgttgtatttggagacctggcttccctagcatgaagtgaataattaaattacattttattttttatgtagctagtagttaatcccaattagaaatttatctactgtggttactagagcctgggagtataaaggtgaacaaaatgatcacttgaatctgacattctggatggggagagaggcaggtacatgactacagtaggatgtgacagccccaacaatagaacagacaaaagggtattttgcggcagaggtgggcaggatggggaaataagaayaaagtgtgtgaggccggatgtggtggctcatgcctataatcccagcactttgggaggctgaggcaggcagatcacgaggtcaggagttcaagaccagtctgtctaacatagtgaaaccccagaaaaaaattagccagatatggtggtgtgctcctgtaatcccagctacttgggaggctgagacaggagaatctagtaaacccgaagggcagaggttgcagcaaaccaagatcatgccattgcactctagcttccagcctggtcaacagagagagactctatctcwaaataataataataataataataataataataataataaagtgtgtgagattacttgtggtatctaaattgggttttatgaagacatgttttctgttttgttttgtttccaggaaaagacacaagaaagggcatattagcagaaaaaatattttgacatgagacataaaagtataaatacttctgttgtatttttggaatggtgtagtcatgtacagttaagtaggcacatgagttagaattctaatactttaggatgtattcgaatcacttggagttctaattaaaatgtagattgggggcctcatatgaaactataataacagtattcacagatgagggccaggaatttatattttttgtaagtgcctatatgattgttttgtagattgctcatgctttgataaagcctgccataggctgtgttttctgatgacggggttaatggcagaacctgaagccttatgtygtgatgcacgtaaactgctaggctaaggaattagtattagcatcatgtgcattagctatttgacagccataaaatatacttagtcaaagggtgtaatacagtcaggtctgtatatttgaaagagttttgatggcagtgtggagaataaaccgaaagaaggagatacggagctggggaaaagttgtcgggttattgccatagatgaggcagatgatgatgaagacctgaatttgggtgtcaggaacagaatggagaaaaaaagagtaaaaaaacattgagggaaaaccaaaaggatatgttcatraatgcaatttagggcataaaggaaataggaggaagactaaggtgacttttgtgattatggtttaggtaactggctggctgaggatgccatgaagagaagtaaaacactagagaaggagcagacttggaggttgtgtggtagaaatttaacagcttcaatttcatttgagattccttagggtatttatagaaaattgtctgggaggcaactgaaaatttctgtctccatttcaggttggattttctgttagaaaaccacagctgatggtgaaagtcataatgaaagagaatgcttgaaagagggtgatagagggaaacaagaagagaagcaaagatgagcaaggttgcaatgtttggattaagttctgtagaagaattgaaaagtctcaggggaaacccacacagaactgacattcttacagaaccttagaatgactgagaaataactttagaacatttctagtctggtggtttttaaatgtgttttgacgtggcaaagccaggttttcaagcaaatctaacaaggtcttyttgatcattgccgatggaacccttctttatgctgacaatctattgtcagatatgcaggattaaccatatgtagctacttttatcagtgtttagcatgaaaatttcagaaaactgcattcagggagccatgttgatacaccagaagaaatctgccaggactaaagaccgwcccaataattcccgaggtaccttcaggaaagtcartttatttttgagtcaaaggaatctcaaattatcctaaatggcattgcttccaccagagttctgttcttaatttaataagctgctacaagttccaagccaatgttccttcttagaaatatgctatgctatgggatgtaaatctttttaagtgcatttcattgtaccaattttttcattttgaaaaagcccattggtttattattaagtggtctatttaatagtgccaataaattctaaaactggagactaggcattgttattttagatgctttaatgatatcaattgtctaagttgcttggtcttggcttatttgcttgacctttgtctgttttaatgatctggaaaaattcctccaaactatacagagttgatatagtggctcttgatatatgatacaaatctgaaaatactttattagaataagtttactaatagtattcgaatgattgtattaggtctatacaatcaaagtgaagttgataactgcaaattttagaagaaccaaaagcttcaagtaaaaattcaatttctgggaggtggggtgggataagggttaaaaaattacctattgggtgcaatcttcaatatttggttgatgggtacactagaagctcaactcccaccattatgtatgcaatacccatgtaacaaagaagcaaatattttccccaagtctaaggaaaaaaatcgacaaaacccaaaataagatcacagttcaatttcttgtaaaataggttttacttattacttctgtgttttgagttaactgtaattatagaataactatccagaaaaacaactggacgattatactgcaaaatactaatacagagaggtaatataaactggtggtttttagtaccagtgattctacactctattgaagaccaaaatttcaaataagaaaaccaaaattccaaatttgacttcttatattcaaaagtaatgtggtcttgttcttgtttagtatctttaaggcttacttttctcaggttagtaacacctattggcagtttattggagtttattggcagcataaaataatttaggcagtctcttaacacagggcttggcttttaaaacaggacttcaataaatgctaacctttaccatcataatttttatcaccactattaccaccaccgttatcatcatcatcatcatcatcatcatcatccttctcatcgtcttcatcattgttgccatcaggtggcatgttagtttggatcctctgagaaacagataccaagatgatattgaacgtgcaagaaatttattcagggaaatgaacatcagggaaaatggggagggagccaggaaaggctatcatgcatgtctgacaagcaaaggagagagtaaaggaagaaagggagttgrggtgaaccatttagactacagtgcaattcaaagggaagttcatcaggatctttggagagtccttgatccaaagtcacctgtyagaagagtcgcacatcctccasgaacaggcctactttcttagctttgccacactcagcattgactgagatcagcctggggaactgtggtgtcagtagaaatgctgtgacatgtttcagtgctcagtggctgaaggctcagtcagttatgctccctgagcttggaggtaggttttgtagtgtgtttctrtaggtgtcacagacaaaattgtgggtgattaaaaaatatcccattttttggtattttattaattatctatatgtaacctgcatttaatatttgagggaagaagtaaaataaataattaaaaatatttccttttgcttgggtagcattaactctttgaaacttgcccaaatctcacagtaactgtttagctttttaatttgcatgaatattctggtacagctctgctattacgtcaacagcaccttgccacgacaagttttattttcttgttccaactttttctatttagaaacctgatttgattagagtgtgaaagtttaagtgtttgaaacaggattcaattaaactaggtcattcttggggctctgaaaatggtaactggccttaggcaaatgagaacaaaagttataaaactcagttggatgcatcacaacatttagcatctttaaggaagacgtcttgcctaatagattcaatttagaaatatttagtgtaggtcatcagcttaagcacctaaaaaatgtgtttgtttgtttgtttctccctttagttataactagaatcggaacacctggactctaatctacaaaataaacaatttgtgctgggaccttgaagaaagtcaattagtttccgtgactttaccagtaggttaaaaaggagattgtaatattagtgaataatgtgcttagagatgtttgcataaaagatgctttgtcattgtaaagtattattgaatatttatggtctaccagactgagccaaatggcccagaggaaaaaacagttagatttatgtaaaccttgttcagtgtcccagatacttcaggatgggtgctctatatgtgaataaataaataaatggtataaatattattttaaaatttgaaggtacatcaatattatctggggtgttagccaatgtgcctgacctatgacattgaaatgaaatgtctgcctccaggtaactatttcaacctcataaatatttttaaagccagaggctttgatggcaagtaatgttttcttagagttttgtgtctgcaaataaaggtaaattatatctttacctaaaatctacaagaaatgattgtctctcatccaaaaggttgctcagagagttcccagattgaaattgtatatgttatacttctttccctttcttctaaaaaagtattttacttactcttgcacggtagttttctgtcacattattgtgagagatcagagcctcaaagaagaaaaaagttagccataaacactgcccaaggacttaatggatcttactgagccacaccatgcagatgtattggaacataaataggtataggakataagaggcacaaaagcaatttgtttggattgggtcactgcttaatccagatgggttcagcaaaagaattcatgaaacgtgacagtgggccaagaagaacttgctgtgacatttcagattcccctacttcttctaattaaccatttcaagtataacaaaacttatagcacatacaaatctagtgcaacccatctgtaccaagcgcagacctgtccgtggaggatggatggttctgttctcaagcaatggactatgacacaataatatctcaagttgggcttttaatttctatgatacattgattctgaacagcatttttctaaaagacaaaaactataccagagttgctttttgacatagcctgtcattaaatgcatttggatatattgcatggatcaaaatatactgcaagtttaataagatatttgaaaatataaaaattgcacgtagaaaaagcccaccatcatggtaatgatgagaataataacaacaatagctaccttttaaaaaaagcaactattacttgccagtcactatgccggacgttgtacacatgtccttacaaaaactttgcgaggtggagataattattctctttttatagaggaggacacagactcaaagaagtaaagttgtccagggtgaattagtatgtggaagatgtaaaattttttttggaattacagaaaaaactccacaaacccacattcctgcttaggcaagtcaagaattcttgcctctttagttgatgggtttagaataattttttcaggtgctaatatcaggatataacccatatctcttcatacacagttcttcaaatctacctgttcgcagcccttctttcttctcttgagaaatagaaamtaggatttaaacctcagaattatgcctcagtatctacagcactgtagtgcctcataaatattagttgaaatggtaaaagaaagatacaattgcccctaatgcctatgatattcattagtcaaaagaggatggaattagcccatttccatgaatgtaaaatttatatatgtattctagaaaacatatatcaaaatggagttattttaaataagatgttcatatttaactgacaaacagaatcaatctaccgtgcctagttcatagaatagattcggggagtcaatttttgtgcttaattgtttgwacaaagaaaatctttgacttatgaatgataagaaaataatgaaaattgagttagtgcttataaaattctcgaattcttttgcttttgcaatcaagccaggcagatttytaggagttgaggtttcttagggtattttatgtttcacatgacstcaccaagaagttacggatcaatagaactttgtaatgttcatgtagcagagggatgaaagagttaaaggatttaggtgttgcaaagggtgcttcttctgggcaacagaggtttgaatgtagggcaccttttgcattttcagcattaatgtttgaactcttgtcctacagttatgtaataagacaactttatttttttttaaaagagaaacagaaaaaaacgtctgctgagaaaaatacttgccgcccttggggacagattttgcagtacatttttgtacaggagtcattctctcctgtccaaaagctctggaacaggatgaatgtccttctcaaggttcttagagcccagagtcatgactgactacacgcatcagaagaaacacagagatgtatgggcaagattcagtgggcacacccacaggtctgagagatcactgggctggcgaggcattgcagccaggccgccagctagtctagaaaaagaaaccaggactgcagtcgtcggtagactagctagataagggtcggttccctcaaggactagttactctgaggtctgttctaaggggaggcagcccatgagcaaatatagcctagtatagtaggtataaaaactgttaattaacaataacatttatgtactgccccccagcaagtcagttttaaattcaacaaattttctcagtaactttgggaaacaggaagaccaggtgttatcctcattctcattttacatatgaggaaactgaggcacagggaggttgagtgaatttcctaaggtcacagatatagtaagctacagaggtgaattaatgtatggaaaatactgattgaaaggctggagagcacagactttgttcagtcacatctgacttacaattttagttctgccgactgctagatctatgaccttctctaaatccytgaactcaaggaaacttcagattcctcgtatttaaatggaagggagggaacatgagtagttatgaagcatgtaaagtgcttagcacagtgcttaccccattataagggctcaataaatgatagctactattactatcatgatgtttttttccactataccattccatccttccaaatggagctcagtttagcacagtgacagtcagaagctgaaaccaacttagagtgatcagaagctgaaaccaacatagatggatggatttgcctatccatatccagtctctatgttgcagcttagaccagcacccaaaacactaattgttatcttggtgctgtagttgacattctattttgtcatctgttacatgtatgttgtactagttatatctacgtttctagtttacatatttagtattccttagcaatgctctgatggatggaaagaagagtcgaggttttgttgcaaagacagagcaaagtgtctttcactagatagcgtgattcaatgcataaatgactgaatgcaaggaggcttaattgaaagataaaagaataattgctgtagaatagcagaggcaaaagcagctatgrtaaaaagtcgcctgycttaaacagagtgaaaataaatgaagagggggtttgagaagtctttgtagcaaaagatcataagaaaataaacaccagtgcaaggcaggagtccagaagaacaagtcccagaaccaagactgatatattcctgtcagaatttatcacttctctaaattaccaggtcagtagttaaattataatcacattctgttatrtattatactggttcagtcaacaaatgagacttttaggaaatccttataaaaggaactttgtttctgtttcccaatgtccctttacacttgcttggtggagataactcttcccttccatttagaagaaaacgtaggtaggttctatttctctggtcaccttaaattttattgtgtactggatattttctatttgcctatccatatccagtctctacttttccttgctctgggccaacccatgtgggttggcatcaatggactccattgtcctttatcttccatttggacttgatcaatgggaaacattagcaagagatgggaaggtaagtgggaggagagaaaccgaagtctttaccctgctggtttccttcctgctggactgcagtgggttggctgtgtccctcgactaatgcctcctctcgtgctaggcagcctttggcaaactgctactctctgcaggttttgtaaaccaattctaccccagccccttcatgggcagcaatgacttcctgctgttgcaagccctgaggtactgcactattccttgttgctttccttgaaccctgctcacaccatcgtaaacagtctttttttaaagctttcctcaataacccagtctgagtgctgtctgtttcctgctaggaccctggctgatgcatatggacactttaaattgcaaaataccgtctaattttgatgcttagaataatctgactatgaagtagttaaaattccaaattgaatttagaattaagtctttcttagctctattggaagagggagcaaggccgtggttctttctctgcctcctcttatttctgcctgtttaccatggtttctgacctagttgccggagaggtaataaaatggaaagttcttaaggtggcatcacatgctctgatttcggtagatatttagagttgattctttttcttacagacatttgtgtggcccactgctgagaagtactctagtatcttagatgcaggtgatgctgtgttcttcagttcatcactttctctgtcctgtgggcatctagccatttaccctagcttccatttgttgaggtctgcagtggtctgagcagccacccccacaagatatgtctgagtcttaacccttgctctccgtgaaagtgaccttctttggaaataggatttttgcagatataattaagataaagatctcgagatgaaattaccctggatttagaaggagccctaaattcaataagtgtcccttatgagagacagaaaaaaagaagacacagagacacaagggggaaggacatcagaagacaacagcagagactggagtgatgcatcaagcagccaagaaatgccaagaattgcagcagcaaatggaaaagaggcatgggataagtgcttacttcagtgactgcagaaggatccaactccgccaacatcctgatttcagacttctgggctctacaactatgaaagaatacatttgaattgtccgtagtcatcaagtgtgtagtgatttgttacagcagcagtaagacatgaatacaaactctgtttgcctttgtaggcctccttggagagatgctaaggcatcactgtgcttactccttcacctgtgccgtgtcttgtccaggggaaacataagcacatccttttctcagtctctagggctgcaggaagatcccaacccagcttcagttttcctttgcttcttctttctttcatcatctttgtttctttcctcttgttctcttcctgggttcttgattcattcagtagaagtkaagactccaattcatcatattcctttaactgaagggactcataccatgacctgtgagtagttcatttgagtgctgaattagtcttccagggctgctctagcgagataccacagattgggaagcttaagcaaccgaaatttattttcttacagttctggaggctggaagtccaagatcaacgtgctagcaggcttgttttctcaggaggcctgtctccgtgactggcagacgtccaccttcttgctgtcctcacatggcctttgtcctatgcctgcatccctgctgtctcttcctcttcttacaagtacaccactcatattggattagggccgcatcctagtggcctccttttaacttagttccctctccaaaagccctatctccaaatatagtcatattctaaggtattgtgggttagaaattcaacatatgaattttgaaggaacactattcatagcaagtgtccacctttaggttgaagtgaaaggaaagtaatcatcctccctttttctttgaggcatgaaacgcacattacacggagagttctgttcaaggaaaatacctcttgaaaatcctcattaatctccaccgctgatgtgggtgagagagtcaggtgttgtgacccctgtttgggaaaatgcatttgtgtttgcagcttagaccagcacccaaaacactaattgttatcttggtgctgtagttgacattctgtcatctgttacatgtatgttgtactagttatatctatgattctagtttacgtatttagtatttcttagtattattcatcttagagttgttttgatttatctcaactcagttttctaaatctcatttcagagtctcacttaaatactgttaagtacttaagtgaataaatggaggaaagagagagagaaaggaagagagaaagaggaagagagagagaaagagaaagagaggaagagagagagtaaagtcattcagccatctagtctatatttcttttaatgtcaggaaaccagttatttagataatgcattaaattaataaatatttatttcagtttggtctgttttagtgatcctttttaaaaacaaacaggttatagctatgtctacagagggaatatgattgtgtgtgtgtgtgtgtgtgtgtgtttgtgtgtgtgtgtgtgtgtgtgtgttagttagggagggtggtgggagggaatgtcctggtaggaagaacagggaaaggccaatcttaaatgaatagttgtccaycaagtcaatactttcaaaatatttaagacgagtttggacacttatatctcatgaagtaactatgtaagttgtctaatttcacacagtcacccagtcacccatactttgaagaaataattaaacttactgacaaaactgaattccaactccttccatatgttaagttccacagtgagataaaagcaagtatgactaagcttgagtcttttatcctgggaatgtaatttatttctcaagtcctagagatactggtcttagaaggactggggagctttatttcttaacagagaaatctttaatcatgtcatttgtctaggaccattcctggtgtaaagattcttgaaatgctgagttgattttagggtttcactgtgtctttgtgaatgagacgaccgaacaggcacaatatgcctaaccaaactcttatctattttctaaggtagaaatttctgaaaatctggacagtgaactctccaattgggaaaagtccattttaaagcatttagctgcattaaagatgtttattttcttaaaataacattagtaacacatttttccttaaaattattttgcttttatttcctgcttaatctaagatttacttmagagttttttaaaattccaagcacatagattggagaagatggtacgtagacttatttttttattgttaatctttcttcctcttttctcctttcctctcgctctcttctctccttcctacttttcttttgtttttccttcctgctcttctttttttccctctcttctgattggttgtcagataatgtagcctgtatgaattatatatgagtgaaagtaattttattgttattgttgagtatgaatttctgtctctctcattctttcatatgtatatgtgtatcatttgtatgtgtgtatacgcatacatacacatataaatatacaaagacatatatacacatgtgtgtaccatacaattttacaataattttattgttgttgagtatggatttctgtctctcttattcttccatgtgtgtatgtcatttgtatatgtgtatatgcatacatcacataaaaatatacatagacatatatacacatatgtgtagcctgtatgaattgtatatgggtgtttgaaaataattttattgttgagtatgaatttctgtctcattctttcatacgtgtgggtatatcatttgtatacacatgcatacacatataaatatacatagacatatatacacatacgtgtgtaccatggagaataactttacaaactattttaatcaaattatctttttctttgtcagtttctgagagaaactctctcattgtgttagtgcagttttcaacatattcctgcatctagggaggtttttatctgtagatttcaaaactcgattgttagatgcataaaagttattctatatagttttagtacactgtaacttttaatgtgaaaatattactactcattcaatttaatgctttctaattgtattaatttaaaatattaatattgctaattgtactttttaaaaatatttgcacggtaaatacttttttctcttaacccttacctttgttcaaacaggaatatttaatgaattggtaatttttgtgcttaccaatatgtttcaacttcttttggccgtattattatggtatattttctgtgtttttttttggtttttatttttatttttatttttttaattttttttgtttattattattatactttaagttttagggtacatgtgcacaatgtggaggttagttacatatgtatacatgtgccatgctggtgcgctgcacccactaactcgtcatctagcattaggtatatctcccaatgctatccctcccccctcccccctccccccaccccacaacagtccccagagtgtgatgttccccttcctgtgtccatgtgttctcattgttcaattcccacctatgagtgagaatatgcggtgcttggttttttgttcttgggatagtttactgagaatgatgatttccaatttcatccatgtccctacaaaggacacgaagtcatcattttttatggctgcatagtattccatggtgtatatgtgccacattttcttaatccagtctatcattgttggacatttgggttggttccaagtctttgctattgtgaataatgccgcaataaacatacgtgtgcatatgtctttattatggtatattttctaatgctatagtttccttttgtattttcttctcttctagcttttcccccgtcattatgttttgctttactctttttcccatctagtgcagtgtttcctaggagaggtgctgttgacgttcaacatggccgtttcttgtttgtgttggctgctctccactttattattggctgtgccactaaatatcagtagcatcccagtcactgggacaaccaaacaacacttgttcctttccacatgcctccaagggatgtcataccactctgaactgcaaataggtgctcactactttgggatctaaaagtctgagttctcttctcttgtggttatctttatttttctaactgaatgtttagttttgtctctgtaatatatgtgtatggtttaaaaattgaaatagaacattgagagtcataccacccaatagcaaagaatcatcatcttttttatcactctacttcttatgttcttgaatgccaacacttttaattgtatttacttctatgtaaatacatgcatatatagttatttgatttttctagttgaaaacatgacattgacttcctattatatacgatgaattttttctttttctagtctgaatacaacattatacaaagtaaactttctcttctccatttttctaatttggttatttaacaaattttgtttaaattgtgactcagttcttacatcatttttaatgtaaatattgtgcgcaactgagccactaatgtcctaagactaattttttttcagtagagtttttgtttggtctgagttaataattgtctttgtttttgttgttgtcttttatttgatccttttcttaattttttgcccactgtctgccagaaatgtaaattccgtcttgatttactcaaacacatcagaaactttgtttctttttcttttcttggagggatccttctggaaacttccatcctcctgtgacttaataataaaatgtgcttccatgtggtgtggtggtttcccttgtgactttggaggctcttgtcctgtcaggattagtttagggcacagagtgctgcttgcagatcaaggcatctttgcttaccacagcctcaaagctttccataccrtacttatgtgtaatactcttaatgaatgttagttgtaaaaataaacaaaattttcttctgaaagaacaccaaatcacaacttatacgggcattgacttgaacttttagtcacattttacctttcaaataaagaattttcaattacttacgagcacgacaaagataacttctgcacgtgtctgtgaagcaatgagacagtaaacagcagtattcgtattttatgtgaarcacaccccacaaaaagcattttactgagcgtgcactattttgatacatgattcttactactggagggacacasacaggtcagtaaaacatggaccctgctttgacagagctcaaactaaaggaggccaaagaaaaatgtttttaaaatgactcagccaggcgtggtggctgacgcctgtaatctcagcactttgggaggccgaggcaggtggatcacgaggtcaggagtttgagaccagcctgaccaacatggtgaaaccccatctctactaaaaatacaaaaattacctgggtgtggtggtgtgtgcctgtaatcccagctactcaggaggctgaggcagcagcatcgcttgaaccccggaggcagacgttgcagtgagctgagaacatgccactgcactccagcctgggtgacagagcaagactccatctccaaaaaaaaaaaaaaaaaaaagactctagcactatgcgttatttgcagggtgggtgttcagaggaggatgtgataatggtggggagtcagaaatgctgccaaaaggaggcaatgtggtgatgtcagttttgggtttggaaggaagaataaacagacagatagacagatacatgtaccccatcccccttagttatttatttcttacttgacatgatttcctttgtgcaggggtctattaggtctgtgacctcgcaaaggcattgttatggcaattgttaaagtgataggataccatttgtaatggtgttttctatatcaggaagctgagggccctacagaccaagttatacaagccaagacattgattcttaaccacaggcaagtatgcaaatattaacagtattttctacatgtgcattctggcatcaatagggaggccacagagagaagaaaaaaacaaacaacaactggtcatttgcattcagcctaagggaggagaaaagaactaatacattttgagcacatattattaaatatctgccatgcacactactaagcatttttgctttgactactagaaccctatgaagtagatagtatcttcctattttacacacagagaggtcatgtaaatagtaaggggtagagacaagacataaactcatttatgcctgcctccagagcctatgctcttttcataatcctttgcaacctgggaagtctttgatatttgataaaatatcagtattttacttttttgtggaaatcccttctatgttctaataggataatttcaaacacaattttattttcttccaaattactaaaaataaaacacaggatcttgtcatttcttgccgaacatattgcaatatagctaactggtctggtttgggtctctatgccttctttctccaatcaccccagcacagccattgaagtatgcacttgctttccctcgatgagaactcttactcatctttgaacaccctggcttaaaatgttttctcttgggcaagtatacctgactcccaacaacagaattaattattgaatgcctgttcattaattttcccacagtttttttttaaaacaggttttaatacaactcttaatgtagtctaagaatttctttgtataatatctactagattgtgagacccttaatgagacctcacctaagttgtaagtattagtaatggtctccaaggaggttaatctattggtgttgataagggaggactctaagggtatcacattttgctgttcggttatcagctatgtgatcatgggaaatcaactcaatatttacatgccttggtttccctttgtacttatttggaataatcacagtgcatttttgaagggttagagtgagggaaacaatgggatggttgaagtaagctgttggtgtagtgttgacagaaaactagtgctcaataaatggcctttactatgaacaatgaaattataaaattgattttgttagatacacaatagataatatttataatatctgtatatagtattaaaaatgatatttacctactcccacatttccagaacctccttcaatattgtctgtctagccctctgcccagtggtatccaggaaagtgaattttgcatttatcaatttttttgcttatatggtcttgctacatgagaatgtatagtgtgataatttattatttaattttacatgctttgggacactatataaatggcaatgtattatgtgtattttttgcaacttgctttttctctctcattatatttgggacatttatgcacattgatctgagaagtagttcagtcttactcctgtacagtctttcattatagaaatatgctatagtttattgatttattgtcccaacaaaggaaatttgggttgttttcaatggttttctttttttttcttcttcttcttttttttcactgactgttgcattcatggatatatatgtctcctggtccattgtagaaacagggtatacaatggtatgtgaattactcggttttggtgtatgtgcttctttaattttagtagatgtttccatactgttctcccaccagcactgtatacacatttctgctgagcaacaacctctcctacactggatactgcccgacttttaaatgtgtgccaattgtgtaggtgtagaatggtgtctcattgtggctttcatttgcattttccaaatttttaacactctcttacctttttaaagaaatgtttactagccatgtgttttcccttctgtgaagaaattcttcacatctttcatcaatttttctgtagtctcgttggcctttttaacggaaatattcaaatataattgcggatttcttgcagttctgtaagtttttgctgcgtgtatgttgaaactctgttatttcatggataaacatttaggattattagggcactactcctatgtgagttctgagtactgtcacctctaatccttcgggtgatttttcaatcaaactcagatggtttcttcacgcatgtgcctggataagtattctgcatgctcaagtgcgaccttctatggtttttgttctctctttggaactctttccctctttggtgctctgccctgagaattctagacatcttggtctccctgggtcctcagctttgtctcctcagcttaagaagtctgccagactgtgggtttgtcctctctgtgctgtgtcctggaaacttcacaaggtaacacgatggagcagttgtagggctcatttgttccctggctgtggatgatccctgttctttgttgtctgaggccaaatgtcttcaatttcactgtgtcctatattttgtttggttttcarttgttttaggtgagagagtaaatctagaccctgttactacatcttggcagggagaagacattcaggtcttttgtattcatttttaggagttctttatgtgttccagataaaagttcattattagtcatgtatgtagcatatatatcctcttactttgtgccttgcattttaatttccttaatgatttctttttgtaaatactatttcttaatgcagttgaatttctgagttctccccctttaggtctaagctctttgagtcttttaaagatcttattctctaacctgaggttacaaaaatattctgtgttgtcttctaaacattttagagttttcctatttaatccacctgtttattgtgtatatgtgtagtgagtaggcatccattttcacgaaaaaatatataaatcaattttcccagcattatttactgaaaagtccctctttactgactagaatgccatctcttttgtatattgaattttttatattgaatatgcatggtattattctggggtctctattaagtccattgatctatttatgtgggcctatgccagtgccacgctaagctacttattataaatttgttctaaatcttagtatattttaagataagtttcatacaatatttttttgagagattttaaatactcttggcccatttatatttcatacagattttaaaatcaacttactaaattcctttaaaaaactgttaggacgggttggaattgcatagcatttatagatcactattaagagattcagaatctggatgacattgaatctttgtattcataaacatgatattccataaacaaatatttagatattcttgaaagaaaattttacttcctttcttatctttcaataaaattttataattttctagacaacatgcttacactttattatatatacatttaggtatttttgctgctatttatataaatgttatattttataactgttactttgtatagaatgcattgtcctttattaattttgtatcaagcaagtttactgagctaaactctataaattttattctattttaatttattttattttaagttctggggtacatgtgcaggatgtgcaggtttgttacataggtaaacacatgccatggtgttttgctgcacctatcaatccatcacctaggtgttaagccccacatgcattagctatttttcctgatgctctccctcccccccatatcccctgccccagttaggtccctgagtgtgtgttgtttccctccctgtgtctatatgttcacactgttctgctcccacttacaagtgagaacatgtggcgttggttttctgttcctgtgttagtttgctgaggataatggcttccagctccatccatgtctctgtaaaggacatgatctctttcctttttgtggctgcatagtattccatgttgtatatgtaccatattttcttgatccagtctgtcattgatgtaaacccttattcttataattcatccttacatttttttggaggttttacataggtaatcttacagttaacaaatgattgttttgttttgttttgttttttcctctctggggcttatattatttagttagttttatttcagtgtacctctaattaacaaaccttatgtaatgttgaatagaattgattatagcagacatccttgactttttcttgatcttaaaaagaatgttttttagcatgtaggttttttgtaactattagttactacaatagggagattgccttttatttccaatttactaacacttttattcatgtatacatatatgatgttaacatttgtatgtattgagatgaccacacggatttctatccattaatcagtgtttaattacattaatgaattttctaatgataaactagtcttgtatacctggactataactcagatttgtaaaacattcttttttatacctgttcaatttggcaacctgttattttatttagcacatttgcaactgtgttaatgagtgagattggcttatgctttttcctttattgtagtaccattttctggtttggtatcaagattatactagtcacataaaatgaagagaatatttttttctttcttattttctgggagaatttgcacaagagtagaattttttgtttgtttcattttttaaatgattgttggaactcagttgtaaaaccaactggtctggcattttctttgtggaagattttactaccaataattagtaactactgatttaatttcaagtttttcatttctatttgagccaaccttggtaagttataattttctagatttgtcatttccatctaacttttcaaatgtattttataaagtttttaaaataacatatagatgctgtcagtttaacctctgcagcttctttagctatgttcccctttgcatttctaacatttatttttacctcctcatttaaatacatacacacctcagatgagtttctattttcttagacttttttttaaaaaccatctgcttctgttaatctctatcctgagttttttttgtttttttttttttttggtttttttttgaaagggaaaaaaatttttttaattacaaactcaattcatttggtgcatttcaaaggtgcaatacttttcttcatttatcagtgaaagaagttagaaattacttggtgcatttcaaaggtgcaatacttttcttcatttatcagtgaaagaagttagaaattaacttcccaaaaaaatcagcaaatggcaaacaaatgtccttgaaagtcacagtcacatatagtgcgtcctagaaaagaggaggggcaagacgggctccacccactttcatgagtttcatcaaatactggatctactcaagggtggagagaaaaggcaactttcaaaaaggagtatgttattaaatgaggcatttactatactccttcctaagagcaccagatggggaacatgttttctaaactagatctaggaaatggaatgtggaatcaatccgtcctcctccccttaagggctaaccactggttaatgaattaaaaaaacaagactaaaaaacaaaccccacacacactcccccccaaaaaaagaggagggaaaaaaaacaaaacaaaacactaagatgtcccagattactctccagagtggaaccagggagcagcttcaacaattccaattagtctgttacagagtcatccataagcatgccttgcttttaaacaaaacaaacaaacaaaaaaacacacacaaaaaaattttttttgaaacaacaaaaaaaaaactagtactaatcacttttctgacaatacaattactcaaaattaactagtactgggagggggaagggggggccatacctatgggccttgtctcacacgagtgcatgtgggtaggtgcagggcatttgtcattattggaaaaacgaattttaatttttaatctttagtttgatttaaacattgcttttagtatgatgccgacaccagctgtgcagaaagggctctggagagatgttcatagcagcacacacctgcggctctttttcrgttctggaggctccagggcagccaatattgcttcgtcaaatacattctttaggcctttctttgtaagtgcagaacactccacatacttgacagccttcaggtcacgggccagcttttcagcagtctctggagtgataggcttctgtttgttcttggcaggtttctcaatagtagaggggtcatctctgagatcaatttgagtcccaacaagcaaaaaaggagtctttggacagtggtgagttatctcaggcacccacttttctttcacattttcaaatgaagatggagagaccactgaaaaacagactagaaatacatctgtttgtggataactcagcggtcgtaatctgtcataatcmtcttgccctgcagtatcaaaaagtccaagagtatatggttctccaccaatcataactgtgactgcatagttgtcaaaaacagtcggtacatattccgatggaaatttgtttgttgtgtaggatatcaggagacatgttttactaacagcaccatcgcccacaacaacacacttaattgtctgcattgctgaaatagttttgtatccactttaaatatttcaaatctgatgttgacctcagcttctccaccggggcgttcccctgagtttttttttctatcttattatttctaatcttaccttagtttttctctttctgtttcttagtttctccttctgttttctttaccatctttctcttccttctatttttcctcttcctcttcctctcttacgtgattagctcaataacgttgaagtttgcttgttttctaatacatacattaaggctttctgttttgtcaaggctttctatttaagtaccacttaaaccagatgacacaatgttttaatattttgtgttatttagtttttattatatttttggtaactactattatttattcctttttttcccttaagttcttcctgtgtgcattttcatatttctgaacttttggggtttcctaattatctttatttattgaattctaacttaattggtcagaaattgttatctgtatttcctcaaacttgaaatttatgaagagtttatttacggaacaatttgtgcacaactttcatagtgttttttgtctgcttgaaaagtatgtattcttcaattatagtgtttgttattttgcaatgttatgtatatcaattagatcaaatctgttaatgtctgactcttttcagtggctgagaaaggggttagttaaatcctcccattttggaggtggatttgacaactttttttcagttatgtcaatttttgcttcacatattttgaagccatattctcaggtgcatgtatatttaaaatagttttatcattatgtagtgacccatgttctctctagtgctgctttttaagtcttttttaatgctgttttatttggtggaggggcagagtatcatattttgacttttgattttcttatatctccatgttttcaaagtgtgagtatagtaaatagcatatcattggatttttaaaatttaacaaacaatgcatgttctcactcctaagtgggagctgaacaatgagaacacatggacacagagcgaggaacagcacacaccagggcctgttggggggtgggggtgaggggagggaacttaragtacaggtcaataggtgcagcaaaccaccatggcacacgtatacccatgtaacaaacctgcacattcttgtacgtgtatcccttttttttttttagaagaaataaaggaaaactaaaataaaaaaattaaatatggtactgaagcaaataaaccactaatagctgaaaaaaaaatttagtctgacaatgtttgttttttcaccgagtttacttcattgacttarattgttagaatggatcagttttattgtgtcctaccatcttactttatgctttttattttgctaactatgtatttttcatttttttattttcttgctctttttttttatgtatttacttttccgcagctgtcatgatcagttaacttctcattgtgaaagatgaggatttatctctttgttagttttctttccttctatcttcctatctccactactacatgaaagattccaacaccataatcctccccaaataatcagattttaattgtatttagatcagtggtcaggrtttacctcattgtraccactgaaacttatttacacctgaaccacatagtatactatcattatttttattttccagaacaacattttcacacaaagttaatacttgttttctatwtgttcattttgttttctgtgtgtktattgctaaataaatctaatactttttatttctatacattttctctcattctaacatactagatagccctactcattagtgatgtaaggaatctttcatgtrcttatcactactaatcattagggaaatacaaatcaaaacamcaatgagacattgcttcacacataatatgatggctactattaagaaaaaaaaaagcaacagaaaatttcaagtgtcagctaggtcgtggaaaaatagggcatcttgtgccctgttggtgggaatgtaaaatggtgcaggtgctatggaaaacagtatggtgggtcttcaaaaaattaaaaagagaattaccgtgtgacttagccattcctcttctgggtatatgcccagatggtctgaaagtagagtcttgaagagatacttgcatattatgtacatagtagcattattcagaataaactggaaataacccagtgtctattgagaaatggtggatcaacaaaatgtggtatgtacgtgtgatgaggtttcaccaagccttaaaaaggaagaaaattctgactcacgctacagcatgaatgaagcttgaggacattatgctgtgcaaaataaatcagttacaaaaagacaaatactgtgtaatttcacttttctgaggtacctakagtagtcaaaaccagaaagtagaatggtggttactaggggcttggaggaggaargaatgttgagtaattgtttaatttttgcaatgttttagttttgaatatttaaaaaactctggagaaatgatagtgttgatggttgctaaacaatatgaatatatttcatgtcacagaactatactcttaaaaatggttatgatggtaaatttgatgtgtattttaccacaattagaacaatatttttgttagttcacgatacacaataaaatgattacagattgaatgaggaagcttgggtggattcagacaaaaaagattggcaaaatgttgaagactgctgcagatgtgtgacaagtacatgggtttcatgctattctacttttatgactgttgaaagtcccatgataatttatttttttaaataaaacttatgtaatggttaattgtatgtgtcaactttactgagctatgagatgcccacatagctagtaaaatattatttctaagtgtgtctgtgagggtgtttctgaaatagattagcattggaattggtagagtgagtggagaagattactctcatcagtgtgggtgggcatcatctaatcagttggtttgaatagaacaaaaggcaaggaagggaaaatttgctctgagctggacatttatttcttgccctcatacactggcactcctgattctcggactttcagacttagattcagttataccaccagcttaacagctttcctcgttctccagaatgcagatagaagactgtgggacttcttggtttccaaaattgagtgagccaattactataataaaactatatatctctaccttattggttttctggagaacccagactaatacaacatactagatattctatttgtatcatcttcttgaggaaatagctctcacagcctgtcgcctgctcaaacagactgggtactccctgtgtctactgcatagctatcatcctggaagtttccctttgcctttatactcctgcatgagtttgccaggactgccaaaacaaaataccttttgtctgtgttcacacattcctgatctctctctctctttttataaggacactagacattttggattagaccctcacccttataacctcatttaacaatcattacctccttcaagaccctatctccaaatccagttacattgggggttagagctttaatatataaatttcgaggggctacaatttagtccatatctaatatggtttgaccgtgtccccagccaaatctcatcttgaactctagttcccataatccccacatgtcattggaggaacttagtgggaggtaattgaaacacaggggcggttacctccatgctgttctcatgataatgagtgagttcatctggctttactctgcacttctccctgatgctgtcatgtgaagaaaggcatgttggcttccccttctgccatgattgtgaatttactgaagcctccccagccctgagggattgtgagtcaattaaacctctttcctttataaattacccagtctcaggtatatctttattagcaacataagaagagtaatacaatatcactcagtgattttgtcaatttcttctcctgaatttcttttttcctggatcctagatctttatctttcttgattacatcattgttttagtaaaatgtatcctccagtaatatccaaagagaggaaatttttgagagctcatgtatctgaaaatatctttttcccattctcacacttaatggtttgatggctgaattgtggttacaaatattgaggagtaatttcctctctccacccaagtttgaatcaagctaatttttttgttctctctttctgcaggttgggtttgtctccagtttttttttgcaaaggatatgaagtccttgcataccagctttttgtgaccatctctatttatacttttcatctttgatgcatcttagactttgtctcctttctcccttgttccacaagccattaaaatgaaagctcagatggtctgaacttagcagacactcccagtacaaaagcctgcatcactactcacatatgcatctaaattacccctcgccctttgtgtttgggtcacctaacctcctgctagagtaacaatgcattaaaaagtgtatttcctatatgtaatccaacaatcataattgtttggagaatggctctgagtatgcagtccacctggaaacagtagtcttattcatcataaaggacatcatgcttttagaatgtgggcataattgcaacgggagaaaatttctaatgggcaaatgagttattaatatcattcatatagtaagatttacattaaaactactaacaaatattggcctttatatgatttttatccaatttcagttataattgttagttatcaatttgaagattagttttttttagaaacaatgttgtttagttctgctttgtctagcctagtacatgtggagaataagcgactccacctcagtacatgttcctgctaagtgacattgacctgttaaaattgtcaaaacttgtttgagttatgttacttgtactgctttccaaaatgtatagattatgttttgcacttcttagtcttgataaatgaagtagtttggtcatcagctgactttttcttcatcactctgcgtaattattactaagagcaacatggtccaatggcagaatcttagacttctaagatctgaatacaaatcttagcactgttacttcctaatggtgtgatcttattcaagttagttgtaagtgatgtggtgaagcccgcttgtgctggctcatgagagcctattgagtttttgtgtgagctgattctttaacacagactttattaaaaattacttatataagcttataggtaaattatatcaaaaacaaagttagtaaatacttaaaatcattacttaactaattaccaaatttcactgttttctatggccttgaggtaatttagatctcttgtatttgaataggagaaacactgtaatatggtgtgctgctacggctcttcttttcccagctctgccttcacggatatcatggttgcagaaattggctgatgctagaagtcattatttgatttattgttttgctagttgtctagaccttagaaagtgataggaaacatgttaataatatggattcaacttaaaagtgtgtcatgtctgtggctgtggtgttgtgagtagcaccaaaaattgaggagacagttaccagtgtttgaaaactgttacctgattcaacaaagaagtagctcgtgtcagtggtaaaaagtgaagttctggtacatcttttgtcttcttttccttctacctgtgaatataaggaaaaatattaaccaaaagtcatatgataactacatgcatttgtcaaattacaactgtaggttggctactgatatggtttggctctatggtgcccccgcgccctgccccaaatctcatcttgaattgtaatccccgtgtgttgagggaaggtcctgtaatccccacacatcaagggagggaggtgattggatcatgggggtggtttcccccattgttctcatgatagtgaatgagttctcatgaaatctgatgggtttgtaagtgtttgaaagaaagcgctcctccttcactacttctctcttttttgccaccttgtgaagaaagtacctgcttcctcttccccctgattgtaaatttcccgaggcctccccagccatgcagaactgtgagtcaattaaacctcctttgttcataaattacccagtctcagatagtatctttatagcagtgtgagaacagactaatatagctaccaatatgactttgccaaaaatctaaaagagcatcctatatgagaatcagttggttatatggagttcacagaaaagggcattgcatagtttattatttgtaaattgtgtattatgcatactttatatcagcaaaattgataataaacatatatacatataggtctatacttattttttaacatatagccagttaaatatataccaatacaccattgcttaagctgagattaagctttttcatgtattaaatcaatcattcaaaactatgagcatcatacttcaaaaattttagttttgtgtttgttcctatttcattctatgaataccactcttcttttatccccattcctctaaaccccatatgtagacataacttgagagtcactggattgtgtaaaactatttgcttctataattacatggctccaaagtaaaatactttcgaatattcatagctttttttgaatagatatttagtattctaccttgatatcaatgaccacttttgcttttgtcagagctccttttagcagcctcttctgtatcctcatggcgccgtccatgacttatcactcctgctgtcctgaggttggaactggagactatacctaatccttttagatctgtgcacaaaatatgagtatgtagatgctcaatgaggtaattgttttcatctattttactccagctgtgacctcttttcttacatagtaattataagatattatatattaggcttatagaaagggattgccaaaaatgtaataaacagcccctcatataccttctaccttgtttaatgagtgaaacataagagatgcatttgaaggccctgtagacccctccatggttccacttccttctcttttcctcaaaggtaatcactcacctgaattgatcattcccaggcatgcgatacttctacctcacatgtatatgctcagaatatacgtggattgttacatatatttttaaatatataaaatatgataaacatactggatatgttcttttattaaattaatggactttatattttagatcagttgtaggcttacaggaaaattgagcagaaagagacctcctctgactccagcccacacttggataaatgcccttccctcgtttctgaaaaagaaagggcctttacattggctgttacgtaaattccccaaaacatgagacacaacatagttcactctggtatcccctgggcttgttatcctgcttgacacataatatttgttgagtcaagggcagtatgaatgaatgagtttcagatagcaatatcgtataagcagtggtggaaaccagggctccctcccctccagagatggactggaccagcacagcctccattgtcagagaataggaaaatagggtttaaatgtcaagggccacacataaagtcccaagatcctgtcacgcataaggacaaggcatgttagtcatggccagggggaatgtttgcaaggaggagatgttttcaactcagatattcataagccagggcctgcctctgtttaccagctgggaggtcttcagataatgaamcatgaaagcctgctatgcagcggcgctatgcaataawttttcatttgccaccagtcagcttcagggatcaaggacagctaaacacataatccgctcatgcatgttattttaaaggcttatattttaaaggttataaatatggtacattgagttaatgaggtatgttcttttggtgacaaatatttacattccacatatgcctcttgatgtcaagagtgtaactgtttcattttcttctttttctcaggaggctgggatgcagatggaaaaggcccttgtgtctgggacacatttactcatcagggaggagagagagttttcaagaaccagactggcgatgtagcttgtggcagctacactctgtgggaggaagatttgaaatgtatcaaacagcttggattgactcattaccgcttctctctttcctggtcacgtctgttacctgatgggacgacaggtttcatcaaccagaaaggcaagtgtttcttaaaaatagaaggttgcagctttaattcaaggttattgctgcagtctggcataattaatccagtatgctattctgcaatgtagctttcaaattgcaagtttttagagtgattatgggataaattttttgaaatgggtttgcattagttttcacagtaatattttggttttctttgactgttgagatcttttctgggggtgatgagtgggagggaggttagaataagtgttttattatgtaacgtgagtgttaatctgaaggtaaatttaaaaaatttgtattaaactattttcagttgtgtaaccctgtgatgagttatgaaaagtcctgaagaacttgagatgattctaagcacttcaattagggctgaattagtggagctaattaactagcatggggttaacaccaaggcccctggagttcacttactgaagattaagtccagctacatcacttactatctgtataaacatctcttgggcatctctcagtgcctcagtttccccatgaacagaaaagaatgctgtaatagtgactaattcagagagttgttggaaggttaaatgaaataatctttgtaaagtgcttaacacggttgctaacatttcaaaagcatttagtaagtgttagctattcttcttattatgccttgtaagtaaaaggaccagtcattgctctattgaatgcctgttatttatgaggcattttcacccattttctttaattctcaccaacagtagggaaggcatagtgatcatattttacagaggtgtatgtccaaatccacatatttggcaaatggccgctcagttatttaaacctaaggtctagctagctctttctacaaaacatggttggaaaactatgacctgaaggtcaaatgtggcctgtcatctatttttgtaaataaagtttgattgaaacatagacatgcctgttcattatgcatcatctatggttacttttccactttaatggcagaattgagtagctagggcagagaccatatggcctgcaaagcctcaaatatttgctatctggtcctttacaggaaaagtttgccaacccttgcactacgacatatggtttcttaatgaagacactttattactactttgtcttagaaaagattttacaccatctatggtgctgggactaggtgaagcaatgaggtgtctagggcataaaatttaaggagagcctcttaaatttaaggacaggcctcacttgtatgacctaagagaacacctgcttgcctcgccatgcttcccatcccaagaaccttcattaatacaaaggcattattcgtgagtaacttatgtgattccctatatagaacaacccttgatgacaattcctagatgggcttgtgcacttgaaaagctcattttatttaagktgggataatcttcacatcatgaaatagaattgcaactcatgaactcacgtgtagtatcagccctagagtagcttctccaaaatagggacagtttaggatcagcaggctcattccctgattctaaagacattggcccatgaccagttgctgctgattagatgtatactttcttgccatctctgactagttttattttttatgttgaatggaaggtaatttgttgttcagtttaaaagtgaacttattatcttcaatcttcctaatccaacatctgtattctcctttctttctggcaccaccttactccaaagtctaaaaaacaaaaataacctttgaatcctttcttgtcttttcttcctccatctaatgggttgctgaatatagtccattctaattatgactttttaacttatcttctaatccctctttttgcccctgccctagtttgggtatttatcattcttacaaggactttttgatatatccttgatgaatctatctgttttcaccttctgtctgtcctttgctttctataagatgccatcatagcaattttcctaaaggttgacccaaatcgtattggtttggatcatctactgctaaaaatgaagcaagatgcgtggtggctcatgcctgtaatctcagaactttggaaggctgaggcaggtggatcacctgagttcgggagttcgagaccagcctgaccaacatggagaaaccccgtctctactaaaatacaaaattagctgggtgtggtggtgtatgcctgtaatcccagctacttgggaggctgaggcaggagaatcgcttgaacccagaaggcagaggttgccatgagccaagatcgcatcattgcactccagcctgggcaacaagagcgaaatttggtctcagataataataataataataatagtagtaataatttagtcactcaaagcctcaatatacagtccatactccttcatatatcattccaggctctatttgacttagacttaatcacctccaaaaactttgcagttttggaggtgattaccccacgtgtatgatcacgcaatatcctaaacacacattggtacaggtctataatcttttatctgtaagtataagtaacccactacttattaaacataccatacagttttccaccttgtaggaatttgcttaagctttttattctgcctagaatgagctttcattaaccccaactatacctgctgaaggcctgtcctgctgttcagggctagcacaattgccctcttctttacagtatttctctattctaagccagaaaaaaaatctctctttttttttttttattctcatggcactttgcgaagctcttaagatatttctcacattcttcattgttaactgttactatatcccatgttagactatgggtgccttaagtttaattcaattcaaccaaagtgtgctgaatgtttattgtgtcagggactgtgctaagtactcatgacattcatattagagaacccctggaattgtttacagtgtaatgggtagataattctgccctgttacccttgtaatctagtccagcaccatccatggaagggattcagtaaaaattattgaattcaattgaattaggtcaataacaatcataaaaataactctaagggtagtaatgcttgcctttcattgagcatatgatatacagagctcaccatgcaaacattgcacatacttttgttgatttaatgttcataacagtcctatgaatgaggggcatctctaaacagaagcaataatgctaacatgggaaataaggttaggcataaatttgccaagatgacaaatttagttaggttcaacctaggcttgtctgacataaaaaatcttgcatctagtctagagctcagtaagtttggccaaaccacttgaattctctgtgctacagtttccctgttggttaaatgaagtggaggccttatggtactaaaacttcttgtactcattctaggggtttggagtttttactgagcttccatttggatggtaaacaacaacaacaacagcagaaaccaaaaacccaccaacttgtagtattggtccacagtgccgtatctgaagttctaaaatcaaaaggctcttattactaaatctttctaaaattaaattggcagcaaaagctaactgaattgttgtgaatatttattctgtttggtgataatatttatttattttactacagacatattaggagatactcactcagattcactgagagtgttaatatatggtatatgctctgtgtttcctttctaaaacattctgaactcatatgcccctaagattttcagacacaagattatgtacctgtaccaatatgtcaacatattcagctttgaaaaccaacttgagatactcagaagtttgtagagacacactgtagatcagcaatccaagagcaaggaaaccgaaaccactggagagtgggggtggtggtactgaagtcatggaaaccacctgaatattgtggagaaattgctcatgcagatctcacgtggggatcacgtgcctgtagcactgagatttttgtgtttggccctagctttggtaaaaccatggctgattaatattacagactttgctttgaacaagagggcactggaggtgcatccaggaggtggaatttcaataagcagttgttcattcttgtgcagtgatctgttgaagcaattggaatggttttaacttggaaaggccatctcttttttcccatttaaatattttctcaaaaagcatgcgaagaattagaaaatccctgtcactgttcttcccaaggaacgacctttttgtgtttgactatccatttcaaagcttgattataggacatttggaaacttgtaaaattctgtgtccccaaactagaagaatgtttttatgaagtggaattgttacagactgtctctttcaaatgtcagtttttcaaagtttaacaagaaaagattgagttggcaactgaaatcacatattcctgtatttctcaactgttcaagtgcatgttcatatctgccacaaatgtaaatttcagacgattagtgggaagcccaagtattggaaataaaaaaagggaatatttatgcagaatttagtgctcacttgaagatttaaaatatgagttctcttagcagggatggtttaaataaattaactaaacaagcattaatcttgtattctatgttgggcactataatagactgaaaatggccctctgaaggtgttcatgttctgattcttaggaattgtgagtgtattagcttgcatggtaaaacaaactttacagatatgattaagggaaggattttgagaggaggagattgtcctggactatctgtgtggtccaagtataattacatgggtccttaaaagagaaaggtagaaagatcagagtcagagagaagaggtaaaagagataatgattaaagcagaggtcaaagagaagaggtgaggatgaagatgggagaagaagccatgagggaaggaatgcaggtcgcctctgccacctggaaaaggtagaaagatgaattccacctgagagcctccagaaggaatataactttgctgacatcttgattagcccaataagcactgttttggacctctggcccccagaactgtaacataatgcatttgtcttggtcctgccactaagtttgtggtaatttgttttagcagcaataggaaactaatacaggcagtgtggcaagagaacacaggagcagttaaagaaattgatgggaggtgggggatcacgagttcaggagatcaagaccctcctggccaatatggtgaaaccccgtctctactaaaaatacaaaaattagctgggtgtggtggcacgtgcctgtaatcccagctactcgggaggctgaggcaggagaatcgcttgaaccagggagtcagaagttgcagtgagttgagatcacactccagcctgggtgacagagcgagattctgtcaaaaaaaaaaaaaaaaaagaaaagaaagaaaagaaaccgatggtgtgaatggtgtgaatctagaaaggtgtgaaccaaagaaagttgtaaacttgatgcatggtaggcatgagatcaaaggaattctatgttacttttttttgttgaaggaggattctaggtcaattttttttttaatttgagacatcatctttgcaagttcgagccacgccctcttctaggggaattcccctatatctttgttttatataatcctgcttgaccccaggtcacagctgacaggacaaaggaaagacatttttccctggacttataatgagctgtgacctcatggaaaaataggagcttgctccattgttttcctccctcaaggatgtctggaattgaggtactgagaggctgagttggttggtggttggcactggggctcagaagtagctttggcaggtgggacggccattttgagaccacaacagattgagtgtgtaaagaaaactggttctttcttaagtatatatttttctgttttgtctctgctgcttgaatcagaagggaaagctgtttctgaaagacgaaatggagcagatgtgttgagagaagctgggatggaagagatcagttttccctgagaagcaaagattttctcagctcccaacttcaattcttttgacttccacttgccattattttctgtcattgagtccctgatctatttctgtcatttaaaataatgtccactgcatctatatctactacccaactgcccccagtgccacctttgtatatgagttcatctgggttggtttttgttatatccaaaagacctctacctcaaatatgtttcatattttctaagatcaaataggcagaaatcagcttaattagagaagataatattgactatgaaagaaagctatagaagttttaatccttaaaataatcaattctgtcctaaatacccagaagcagaatgggatccaaatgacctctcaaagtttcaaaatccctagattggtaacaggtgatcatttaaaaaatacacatttattcagaaggagaatttgtttatcagtgacttacactattctgaaaaacaaagttaaataaccctttggcagttttattctcattcaatactcacatgctcctaaggtggcagtattaacattcccattttacagatgaggatactgaggtgtagagagaccagtgatttatccaagatcctttgactgagttttctgggtctggggctctcctcttaaaaatcccactctggcygggtgcggtggctcaagcctgtaattccagcactttgggaggctgaggtgggtggatcatgaggtcaggagatcaagaccatcctggctaacacaatgaaaccctgtctttactaaaactacaaaaaattagccgggcgtggtggcgggcgcctgtagtcccagctattcgggaggctgagtcaggagaatggcgtgaacctgggaggaagagcttgcagtgagccaagatcatgccactgcactccagcctgggcgacagagggagactccatctcaaaaaaaaaaaaaaaaaaaaaaattcccgctccacttcatggaaaagtttcattacaatattgaataaactgtatgatcgagaagtgaagtgcttaattctgggatagtgaatgttaattatgcaatgctctgttgctctgctgtgctgatgagtgagaagaaaattttcttaaaatttacttatcttcctttcaacagacagttatcatgtggtttgaattacattgattggccatcattaatgacttctccacaaagggggaaaaaggaatttgatattgtgatcaggtctgaagtaggtgaccatgaacgctggtaaaatagagtcacatgtttccggctcaggaacattagttaacatgagaagtgggatgtcatagtgagaacagttcagtctttgtagtgagacagactgggattaaatgtgggccatgccatttgtcaacattgagactctctgaatctgttttctcatttttaaatgggaataaaaacacctatctctagagcttagcgcttggatttggcaaaatgcatagtacgagttcaataaatgaaagctaatrttattttcatgttcaaagtcaatggaaagagttggctatgaaaaccctcacacataccaatacccagattattttatcattttatctttagatatctcattcacaaatatagaaatgtgggtttatgggggcccaggggtgggatggtgaaatactctctttgagagaaaaaaggatagtttataaaatttcatgagtatgttagttttattgctactgtaacaaattatcacatattagctgcttaaaacaacaaaaatttgttaccttagagttctgcaggtcagaagtctgacatgggtgtctgtgaggctgaaatcaagatacctgcacgtctgtgtctctttctgagggatctttggaagagtctgtctcttggtgcattcaggttgttggcagaattcagttccttgtgattgtagaactgaggtctttattatcttgctctggctatcagctaaggactgttctcagctttgagaagccatctgcattccttggctcatggtgggtctccttcctccattttctttcttttttttttcttttgagatggagtctcactctgttgcccgggctggagtgcagtggtgcgatctcggctcactgcaagctccgcttcccgggttcacgccattcccctgcctcagactcctgagcagctgggactataggcgcgcaccactacacccagctaatttttgtatttttttagagatggggtttcaccatgttgatcaggcttgtctcaaactcctgacctcgtgatccgcacaactttgcctcccaaagtgctgggattacaagcatgagccaccgcgcctggccctcttcctccatttttaaagccagcagtagtgggttgagtttctctcaagctgccacttctcctcctcttcttccgttgttgcatctctctgacccactcttctgtcttactcttscacttctaaaaactcatgtagttatattggatccacctggacactctagggaactcttcccaattcaaggtccataccttaattgcatctgccaagtcccttttgccatggaaggtaacatgttcacccgtttcacggattagasaacggacatctctggggrgaggatgagttattctgctaccaagtgagaaatagcacagaagtgtgtcttccaaatatggagttgttatgcatgattcacagtacattccagtttgcaaaataaatgagatggtgtcaaaaatacccacttacccagacagagagaaaacacatgattgtgcataatttggcttctgcttaccttgctcatctctcaccattctattcctcttttgaccattctattcctccttatactgaactttttatttccagaaagtgagtgaatatacaaacactggccaggtcatatctgataataaaactcagactgacaaaggaaacccaggaagccaaaccttagcctctgcagcaatcagcccagagtagtcacagtgtggtcaactgataccttctctattttctaaccccctgctctctgcttccaactcaggagcaacctgagaaaaccaaatgtgctccccaaactaatcagaaaggatgccctgcttctagttagctctccaatagcttcccaaggccaacaaactttaatcagggcacacccaagggttctcttttttccactctaaagcttttcctctgtcctgactgtatttgaatacctgccaaatgcaagtattggtggctgactctcttgctatagcaaactctgagtaaatagtctgtttttctcatttgagtggtctttgttttaacatttcctttgtgtattgtttttgtttcctctttttctcttccttgatcacatttttctccttaccttaagcgattaacttgtattcatattttaaatatcagcttagatgtcactaataacaataataattactatttcggtgatagctaacctgtactgagcccttaccatatgccaagaactgttctaaacatgtttaatttaccagctcattaaactctcacaacagttaactgaagaaggtttctcttattatccacatttctcatacaggaaaagataattcagagatattaaggatcttgcccaaggttgcagagctactaggtgaaagacttaggacagaatttaggtggtctggcaccataattcactcttgaaacaattacgctatgttgctttcagaatattttcaaataccctgagtttaggatggatatcccttctcatatgtttaaataggactctgtaatttatctactactctattgtaattgtttatgaatttctctgtagtctctgctactaagctccctgaggacaagggtggtgtttgttttgcttatgtttgtatgtcaagcatatagtagtttctctattaatgtgtatttaaggaattaacaaacaaatgatcgaattaatgaaatacatacaaaagtgtgaattgttatttttaaaaattggaggctcttaagaaaaaagaaagggaccttaggcagactttcaatgcaacacacttctacatatgacttcataatttttatccaggaaacaacttcttaaaacagggcagcttctcttgtctaagcttaggtygcctccatatttttaaatataaaaccacatgaaatactaacatcagcctcttcccagaaagcctcttccaagctaatcgtcatcattaagctagactcagtgaattcttgacataaattctgagccaggtcatgttcaatttagaaactttcttctgaactctgcagcaagcctaaaaactctctcttacatacttgcagtcctggaaaaatcagatgagagccagaggtggctatgtatccccatgaactatgttggagttttagagcaaacctccaactgggtgcttttaatgtcctaagcctctggctgtctgtccttgtaacccagattctggggcagatgctgagctctygttcattctcagtaggtctcttttcctagacttgtgagactagttgacctggaaaagcattaaggcagtcatctggatcaattcctttactttatatttaataccatcggatccatgcatttattaaagaaatatttattagcctctaaatttctggtactatcccaggatttggagatccagaggtgaattaaacaagccttctgctatcatggggcttatattctagtggggctaagagacaaaaatgagcatacatacaaatgcatgaaatcatttcaatatgtatgaaaataacacaaagttagataacagcgatctgcctaaatgtatccatttcaatacgtttatctttcaatcatgtcaccccattaaactcctacttcctgatcaactactcttctttggaattctcartgtttcctctcagtctttcattgattatatcaaggwagtagtaaaacttgttttgaataaaagtcattcagaaaattgtttttgatattctcccttttaaaatttattgccaatatactacaaataacttttcttcttagggcactttctttttcctcctaggaattgattattacaacaagatcatcgatgatttgttaaaaaatggggttactcccattgtgaccctctaccactttgatttgcctcagactttagaagaccaaggaggttggttgtcagaggcaatcattgaatcctttgacaaatatgctcagttttgcttcagtacctttggggatcgtgtcaagcagtggatcaccataaatgaagctaatgttctttctgtgatrtcatatgacttaggtatgtttcctccgggtatccctcactttgggactggaggttatcaggcagctcataatttgattaaggctcatgccagatcctggcacagctatgattccttatttcsaaaaaagcagaaaggtatggtgtctctatcactttttgcggtctggttggaaccagcagatcccaactcagtgtctgaccaggaagctgctaaaagagccatcactttccatctggatttatttgctaaacccatattcatcgatggtgattatcctgaagttgtcaagtctcagattgcctccatgagtcaaaagcaaggctatccatcatcgaggcttccagaattcactgaagaagagaagaaaatgatcaaaggcactgctgatttttttgctgtgcaatattatacaactcgcttaatcaagtaccaggagaacaagaaaggagaactaggkattctccaggatgcggaaattgaattttttccagatccatcttggaaaaatgtggattggatctacgtggtaccatggggagtaygtaaactactgaaatatattaaggtaaatgcatgattttttgtgtgtccatgtacacccaattatgtgaaggtgggcaagacaggcatatgtrtatatatatatatatatatggacctgaaaaaagaattactttaggtaatagcatatacatttgctggcctgggaagagcagattaggatttgagttgatgaggggtaactagccggtaaaggcttcaaaagcagtggtcaaagtctaggatttgttgttaaagttagttgtggctatagaagtaatttggacatatttttcaatctggtgtcacaactatgattataaaagacattttaaggattgagatagttggatcctttttttgagtctcagctatagtggatgacatccagttagctaaaattaaaatttcaattacaggttttcagaacccctcctatgggggatgtagaatgtagctactggcaggactgaggggttaaggagcagtgacaatcaacagatgctgatggaagaaagatatttctgtcttctcattataataagagtcatttgactgtcttcatggacatttgcrcagttttgcgtttccattgttagttataaaaggtcagtgcatggaaaattaagttaatagggtcagtgcaatttgatgaaaactagttttggggttgtagcttacagaagatagagggtaatgtacctgattttatgagctttctttttttaaaacatctgtttggaataaaacttctgttctttttttttaggatacatataataaccctgtaatttacatcactgagaatgggtttccccagagtgacccagcgcctcttgatgacactcaacgctgggagtatttcagacaaacatttcaggaactgttcaaaggtaccatttgaaatgatgaaagatcaattgtgcaaacttaatataattttcccatttgcttatttgcattcagcaaagaccaataatttttgaaagctgaaatccatgtaaatcaatgcaaagccatataattaggagagggggaaaaagtatttaggaaagaggaagtggaggattttggcctagctacaacctcctgaaattgaatcaagtgaaaagtgactgtcttcagcattttgtgactcccaggtgaaggtgacaagaacagaaggagtggtggctgttgggagagaacatcagttattacagaatagattagcactgatcaactataacatgcttatttgcatattttaatatcctaactaccaaaaaaaaatgaaatgacaggatttttaaagaacccaaattaagcatctgtgcaataaacttaaaaatggcacaagtcctccatcaatgtatgttgcatttaagctgtaaccaagcagcccagttagaaacatttttattgtcgtatggaaaatgtgagttgtgttttaagataatgttattttagtatctcttttccctccatggaattcttttcatatgarttcttaacatatttgaaaacagtcatgaaggaataacctytaactggtaacacacatttctaggcaagttagcacctcctctcctattatttgttgcttcccaaatttaattcctctttttttttttttgagacagagtcttgctctgtcacccaggctggagtgtaatggcgctatctgggctcactgcaagctctgcctcccaggttcacgccattctcctgcctcagcctcctagtagctgggactgcaggctcccgccaccacgcctggctaattttttgtatttttagtagaggtggggtttcacggttttagtcgggattgtcttgatctcctgaccttgtgatctgcccgccttggcctcccaaagtgctgggattacagacatgagccactgcgcccggccaatttctccttcttaaaaaggaatcatgtcatagcaacaaaatccaatgtaaaataagactttaaatttcctttttttttttaaaccatgatagccacacttatttcttatcattctgagaggttccgacattattctttctaaaattattcagtattacactggtaatcaccagaaggaattctggaaagtgacacaaagtggtctttttccaaaacctgaaatttatttactggatccttcactcaggcctggagtttattggcagagagcaattggattcttgcaatttgacccaagtgaagaaattattttgtattgcacacaaaatagattcttccgggtaggagttcatcttctgataagagagggaaatctctagttttctgagattcctctccacttctccctgtagatgggtcctgttcatagttaatctattgatattcccaggctttatcctgaagaacaaataggctagttactacccggcagatttatggatggctacagggaacacaaatgacttgcctaaaattgctctgtgtatttttgggaaaagagagataaacagaaattgctttttttttttgtttccattcccagcctggtactctgttcagcgctaatcatatagaggcatttcgttgttttttcaaatagtttcaagtactttataccatcctttacatctttaatgctaaatgcttaatgatcgaccccaaactaaggtgattcaaggatagaaaagtaacagaagataagagtggaaaataaaaaaagatttggatttctaagagacgggagagaatagggttaggacaaaaaatatgtttttcaatttgttgaacttctattttgtcttcaaattacttgatgagaggtttattaggcatataaaacatatactgtctacagcatctatgttctcttctgaatcttaacagtaggctagctatattcactgtaatagacacgtactatttttgttttgccttttaaaaaaacgactttttaaatgtgtagaaatatatatattgagaagaaaaacatatgcataaatgtatttattctggactgggtatagtggtgtggtaacttttttttttttttgagatggagtctcgctctgtcacccaggctggagtgcagtggcatgatcttggctcactgaaagctccgcctcccgggttcacgccattctcctgcctcagtctcccaagtagctgggactataggygcccgctactacamctggctaattttttgtatttttagtagagaccatagccaggatggtctcgatctcctgacctcatgatctgcccgccttggcctcccgaagtgctgggattacaggcatgagccaccgcgccccactgtggtgtggtaacttttttatgtattctcgtagtggacaccaattatttctgctgtggtgcaactctctttcccctttcttctataaaatactcacctccccatgtacatgcttaccacagggacatccatgcaagtggaatacaatcctcctccttcagcagataactgactggtccaaacgtaggcacaggacgtgagctggggcaatttcagttcttccctggtacttagaacgtggaccaattagtttcttaatctcttggactgggttgggtggatgtagctttgtgagccactggtgactcggttctaccctgtaagcttaggcacagtgagaagggaagatatctatgcattaaaggaaggtaaacatggagaacttccagacagcactggagcctctgcttttcatttttcctgagatctgtctgcatgcaagttcttgagagacattactttcatcataataaagtgctctttgtgcttaatcttattctaattgggcttctatctcttgaataaaaagagttgtaattgataccatcatctcgtttccttctcaaaacaatgatatgaagtcattactcctactttatagatgaggaaactgagtttcaaagaggctatattatttgctaaagaaaataaaggcactaagtagtatttcctggaacaaggctgaatgcatgtatattattattattattattaactatttggtgtgagatataatctgtgagttcagggctctctgagttaaagtgtttatttgtcccaccacacagaaacttttccttatgtttggttactttgggtttgcatgtattytttcaaagtgcttcatgctgtctttgaagaagagccgacaggttctgtgaccttgagcaaagctcagacgccctatatcctagttctcatcaaaagagcagagctgaacttgctaatcaattttctgagactcctccgaggtaatgctgatgatcttggttgccaagaactttaatagtaagaagcaccctgtgagcaattaaaaataataacaggccaaggaagatattcctgggaagcgctgcaggtgagaagtgaccaaaacctagggagtcagatggatgatggctctgtgattctcacgaacaaagcctttcctctgacatcacacatatggagaggcacataatgacactatagatggatcaatgggtccgcttggaggtcttactgatctcttcaggtagattcccacagcaattaatcgagcattaaaaggtatgctaatgtttctgtttccttttggaatatgagaaaaaaaaaagagaaaaaatatcattttagaataaaaggagagaaatcagctagtgccttttaaattttgcattgtttaattgtattaaacaccttttaataggttatattttaagtaatgtagaggcaggtgagagtaaaggataccaaaaagttgaaataacatataactagatttgcattccagatctgcaaattattcaataagggacctttagcaaattgctcaacctgtctaatcctcagtttgtttatctataaaaatggggttaatttttttttctggcggggttgttatagtgagattccatttcatgagctaatgtgtaaaattcccttagcaactacctgacccatagtagctccttaaccaatggtaacaattattattattacaaaatgtgcactcttaaaaacgtatctattatctccaagttattctccttgttattaaaaaaatgccattccaagacttgttatttttctatcccccccccacaaattatagcagactatttccccatatttctgtgtttctcttcctttttgaggaacttctggatgtgtgttataacattggtcctctggctttttctagtgtgaattgcactgaggagaaagcagcacctccattcattatttccctgtgggaggtgaccagattaggtgaaaagtcaaatcattgacagtggaaactgctatcaagtaactgggaattgttctgccacttgaatctttgtatatgtttgggattcaatgacattcaaatagttaaaattttcttgtatcataggaatttttattatattcataacatttatgccactcctcaatacttaagagccaatgggcaattttggcttcatatgtagatgcacacaaatggatacctctccagtctaagtgctttcatggagatgaggaagratggggagccaggggccattgctccgatggctgatactgcccccatcacctaaattatcttgaaaggggatccgagcggtgctcaacctgtttctcatacctacccagcacatgtgtgcttttagcctggcttatgatccttcctccacctggaatgccatgctctttgctttcttcctggcccacttttgtttgaagtagatgggcttgcttgaagtcagagaaaacataggtttgagaccctggttctgcccataatgagcccaaaactttagggaaaattctgaaacaggcaaccacctcagtcatctaatctctaaaatggggataataagaacattgatcttctaaagagtggtgaaaaatgagcaaaataatgcttatgatgcctaaaaaaagtctggcacatttcctaaggattctgtaaatgattgactaatttttttggggggtggaggtgctgtgaattctctgagggctagagctttgtcttttttttataattatatcttcagctctaagcaccatgactgttacatagtagtgttatacacatatttgttgaatttggttctatcatggaaaggctagataatgaataatgagaaataaatgactaaatggttgggaggcatattttctttccctgaagaaatatacccccccacacacacacaaaaaatgcagccttctgaaaagtttctgagccagtccaactttccaggcagatccatgcctgagttagcacagcggtagatgattgcagagaaggtttgttaatgaccagctttcagcttttaatgacaaaacccctcagcaagatgtcatcgaagttattgaagacttcactgaaagtgttgaagctgatacattgtaacaagaaggttataaatcttgcagcttggatataccaccaagacaagatgctgagcacagaatcaccctgctgttgtctgtcagcattctccctccctctacgtctttcccttcccacggagagcaggtaaaggagaaatacatctatttcccaaagtagtgcagacctggcagccacctgcctatgccaatttcagatcacagaggtccatttaactggacaaaatgtgttaagcgcctgtgtttttctaaatgtgcattagaaaaaaatcctaagcattagggaaagatttcaaaggttaatacggtgaccttttagaaacaccagccaattaaaaatctattgcaagctcagaatagagacccaaatacctgaatatagattctcactgtgtatctattgttttattgcttctcagaggacatctttgtcaccttggcccctaggaagcagttcatgtcataactcctgttaaatataactgtrtggctttggggccacgtggggtgggatttggattgactcaatactgctaaccaggctgctcctggctgcactggatggctgctagccacaaggggccaggtcagaacacagaggaagaatgaggttgaaggctgggcatgagaatggctagtgggtgctagtatatagagtgtgcaatttttgttttttaattttttaattgacaaaaattgtatctttattgtgtacaacatgttatgaaacatgtatacaatctaaaatgccttaaacacatgcattacctgacatattagcatttttttttgtggtgggaatgcttaccatctactcttttggtaatttaaaagaatataacagattgttattaattatagtcaccatgttgtacaataaatctcttgaatttttggctcctatccaactgaaatgttgtctcttttgaaacagcatctcctgagttccccagccccataaacgagatcatttatgtctacatatgctctgaatgccttaaaatgttagatgttattctcaccatctactctctgcctctttgagatccacttttttagattccgcatataagtgagagcatgtggtatttgtctttctgtgcctggtttctttcacttaacataatgtcctataggttcatctgtattgttgcaaatgacaggattttattctttctaaggtccaattgtaggaccatgctgttttggttactgtagccttgtagcatagtttaaagttgggtaatgtgatttctccagcttcactctttttgcttaagattgctttggctactcgggctcttttttgattacatatgaattttagaataatatttttctaaatctgtgaaaaatgacactgtattccccattttctttatccattcatccactgtggacacgtaggttgatcccacatcctggctattgtgaataatggtgcagtgaacacgggaatgcagatatctctttgacatactgatttcatttcctttggatacatggtagttttatttgtggaatttgaaaagtcatgaagaaaataatttcttatgtttgtgtcccactagtctacatatgtagaccacacttagactcagccagggtttacagagttaaccttaaaaagggatatgccagatgcccttctcatttatttccccctgctacttccactcatgacgtacttgtcatttgcccttccttcccactgggaagcatggaagagtagaatgcatcgaagtagaaagtctgcaggctttggagaggaaagatgaacagagttctgtgctctagtggtgtgtctttgggtaagtcatcattggtactctctaaatgtcaatttccttatctgtaaaatgggactaatgctaactgctgttctgcctaatccaaggtcagttgtgaaaataaaatgagatcatttatatctacatatgctctgaacaccttagactgttagatgttattctcatatttgatatacgtactttatgcttctgtttaaggacattcatcactctggtcaaaatacattatctggacctcaacattctccactgccaaggaaaggggttggtgctcattatttgggtcttttcaaagtctagattctcagattttatcaatttattttcctgcacatttctatactgctgtgtaacattgtgaccaatttaagggtttttagagaacatgtactatgaccaagtgattaatatagtgcttaataaagccagaataacacacatacacaaacacattcacacatacacagaaatatgtatacatatatgcatatactctgtatgtctctatctggctacctatctatgtaagtttatgtaagttttttgatgagctactttaccacacttgtctggtgaggcatatattgatgtggtcagaaacctaaaccatttatgaggcacattctcttagaaacatagaacctggcatacctgcttcacaagaacaggtttcatggagttgcccatgtgagaagcagcttgatcacacatcagagaatctttccttgtgcgttttaactggaaaccattatcttctctgtctgtagtattccaatatctatgctgtgccccaactgatggacatcactttgggctttttaactcagtttccactactctgaagtgatacttaaggtctcccaccatctcaggtccagtgaattttaaggatacaataaagcctttaaaaaaatcagatgatttcaaactaacctttctttttttctttttctttttcttttttttttttttttttttgagacggagtctcgctttgttgcccaggctggagtgcagtggcgcgatctcggctcactgcaagctctgcttcccaggttcatgccattctcctgcctcagcctcctgagtagctgggactacaggcgcccaccaccatgcccagctaattttttttttgtatttttttagtagagacagaatttcaccatgttagccaggatggtctcaatctcctgacctcatgatctgcccaccttggcctcccaaagtgctgggattacaggcgtgagccaccgtgcctggccgtaacctttctttttttcatgaaaatgtatagtgtaacagtaagcagaagctcagtttttattttccacaactgtgaagaccaatgaggaaaagaattgttatttatctgaaaaaagttagcctttccaatatgaagagttggctgaatggaaactagaaaaaggggaagggggagaaaagaaaaaattcaataatgattttttattatttattgatttatctatttttttctattccctagatagcttcagggaggattcagtaatgatttttaaaaactgttccaagagagagccatgttggaatattttagtgattagggggctactggaattgaagcaaggtgagtatctcaggtttcccccagagtgtagatgaggtggtcctcaagcatctgtctacattagctcttattccctgatctccagaataacctggttactatctgcctcttagtcatcttgggagcgaaaaatcactgcctttgaatgaagccagtagagttccactttagtgtgattcacaggcgttgcctggaygactgtgttaaggattctgttggatagctatgggctcatggaaagaatcaaaggaagtagatggtcaaatgctatctatttctgctcatgaaacttaacatgagttttcccatgcttggaaagagatattcctcattgtaaattaatacgttgacattaggttttgtaaataaaaatcttgttcattagtagggattagctctcggtgcagtgaaaaaaaaatgaaatggtggatttgcagtgcgaccttaggcggtgctgatctcaccggttctataaccttcctctctgtagtcttctcatcttacctttttatagcttcaatgttgcttatattggtcagttgctctacagtgatataaatgttgtttctgccaactttcacagactcctaattctgtgaattactggttcactacctcctatcttatttttttcaataatgagcctgatactatgtagacaaaaatcagcaatattatgattgaaaacattaaaaattgatgccatgaccactgcakaggcttctaactacagcattgtagcaaatacttgttgaataagacaattgaatatatggaacttgagagatactttgattcttgaagatgatatccatgataatctttgggaaaaaaaaaagagcattttcaggagaaaatgaaagttattaaaaggtaaaagaactcataggcagaagaagtgtacctaaagattttattcaccatttttaaagacaaaattctcaccagaaaaaattttggagttttgagctatatactcagcattccgtaagtgctcagtaaatgtttaataactgaaaggagattgagcctagattagcagaaaaactgaattacttacttctgggaatttcaatgaaatattagacttatgccaccattgtgcttttttgatttctaaagaagtggcagattatttattctattataaacaatttgtatgtattagaatatgcatgaacactaattatatccttttgatattaaacttctgtttgggacaacaayaatttaaatatatgctagagttttaaagctctcatgtataaattctcttaagcgctccatgcttcagtttctttaattgaaaataaaagggctgaactagctgatcttttgggatactgccagcctaagaattttgtgaccttctagatagtcgttctgcagaagtatgtcacggatcacattttattagaactcttgataatttcgtaggctataaaatttagtccaaggaattataattaatggtctttttttatacaaaaaaaaaagcctctcttcattcttcttatccagctacctaatttgaaatttaacacctttcttatatggacataaaattagaccttgcttttcaatgcgctgtttctattgatattgattgaggttccaggtaacattttcttgaccttcaatctgagtgtttcctcttctattcattcacattgaaaatgaacctcacctttctttgcttgagaaagttttcccttggaattcatagagtcagaagggcacttcagactcaagtttaacaaagttactgtagagagcataaaatctcagagaggaaactggatgtgccaactcatttcaaagcattagtgtaaaatccccagctgaagaacttcacagcagctacaatcaccagcagtaaaatcacctttcaaaacacaattatggcaagaggcatctaatctattaaattttaagatagttaagtatgagtttttgaactttgccataaatgcataatttaattcaattagatagcgtagtaattttaactttacgtatatttaacttgaacactaaacctttgtttctgggtaagatcctgaattagaaggagggattatattgcggcgttttcagaattacagtctcatcataagtctgtgcagagacttcatataggcaagtctgtttttctattctgacttctgagcgtagagcttattccaatcagtactgcttttacctcaagttactgtttaggtagcattttcttcaatacaatgaaaatatcactctggtgctagagatgaaaatagtttcttttagaaagtaattcttaaagtttatctgaaaaggctatgtgcagagatgggggagggaggcccgtctcattcagtagggtcatctcatcaacagcaaagtctcctgtgtgttgagattagctaatgaaacagtatcatggcctgagattagtttgtgttatcctaaagctcggccacatttccccccttgtttgtgaaagtctgttataggaatcactgtctgctttaaaaataagtgaaactattgtggatggaggaagaaaaggcatttgaaccctgaagaattttaattggtgctggtgagtgaaggtgaacaagaagccatcgatgattcaggtgaaaacattaatgagtgcggactaaacagataataggagtagggtaggaggaagaatgtttgacatttgctgatgaaataaccttttttactctcctggcaacaagtggaattcatttctttgatatttagacacagctcaaagtcttaaataattttaaacgaccatattcttttatgagtcagagtcaagtcaaatatgttttgtagttgaaaatcagaataataaaaaattagatcagcacataaaatatgagtaaatgagtctattgtaaggtatacatttattagtagatcatttttatgtggttgaggctctgtgggtttagtcccttaaaacattttttttccccaaagatgttcaggatatgttcttgatactttgaatgagcagttggccttaaaaaacaaaaaaaaggaagcttcaaaaatatttcatggccaaagtttgctgccctcatgaatagatggtaacaatgacaagaatagttcagaaaaatcttttagcactcctagaaaaacaaatagcctgacccattgattgtgtacaaattttgtacagacaggcagataactttatgaatactcttatgccacaaggatttgcttgtttgacatactgaaagagcatattctttgattgattgattgattgacttagatagattcaggggggtacatgtgcaggatgtacatagatatattgtataatggcgaggtttaggcttcttgtatacctgtcaaccaaatagtgaacattatacccaataggtaattttcaaccctcatccatcctccaactctccccacttttggaatgtctagtgtctatttaatttccttctttgtgtccatgtgtaccattgtttagcttccacttataagtaaaagcatacagcatttaattttctgtttctgagtgatttctcttaggataatgacctccagcttcatctatgttgctgcaaaagacatgatttcagaaagagtatattctttaaagacagatccattttcagaatctggttctgatactctttcagcttgtgagccttgggcaagttatgaatatcagttcatcatctctgaaaacttatttttggtgcagattaatggcatacttcatatcctagagaaatgcctaccacataaatcctccaaatgataactattgcagtgaattatttattaccagcatctagtaaccaggattttggaaaaactgcgacttcctgcatagtcatcaagcattgataatttatgcttctcttgatgaccccagaatgcattctgaataattagagaaagattaaattataatcagtttagtttcagtgttaagtgtattttaatttattctcattctttaaaaatttgtaatctttttgcatgtggcaacaattaacaaaaaacatttgattagctggggcaccacattccctgactatcaagctaataaagagtttattgcaggttgttgaaactcaaacttttccctgtgcataaactgggcatttgctggatggagtctcttcatgccagtcttctatcctttctcagagccagtgtgttgactgttggatatcttagatttaatctttatatatccttgaacaacactcttggaacctataccagacacttcttgtgtattattttgacgcagggtcctagtcctggtcatcacttctgatttggtgcagatgaggacctaagtcttctatttctgaggttgtctgttcttttcctatgtatttctagagatgaacatctcagctgactttagtaaccaatctatcttggtgtttgatcaacctctgctcttacccaatcatgttttggacttgttctcactaggctttttaggctatataaccttcctgatgaaaacttcactatgcattttatcatttttgtggttctttgaactttccagttttttttccatttgtcttttttcccccaacacaccaatgtcatatgttgctgtaaaaagtgccttaacacctgatttgtgttaaaaggcatctcttcaaaaattcattcatattattgttcttttgtgatcttgattatggtacattttcaggcaagcagattgatttttgtcatttgatcgatcaacataggacataggattcatcagttccttttcgtctcccttattctgccttcctttacatatctgccctaccccaaagcctctctttgcaacctgacactctcctttttcatagtgtccttcacatcccagctgacatccccaatacttactcagtgaatgaagtaaggcagagactgcttgtttcccttaaagggagagtgaggccaaggggaaaaacagctgataaagaaataatttttcactgtaagcccaggcaactcttgggcctggtgtaaggggaagattgattaggattctcttgttaaaatgtagaagccttctttggtcatgtgtgggtgggtgtccggtgagaatcggaagcctgggtgtctmgccaggaagcaacaattagcattctactctaattctgtgatttctctgatatggagctcactgggtagctgcatttcagttggtcagtcaggttgcctgttactgctactgtgcgtaatttctccccaaagtgatatttttcattatatagacaaacattaaaagtcagcaactcagtagtaaagcagtcactgttcctctagctgtggcacacctctatttagctactgcaaatacgtttaatatttggcaaaccatatgtatattattgggctattttgaattttctgrgaactatgattttgagctttgctgtgtttgaatgatcaattgmaatgctttgttgaatagacttctttacaaaatgttacattttcataaatatagcataagatcacctggtaaacaaatgaatttgtgttaatagaaagtgtgaaaatttcagaacattcacagaattgaagttaaagtagctacactatctttatgtatagatagattgttggtcacaggaatgacatattaggctgggtgtggtgtctcgtgcctttaatcccagcactttgggaggctgaggcggcaggggtggggggacggggggaacgcttgagggcaggagtttgagaccagcctagccaacatggtgaaaccctgtctctactaaaaatacaaaaaaatttcccgggcgtagtggtatgcaccggtaatcccagctgatttgaaggttgaggcatgagaattgcttaaacctgggagacagaggttgcagtgagccaagatcacaccactccactccagcccagacaacagagtgagactctgtctcaaaaaaaaaaaaaaggaaaaaattgccatattaatacatgtgttgcaaagaaggagacaacagtcactggggtctgcttgagaagagagtgggggaaggagggagaggagcagaaaagataactattgggtactgtgcttaatacctgggtgatgttatgtgtacagcaaacctccgtgacacgtgtttatctgtgtaacaaaccttcagatgtacccccaaacctgaaataaaaatttaaaaaagaagaaaatcatttccatgggattccaaataaactagctcatggagtatggaaaaaaaaatgtgtgttggatggtagttgaaggccatttatatatcatattctttaaattttgacatttcgaatgctggattctcatgaatttgggtaacgacattcactctaaataatttagtgctctcttttattttaagggatattttattttattaagaaaatgttcttcctgtatttctatcttaaaaatattttttggttaacacaaacacagtagtttccctttaaccatggtttcacttcctgtggtttcagttacctgaggtcaaccgctatgcaaaaataatcagtggaaaattccagaaataagcaattcataagttttaaattgttcaccattttgagtagcttgatgaaatctcacaaagtccccctccctcctcctgggacatgaatcctccttctatccagcatatccctgttgtcaacactacctgcccgtgaatcagttaggagtcacctgggttatcagatctgctgttgcagtatcacagcgcttgtgttgggttgatacccttttttttacttaataatggccccaaagtgcaagtgtgtgattccggcaatttggatattccaaagaaaagcataaagtccttcctttaagggaaaagtgaaagttctcaaattagtaaggaaagaaaaaaaattgtatgctgacattgctcagatctatggtaagaatgaatcttctatctgtgaaattgtgaagaaggaaaaagaaattcatttatagtgtatatatgttttggtactatccgtggttttaggcattcactgggggtcttggaacgtatcccctgtggctaaggggaactactgtactggaaaacctttgtgatttgtaataattatagagatgacaattcagaaatgtcagttaaattgttgagaggtattaatttttgtcaattattgaagatggaccattttattacattgaggttcttgataaaaagaaataccagctcataaatcagtggtagggagggagtgggaggatgtaaatatcctacccgtagttgttgacataaagcttgaacactggcttgtagcttcctggcattcagatcaaaacgaattcaccattggttttcaaactgtgctttctggagctttctgatctatgaagatatctttggggactcagttagatgcacagagggtgggaggaaaagcagagctccagggcacctctgcttttattggttgtgtatattaggaatccataaaaattttcatttgaaaggaagactctggtgctaaaaaaaaaaaaaaaagaaamattggaaaaccactgaataatagggatctcattatcagaggggcagaaacatggtagctcctttggggaaataaagcacaactttctttctctttcacttgaaaaaatgagttatttcaaacatacagaaaaatacaggtacccatacaactgtgacccagatttaacacatgctaatattctgtcatacacattatacatgaaaaaggaaattaaatattattggcccagggtaagtccctttatatctttcctgtatctcctttctgtcttccttcacttgggttaactctgatcttgaagtgtgtgcactacacattttgctacaaatttatacatccatggcctatctgtataatgctttctgcattttactatttacataaatggtgtcacactatacacatatatattttcaacattatgttctttgagatttatccatgttgatccttttagctctaattcattctttttagtggatctatagtattctgatgtgtgaagagaccacatttatttatctcttcttctgctgatggatgtatgagggtctttccttttttttcatttttataaacaatgctgcactgaatatccttgagtggctcataggctgaaaatgcatttcttacatgggagtttatgaggcagccctgctgctagtccacatgatatctttgtaccattagaatgaagtttcccttcctcaaaaatgttacatttttaagaaaatggttgcaaaggctatacaaatttacaatgactttatatcaacagtgttctttaaagttttgacatttaaaaaaaagcaatagttctatatgtaggggatgctaccatagaaacctgtagggtgtaaagaggttgggcgaactaatgtgtttaacaggttagaagctaatctaaataaaagtctgtggttagcctatataagaggtttttctagctaaatgcaggggctggggaaattgttttcttcagaaacggtgtgttgcaagtaaagaacacaaggaaagtgtgtaaggcttttgatttttcccaggttacaaggccagtggcwggcccaagtgatgttgtaagggagaccttatccatcagttttcccctttccagaatacagccctcaagactgtctatgtagacatgtatacagtgcgggcttctaccaggctccatctgctaacacaacagtgtgctaagaatgaagagaagttgcctagggaagacaaataagcccttgctctgggaaggaaagtttgaattgtatccagaggaagtagtgagcctcccagaagactgacgctgtaagtcccaatacactgaaataagttcatgttcatccaagttccattggtcctcactagatggctttgcctggggagggaaacaactccacagcaggcaatgcaatgtcttctctattctttatgaaagttaataggggaaaaattctttcctgctttggaaacttactttagaaattaaatttggaagtactcaagagtagaagcctggtggaaattgttggatattcttcatggaagcaattatatatgttgtggtcattaaaaatttgcctaaattaagatgtggtaacatcactctctgtttatatctgtaatactattttccgtcctgggaatcattgggcattaacattaatattcacaatctaaattatacccagaagacaggatctacgatgattgtgtgtatggagaagcctgttaacttctgttaattcttttaagaactatcaggtagaagactaaaaaaattcattttatgttgtgtcgagggcagaactcatgccagtaggggaccattacatgaagacaggttttagttcaacattaagacagaactttccaacaattagagtggctgagtaagagaatgagtgtcctcaggagatcattagaggcctgtcaatagatggcagaaaagcagatgccagattcccatctgccaaagatgctgttgggaggatgtctgctccatgtgggagggtcattccacaagtgcgtacaatcacctgctatttattaagtacctaccgtgcacttgctgtcgtcggggatagggactgttgtaggcacagctgttgtctggatgtgatcatcttccagtcctaaattctgtgaatcccagggagttttagccagggccctgatgaaattttcacaaattccacattagagtggtctgaagtaatgaggtctcacaatgcggctagcctagtggtaatgcttaaccttactcccagcaggaaggatatggcgcagaacaccacttcttagctaagacctgcttttgtccctggatttcagctttggcttggcttttgtgacatgaaagatctcagtatattaaagttagtttcttttctctggttcacttccttctggtcttgaaaattaatataacttctgagctccagatgatgtgtgtcagctttatttagtcaaactctgtcaagataaatatttttgcattggaattgaatctctgtaacttccattcatgacaaaagcatgaattacaaagtggagactttatggaattataactaaatacacttaattctttaaagtcaagtctgcctcaatcacagtgtttgacttggaaacctcctttagtccagtagagaatataaataaataaatgtatggaacagttttgagattagatctggatattatattatgaaggtaacattttggtctgaattctctggcytatgctgaagacacgaccttggctgcctcatggatatggcctgtctttcacacactttagagacaagtgtgttagagtcccattaatgcacataatggctcctgcagctcactgatgcacatgctatcacagtgacctgaagagttaaggtgcgyactccttaggctacttcacataacattgaagccactttgacccagagtagactaaaaccccatatattcaatatttgctttcattaatatattcataaatatacaaaatccttgagtggtcttttaaactgttcctttgttatatagtctggggccctagctatttcttctattggctgaagtttctttgtgtgtgtcagcttttcatttatggaccctgaaattaatccrgtttaaaattatgctcttcaaatatagttcaaataattctgttttgaggaagaaatgtagtacagagggagtctttcatgaaaacaactttcccaagccattgctctggagttgctaagggtgatcagccagcaaagcccaaagtgttcmtttagtatgacatgcaagtattttaaaaagatcttagctggaaaagcaatataattggcaaattaaaaatattaaaatgaaagtttgcaccttctgactagggagaaaacagtgcccttacattgttcctttttttgttgtgttttctgctctgtgcacagtaaagatttgtggcactgcatcttttaaaaaaaatttattttactttaagttctgggatacatgggcagaatgtgcaggtttcttacatagggtatacatgtgccatggtggtttgctgcacccatcaacccatcatctaggttttaagccctatatgcattaggtgtttgtcctaatgctgtccctccccttgtcctcaccctccgacaggccctggtgtctgatgttcccctccctgtgcccatgtgttctcaatgttcagctcccacttatgagtgagaacatgtggtgtttggtttctgttcctgtgttagtttgctgaggatgatggtttccagcttcatccatgtccctgcaaaggacatgaactcattctgtgttatggctgcatagtattccatcatgtgtatgggccacattgtctttatccagtctatcactgatgggcattttggttggttccaagtcttcgctcttgtaaatagtgctgcaataaacgtacgtgtgcatgtgtctttatagtagaatgtctttatagtagaatgatttataatcctttgggtatatacccagtaatgggatcgctgggtcaaacggtatttctggttctagatccttgagaaatcaccacactgtttccacaatggttgaactaatttacactaccaccaacagcgtaaaagcgttcctatttctcaacatcctctccagcatctgttgtttcctgactttttaatgatggccattctaaccagcatgagatggtatctcattgtggagcactgcttcttaatcttggctgcacattgtaatcacacagaaagatttaaaatatactgtcatttgggtttcatccccagctggacatttaaatatcttaatgtctggggtgctgcatgggcattggggattttacaagatctacaggagattctaatatacagataatgcaaagaatgattgatttgagtgctttgatcttctamtattaaaaagaaatctaaaaatttctctgttattatttgtggagtatgatttgcatggaacctagactgcctgtgaatttaagagttgaaaaagtctcagtttttgagatacttcacttggtcttctcacttatgttgggccattgtgagatggtagataatttttctgaaaaagacttcgggaagagtttgttacaggtgcaatgttttcagagcatttcctaactgcattgtttgagaatgtaattctgctgcctttgcacataaatagcaatttatatgtgtctgaaattctttttcttcttcatctcctcctcttctttctcctcctcacaggaggtcacaaagatttaaaaacaagagaaaaaataaaagacatggggaacagattcagaaaatccaaactctgtaaaaatatacttctcttcttcctcctccttttgtttccttctaattaaagttttgctccattttcttctgaacattattgttgtggaagagaagtctgtagatagactgatttttatttctttgtaagtgattaagtgtcttcatgaatgcttataagaatatttatccttgaaatacatacagacgatctctgtcttttcatttacataatcagtaagccatttgcaacaattgtttcaggttttttgtaagctcaggaaaaaattatgccatgatgcctataataattaggtcagcctcatctgtaccatgatctacaattgagaactaatttttacgtatagattattggatttttcttatctagtctccatgtctatgttttctcttatatttaaatctttttacttttctctgagatttggacggatttccaaccctgtcttccactttactgatttgattttcagctatggccaattttctgatctctaccaccaccacagtgattttttaatccaacaatttattttctctatatgttctttcctgatcttatgactgtttactctagtttcataaatacaataagagttcacatactgttgagataaaggggcaaaatttttctaaacatgtgtacttttctagcagtaaatccctttcatagttgatatggtttggctgtgaccccacccaaatctcatcttgaactgtaattcccacaattcccacatgtcatggggaggtgactgaattatgagggcgggtctttcctgtgatgctctcatgatagtgaataagtctcacgagatctgatggttttgaaaatcggagtttccctgaacaagttctcttctcttgtctgccgccatgtgagacatgcctttcaccttctgccatgattttgaggcctccccagccacatggaactgtgagtccaataaacctctttcttttgtaaatttcccagtaatggttttgtctttatcagcagtgtgaaaacaaattaatacaagagtcaattattttctgtaagtttttggagtagttttttttcttatgaggggcagtagcttttcaagggtctgtttttctcttcatttgggaggaatccaggctgtgattttcctgctgatgatgtctgcctttcacatgagttttctctacttcctgtccacgctgatctgtcctccattcttccttcaccctggtgccatctaccctctctcaagcagaacaaaccagaaactacattttttggcaaatggaacacatcttttatggttttcagaggtattacaggttttacttactatatattttgaaatgttccacaggaatatggaaattgggaaaattagctacttgtactcacactaacagattatctaacatcatgataaatctttggagagtattttttccacccagcttacatttacatcctcaggatatagttctatatggaaaattactaagtcaaagaatatgaccttttattttttatattttatttttattttttaatttttaaaaatttccaatagcttttggggtacaggtgctttttggttacatggatgggttatatactggtgaagtctgagattttagtgtacccatcgcccgagtagtgaacattgtacctaatgtgtagtttttttatttctaacctccctaccttcatctcccttctgagtctctaatgtccattatatccttctgtatgcctttgcataatcatagcttagctcccacttataagtgagaacatatggtatttaattttccattcccgagttactttacttagaataatggcttacaactccatcaaagttgcaacaaaatacattatttcatcatttttactgctgagtagtattccatggtgtatatataccacatttaatttatccacttattggttgatgggcacttacgttggttccatatcttttcaatttgtgaattgtgctgcaataaatatatgtatgcatgtgtctttttcataaaaagacttcttttcctttgggttgatacccagtagtagaattgctgaatcaaatggtagatctgtttttagttcttcaagggatctccatactgttttttacaggggttatactaatttacattcccaccagtggtatacaggcattccctttcaccacatccacaccaacatgtatcgttttttgactttttaataatgaccattcttgcaggagtaaggtggtgtcccatagaggttttaatttgcattgccctgatgattagtgatgagcaatttttcatagtcaacaagtttgttgactatttgtatatttgtatattttcttttgagaaatctctgttcatctaatttgtccactttttgatgggattatttgtttcttgctgatttgtttgagttccttgtagattttagatagtagtcctttgtcagatgcacagtttacaaatatttggtgccattctgtagattgtctgtttcaaagtgtatgcacttttaaaagcacttagatatatattatcaagttgatttctagaaaattttctcttaacacttgttaggatattcattttgccacattgtattagtctgttctcacactgctgataaagacatatccaagactgcataatttataaagaaaatatgtttaattgactcacagtttcacatggctggggaggcctcacaatcatggtagaaggtgaatgaggagtcaaggcacatcttagtcttacayggtggtaggcaaagagagaatatgtaggggaactcccctttataaaaccatcagatctcatgagacttattcactatcatgagaacagcatgggaaagacctacccccatgattcaattacctcccatcaggtccttcccatgacacgtgggaattaaagaagctacaattcaagatgagatttgggtggggacacggctaaaccatatcacatattatcaccaataccgaatgttgtttttaaaacatacaggcacacaacacacactttgctaatttgacatgatacatacattaaaagtatrtttttattttcatttacattaaattacagagaaggcaaaatattttatttattagtttatttgaatttcttctgtcgggtttttgtccatgttatttgaccattctatcctggtttttgtgtttagtgtgtattttttaaaaaacaatagccattataataaatgaatgccatttcacctagcaatccccaggaagttatttagagacaatgatgattccaatatatgaaacaaagtcttcaatttttaaatatttttaaatattgaatccattataatcttggctacagttgtacatactttttaaagcttaaaataatattttaagatgcctttatatgaatgacatcatatgaagacagctaaatgagaatgaagtgaaggagaggggctcggagttctgccatctcaactataatactcttatagtttcatgagacacaatttaaaagccagagtttagagctttcttttctgttcatgctaatcaaacactttggtattattttcctgtaacttcatttaccttcagcttcagcaaatcaaatggaatatccccatagctgcttactgcctacatacatacttaaatgcttatatatatatatattctggatatgtgttatgaatttagcagtgataatgaaaagaaacaggctgcttgttgaatcctaattaaaaccaaagttgttttttatgattccttaaatctaggccacactttaatttcacaaacatatcccaaagagaaggcaacataaatacattgtatgatttttttctagaggtgcatgatttatgttctctctgtgtacaaatatgttcatatactattgcaattgtgacaaattgaaggtgtgatattatacattggaatctggagtaaaacagactgaaaaagtttctgttaatggaaaagatatgttttcagatgttgctgaactttgtagtcagcactcaatatatctcagtataaaagatagatataaaaattcttcatttcttgggaaaatgattttttgagcctcattttaatttttcttggtgattttgtgatggtgtcttcctttctttgatatgacctttcctcttcctcattgacccttctttgttcactgttattcttttatctgtaatgcaccattcagcctgacttggaatagttttgtataaataagagaattgtgttatatgctattcaatcttaagggataaaaatgatttttactttagtgaaaagaagcagcaccatgttttaaaattataggcttttagagctggaaggagccatggaaatcatagagtccatccttcttgttttatggattaaaagtgagcgtgcaatcattctrtcataggtaaaggctgctccgtgtactctggggcttgcttcatatatcttgcctaccttatttcctcagattaagtttagccagagttagattaaagtataatagttaagagtacaagtttgaggttaaacaggtgtggatgcagactggtcctctatctttcagctcttagagcttgaataagccacttcactctgccaagcttcagtttcttatctgtaaaacagggctaagtatatctactaaattaagtctttatgagaattgaattatgttatgtttgcaaaatatttggttcagtgcttgatactaagtgttaccaaataagcatccaagaaatggcaatttcttttactgagattcttttgttgttgttgttgttttttgtttgtttgtttttgagacagagtctcactctgttgccaggttggaggatagtgacacaatctcggctctctgcaacctctgcttcttgggttcaagtgattctcctgcctcagcctcccgagtagctaggactacaggcatgtgccagcacggccagctaatttttttttacatttttagtagagagagggtttcaccatgttggccaggatggtctcaatctcttgacctcatgatgtgcctgacttggcctcacaaagtgctgggattacaggcgtgagccaccttgcctggcctacatagattcttttacttgtccacctctcttcctagactgagatttctcagagccaccaagtcttggcaatctctgtatggcccagtgccttcgcatggcatctcattcattgacagctccaagcttccaattacttgagtccaaaatttcagagccatttttgtgtctctctctttttctttttgtatactctcagaaaattaatctgcaaactcctagattcaagccaccgttgtctttttctggattcatggaatttgctcttaactgttctcccatttatccattttgcagcagcgagagttatcctcttaaagcataagtcatatcttataaatgttctgcttagacctcttcaaaggctatccatctcacatagagtaatatcaaacccttaacagtccagcaccatccccttcttattcagtctctttgacctcatcttcagttgacctctctcacactccacaccagtcacacttgcctttctgctgttcttcctgcagttctttctcaacactccacccatacaactgccccgagtgaggagtagagtcagatttttaaagaaagatagtttgtggcaggaacagaaaaaaaaaaaaaaataactgcatatgctcagttataagtgggagctaaacactgagcacacatggacgcaaacatgttgtattagtcagggtttcctagagggacagaactaatggaatatatgcgtgtgtgtgtgtaaatagcaaagacttggaaccaacccaaatgtccaaaaatgatagactggattaagaaaatgtggcacatatacaccatggaatactatgcagccataaaaaatgatgagttcatgtcctttgtagggacatggatgaaattggaaatcatcattctcagtaaactatcacaagaacaaaaaaccaaacaccgcatattctcactcataggtgggaattgaacaatgagaacacatggacacaggaaggggaacatcacactctggggactgttgtggggtggggggaggggggagggatagctttaggagatatacctaatgctaaatgatgagttaatgggtgcagcacaccagcatggcacatgtatacatatgtaactaacctgcacattgtgcacatgtaccctaaaacttaaagtataataataaaaaaaagataaatatccaataaaacttttttagtttaaaaattttttaaatatatatacacacacatatatatgggtgtgtgtgtatatatatatatgagtttattaagtattagctcgcacaatcacaaggtcccacaataggccctctgcaggctgagaagcaaggagagccagtctgaggtccaaaactgaagaacttggagtccgacgttcaagggcaggaagcatccagcacgggagaaagatgtaggctgggaggctaggccagtctctcttttccatttttctgcctgcttatattccagccatgctggtcgctaattatatggtgcccacccagattaagggtgggtctgcctctcctagtccactgactcaaatgttaatctcctttagcaacaccctcacagacacacccaagaacaatactttgtattcttcaatccaatcaaggtgacagtattaaccatcatacatgggaacaatagacactgcagactatgagaagggttgggggggatgggttgaaaaatacctatctggtagtatgctcatgacgtgggtgatgggatctgtaccccaaacctcagcatcatgcaacatatccatgtaacaaacctgcacatatatatcctctatctaaaataaaggttgaaatttaaaaaaagaaaggtgggataggtgccatggctcatgcctgtaatcccagcacttagggaggctgaagtggatggatcatgtgaggtcaagagttcaagaccagcctggtcaacatggcaaaacccctgtctctactaaaaatacaaaaattagcagggaattgtggcacatgcctgaaatccaagctactcgggaggttaaggcaggagaatcgcttgaactcaggaggtggaggttgcagtcagctgagatcacaccactgcactctagcctggtgacagagcaagacttcatctcaaaataataataataataataataataataataataayaataataataaaagatgtagtatacaagtacaccacaagctagctcctgcaatttaaatgggtgttttgtagtctgtctacttgctttcatatgggagtagagaacacttaaaagaaaactaacgtgaaattcaacggattagaaaaaaaagtgcaaaactaaaggaaagtgattctttagtaattgaaggtggtctgggacatcctaccatgcaaggtagtgtatcggaaattggtgggttcttggtctcactgacttttagaatgaagccgcggaccctcgtggtgagcattacagttcttaaagatggtgtgtccggagtttgttccttctgatgtttggacatgttcggagtttcttccttctggtgggttcatggtctcgctggcttcaggagtgaagctagagaccttcacggtgagcgttacagctcttaagacagtgcatctggagttgttcgttcctcccatccagagttgttcatttctcccagtaggttcgtggtgtctctggtctcaggagtgaagctgcagacctttgcagtgagtgttacagctcataaatgcagtgcggaccgaaagagtgagcaacagcaagatttattgcaaagagtgaaagaacaaagcttccacactgtggaagtgtacccagttgctgctgctggcccgagcagcctgcttttattccgttatctggccccacccacatcctgctgattggtccattttacagagagctgattggcccattttacagagagctgattggtccattctacagagagctggttggtccattttgacagggggatgattggtgcgtttacaatccctgagctagacacagagtgctgactggtgcatttacaatcctttagctagacacaaaagttctcctagcccccaccagattagctagataagtgctgattggtgcatcaacaaacctggagctagacacagaatgctgactggtgcatatataatcctscagctagacataaaagttctccaagkccctatttaactcaggatcccagctgacttacccttgtggatcctgtgctggggccatgggcggagctgcctgccaatcccgtgccttgtgcctgcactcctcagcccttgggcggtcgatgggactgggcgccatggagcagggggcggtgcctgttggggaggctcccgcctcgcgagagccccacagcggggggcggggctcaggcatggcaggctgcaggtccgggcgggaggcggctgaggcctggcgagaattccagcgtggcaggtgtggaccggcagtgctgggggacccagcgcaccctccacagctgctggccgggtgctaacctcctcactgcccagggctggccgcagcagccggctgttccgagtgtggggcctgctgagcccacayccacccggaactcgcgctggcccgcgagtgccctgcgcccgcgcctcttcctccacacctccccgcaagcagagggagccggctccagcctcagccagtccagagaggggctcacacagtgcagggactggccaaagggctcctcaagtacggccagagtggacgctgaggctgaggaggcgccgagagctagccaggtctgctagcacgttgtcacctctcagtaggaactgggcttctagttccattacccaaatagtgaacattatacctgattggtaagttgtccaccctctctccctctaccccccccccacccacttttggagtgccaggtgtctattatttctatgattatgtacatgtgtacccattgtttagctcccacttctaagtgagaacaagggcatatttatctttgaaaatggactaaaatttttacactatttgttggagggaggatatagactgagattgactcttttgaaatgtaattcacttaataactgtgtgtgcaaaaactgttagaaacatgactttttgtggagcggtgatagtttttatggtcttaggggacccctgtgatgcaatgaaaagaaacttagatttaacccaagaattcgagaccaaaaagatgtcaccataaacaagtcatttgagaccattttgtcatgatttgtgaaacggggtcattgcagctcttacattctatacagtgttttgacttttggctactttgaagaaatcacaatatttcaacctataaaggactcttctatgcttctgattatartggaagttgatcctttgcaatgaaattaacctgatgacctgtatggctctggtagtttgaaggatatgagcaaaagggatgatacctggagggtccacccagacagttggacaatgtcctttggaggacattattgtgactggccacagccacgatcctcagctttgtttgctcagaaactaaagttttgccaacattcttagagaatatccatttctcctgaaatagactcatatctagcaactctcaagacaatgatatagaaaccaaaatgtcaatttataaatttatgatttaaaatacaactgtcaaggacataggacatttatgtcagtwagacatatctttctggaagacgtctatatacgtgagcagragtcaaaaaatggccagatgatcacggcaggacagactaagagcattgtaatcttgcagtcagatgcacccatctctgttttatggttatttctacttgggggcacagaatattgcactagttgcccagggcatccagtgcttggatgtgctggatacatattgacaaatctcccaatttcctatttggatggcagaacgtctcctttctcttgctatatcctgcctttaggtgtagtcgtaccttcattttggctctggtcagctctgtcctgtactagaaaaaagtgctgttcgagaggatttctgcagttgtctgctctcactcatttttgtacggctgatgcttttctaattcactgagttctgagcatgccttttgttccccttgcctgtgttccatccacatcgtactgcaggattctgtttactgtatgtatgtatgtacattttggcagtaacaaaaggaattctcttcaggatctgcattcccaaagcatgagttatctcccagcctaaatgctgagggaggggatgggaaattagatggaaggggatgaagggaagtctgaggggagtggctactcccaaagacagataatttgtctttgctttgtccttgctgggctcaaaccttgaaggatggatgtttggtatttacttaacacttgcagtagtcttggactctctttttgcagaccttgaatatttaccccctcagggaaaacttgattctcaagagtaaaatgaattatctatttagctaattagctagaacatagcaaaattctcaggaggatcatcccatctgaggattgatacaatgtatgcttgtatttgcagagcctatctcttttcattttctggcctgcccgtcctatcgctcatgcttcacagagaagggaaaattgtccagtaagcaaaacctctttttctttcctgcacttttctgccttgcttctcttgctgtgcctcgtaacttctgatgctcatgggtgacctaaggcacttgatctttgcattttcctgctctacagattacccatttcaggaggtgcaatgtgcttaccccacaacactcaccaagactgacattctctgtacactcttcttctcagatgccacaatctgcaatcagtgaacataccaatatcttgaagagtagaagagtagctaccaggggcagggagatggagtggaggttggagatgttggtgaaaggatacaaaattaattgggagaaataagttaaatctattgtataacaagatgacttagttaatgcattgtgttcttggaaattgctgagagtagattttaagtgttctcatcatgaaaaatgaaaagtgtaatggaatgcatatgttaatcagcttgatttagccattccacaatgtatacatatatcaaaatgtgttgtataccataaatagatacagtttttattcatcaatttaaaaaagagaaatagtgtacaaaactacactgcatgggtcctgcctgatgcattgtttactcagaaagtggcatttccttctctccccgaaaacagccagagacatagcctaatggagtagttaagaacatgaacttagagtaagactgcctgggttcaactcctggtctccccactttggggctagtaagcaagggcaaggtaattattaataatctttctgtccctcagtttcttcatctgtaaaatagaggcaataatagcatttactccggggattaatgaggaagagcaaggacaagaggcaggagatgctaagagcagagagtggaggattggaggctaggggctggttatacacgtctcacctagtaggggccttttgaagatagacttcaagaagctgagggtacaaacatctgaggaaaagcttccagaaagagggaagcaccagaagaaagtctctgagttgggatctggcttgacatggcccagggacagcaagggagcccctgtggctcaagtggcgtgggtaagggggaagagtatgagtgmgcagtgagaggtcaccagtgggagagaggaaacctggatgatgagattccagaggaccaggcagacctttaacaacaatggcctctactttgaaataggagcttttggagggttttgtgcagaggagggacagaatttgatgtacattctaagtggatctctggctgctcccttgggaagagatttggggagtgtgttagtttgctatggctgccattacaaagtacgaaagagtaggtggcttaaaccacagaaattaattttctcacagtgctggaggttggaagttcaagatcaaggtgctggcaggattggtgtctggtgaaggctttctccttggcttgcacagaggaaaggctgtgagtggctgccttctccctgtgtctttccatggcatttccgctgttcttgtgcatcctggtatcacttcttctttttttaaggacagcagttttattaggttagagcctcactcccctttttttttttttttttaagacagaatttcgctctgtcgcccaggctggagtgcagtggcatgatctcggctcactgcaagctccgcctcccaggttcatgccattctcctgcctcagcctcccaagtagctgggactacaggcgcctgccaccacgcctggctaattttttgtatttgtagtagaaacagggtttcactgtgttagccagggtggtcttgatctcctgacctcatgatccgcctgcctcggcctcccaaagtgctgggaggcgtgagccactgcacccggcccagaacctcactcttatgaccttatttcaccttaattaactccttaaagggcatatttcccaatataattacattgggggttaaggtgtcaaccatatacatttctgggagatccagtttaatctacaacaggtagtatrttggttaattttatatgtcagcttggcttggctatggtgcccagatgtctggtcaaacactagtgtagatgttgctgtaaaggtgtactttagatgtgactaacatttaaattagtagactttgagtaaagtaggtgaccctccataatgcagatgggaattgcccaattagttgaaggccttaagagagaaagactaaggtctctgaaggcattctgcctccaggctggctttggatttgggctgcaacatcaacatttccctgcaaattttggacataatcatgtgaactgatttcttaaaataaatctctaatattatatctagatttttattaaatgatcataacgtttaattccatattataatatcacagtgtgcatattatattatcgattgggttatttacatctgtcatagaaggcattttatattctacaaatgaactgggatcccacatgagagaaacaaaatgggcagtttttctaagcatggcatgtataggcttatgttttgttgtgaacttggtcccttctgcaaggttttaaaggcacataatattcagcagactgtgattatagctgaccgagaaccacacactgggctcttagtagcttctcaatgcatatttcataaatacataagtgtgagggccatggctggttagaaaggaagctttaggggccctcagtgtaatgaaagctgccagtgaagcatctttagcccattgcatgctctctccttggggcagtggagggtttgcgtcttttatagttttaggtcctcaaggtgcatcactcatcctctctctgatgcctgtattcatggtaagtttattcttcargaaattgtttttcaaaagcctcatactgtgatggttaatattgagtgtcaacttgattggattgaaggatgcaaagtattgttcctgggtgtgtctgtgagggtgttgccaaaggagattaacatttgagtccgtggactgggagagacagagccagcctcagtctaggtgggcgccatctcatcagctgccagctccccttgaataaatcaggcaggagaagatgggaaagcagacttgctgagtcttccagcattcatcttccttccatgctggatgcttcctgcccttgaacatcaaacttcaatttcttcagcttttggacatttggacttacaccagtggttttgccagggcttctcaggcctttggccacaggctgaaggctgcactgttggcttccctaattttgaggttttgagactccgactgatccaccactagtttccttgctcctcgacttgcagacggcctatcgtgggacttcaccttgtgatcgtgtgagtcaattctccttaacacactccctttcatatgtacatatatcttattagttctgttttactagagagccctaatacatataccttagttattttgaggaaggagacagaacccaagatttattatttttagtagtgagactttggacaggtagcctaacctcttacactgaatttcttcatttgtaaaatcgggatgacatagagacagaatgcaaatttgttgttgccatgggctgsatgaagggaagagtgagcagttaagaattaactgcttaatgggtatgacatttccttttgggacaatgaaaacatttgggaactagatagaggtggtggttgcacagcattgtaattatactaattcactttaaaatggtgaattttatgtcaggtgaattttacctcaataaaataagtagatgataatagtactcagtttatagggttatgagacttatggatgttaaatacttagcatatgcctaatactcagcacatggtaaccaatcgaagaatgttggtctcttctttctcctcctcttcttcattgccactgttgtcattgtcataaccattctggaaccaacttctttttaaataaaagtgctaaccttcatctattgtcactcaaagggcaatactgggatataaggctggaaataaggctgggactatgttatgcctacctgagagagggagagaatgtacgtagtacagcaagggaccactaaagatacttgcatagaagatcaaagggartcaagctgtgctttcagccaattagcctggcagccatgggtctagtggtttgaagtggaagaggctgaaagagggggacacagttagcaggttactctcaacagggtcgttagatttccctttcttatttcctcctcagtcaccttggatttggctggctacatagcaaacgcttaataaatacttgtagattagttattttacacttgtttaatgcccttctttgaagtacttccagttgagattacttctacaaatcatataatacaagataaaataccctatatatctgtcagttttctctaagactgttttctaagtattatatgtgcttggttcatgggctgggtattcagttgctgaaaaaatagaaatcactccattagtcatgcctctgcaaatttcacattttatattccaagtctgtggtaggtgatatttaaagcatttttttttgtttgtttgtttgtttttttttttttgcttgctgttgtatcactacaactgtatattgcttgtggacattttgatctcagatctcaagaaaatgatgatgttccatttgttatcactttaagggaagcacaaaaagaccttaaagtgaaaaacacagcttaattagcacgttggtgatttatgttacccagtgtgaaatctccattagtaccaaaagaaggatttttaaaaaggcatcttctgaatttttaaattatttttggtcttatttagaattcacaatcttatttccatgtctctaatctgcaaatcccaaaatgtaacatcattgtctcaaagttattgcatttcacaatatcatgcaaaggaacacagctgcttattgtttaatcaccgaggacaaatgtcctctgtaccattttatatgcaggtttataccttgatttatgtaatgcaaaagctcttaaacatcatagagttttagaatttgaagggactgctaaaattttctagttattcttgtactatatattgttgagaaaatcctaatagaaacacttaaaaaatttatatcaattcatattttatttaacacattatctacatatattmtaaatatttgagcatctttgtactagactgaacagtcaacctatagactgtacatatcagatacagctctttcagttaccaaaacttagaatctggtttaagaaacggggaaatttatttcctcaagtgactgaaaagtccaagaacaactcttcaaattagcaggacccggaggctccaagggatgtttcttttccatctcgtggctcagcttttatgtggattttcaactcctaggctctctctgtgtggctgttacctgatccgggcttaaatcctttaggttcaagaccagagaaaagggaaaaacttcctgtcacttctccagccaatcgttggcttacctctgattagacagtttgagtcaggagtccatctttagagcaatcactgtgactttagttttagaaaagagtgattgacctgtaaaagggtttgtgtccgtacttgaactcggagcccattgaaatcatgtgcactgagtgtgaacagaatggtttttccagagaatgtggagtggctgttggaagataggtgtaaggtaggcaaaaccattgtatggctgtgagacagtcacaagtggattccaggatatcttctggtaataacagaatgggaaggagaagatgtaaggaagaaccctcccccaaaagactgtctaagtctatggattagcacccctgtttataattcaactttttcatgaagatgtaacctcagaaaaactaagtggcatgcccatggaatcacagttaraaaagtagaggcagtttaacaccattctgattatcctccaacagagaaggacatttcttaggttattcatatatatgattaaaaataaattgtaaatttttgaaagtgatagttttgcctaatttcaaaaatttgcataattaaaaaaccacaaaaataaagtaagcaaatactcttattctctctctctctctgtgtgtgtataatgagaactgtcataaaaattctgttgaattattttgatttaattctataaaaggaaaacttaatgctattcctatttaatcagagtctctgataatgtcatttttttttcttttttaaaatactttcaacttttatcttagattgagagggcacatgtgcatatttgttacatgggtgtattgtgtgacgctaaggtttgagatataaatgattctatcacacaggtactgatagcatagtacctgataggtactttttaagcccttgcccctctctcccttccctcttmtagtagccaccaatgtctactgttcccatctttatgtccataagtactcagtgtttagcttgccgttayaagtgagaacatgtggtatttggttttctgtttctgtgttaatttgcttaggatgatggcctccagctacatccaacttgtagcaaaggacataatttcattattttttatggctatatagcattcatggttcatatgtaccacattttctttattcaatgcactgtggatgagcacctgggttgattctgtccctttactattgtgagtagtactgtgatgaacatatgacttcatgtgtctttttggtagaatgatttattttccttagggtacatgctcagtaatgggattgctgagttgaatggtagttctgtttttagttctttgtgaaacctccaaactgctttccacaattgctggactaatttacattacatttccaccaacagtgtacgagcgttcccttttccccacagcctcaccaacttctgttattttatgactttttactaatagccattatgactggtgtgagagggtatttcattgtggttttgatttgcatttctctgatgattagtgacttggtttggctgtgtccctacccaaatctcagcttgaattgtagttcccataactcccatgcgttgtgggtgcgactcagtgggaggtaattgaatcatgggggtggttacctgcatgctgttcttgtgatagtgagtgagttctcacaagatctgatggttttataaatagtttttctcccccacctccctctgtacttctccttgctgcgttcatccggagaaagatgtgtttacttccccttctgctgtgattgcaaatttcctgagacctccccagccatgctgaactgtgagtcagttaaacctctttcctttataaatcacccagtcttgggtatgtctttattagtagtgtgagaacagtctaatacaattggtgatactgagcattttttgtatgtttgttggcctcttgtatgtattcttttgtggagtgtctgttcatgtcctttgcccactttttttttctttttttgaggcagagtcttgctctgtcacccaggctggagtgtagtgatgctacctcagctcactgcagcctcggcctcctaggttcaactgattctcctgcctcagcctcctgagtagctgggattacaggtgtgtgccacaatgcccggctaatttttttgtatttttagtagagacggggtttcaccgtgttagccaggatggtcttgatttcctgaccacgtgatctgtctgcgtcggcctcccaaagtgctgggattacaggcatgagccaccgcgcccagccctttgccaactttgtaatagggtcatttgtttttttgcttgttgagttgtttaagtttcttatagattctggatgttcgaccttttgtctgatgcatagtttgtgaatatttttctcattctgtaagttgtctgattatgctatcgagtaagcagagttttgcacattgttgtacaaaagccctttagcttaattagagccaatttgtcaatttttgttttagttgtaattgttcatgaggatttagtcatacattcttcatcaaagctgatgtccaggatagtatttcccagaatggtatttcttctaggatatttatagtttgaagtcttacatttaaatctctaattcatcttgagttaatttttgtgtattttgaaagggtaagggttaagtttcattcttctgcatatgactggccagttatcccagcaccatttattgactagagagccctttcccctttcttatttttgtttactttgtcaaagatcagctgattgtaggtgtgcgtgcagctttatttctgagttctctaatctgttccattggtttatatatctgtttttgtactagtgccatgctgtttttgttactgtagactacagtttgaagttggataatgtgatgcctccagctttgttcctttttcttaggattcctttggctgtttggattcttttttggttccataggaattttggaatagttttttctaattctgtggaaaatgatgttggtagtttgagaggaatagcattgaatctgtagattgctttggaaagtatgttcatttttatgatattaattctcacaattcatgagcatggaatgtttttccattttttcatgtaatctctaacttctttaagcagtgttttatagtttccttgtcgagatcttcaccttaattggttacatgtattcctaggyattttattctttttgtggctattttaaatgaggttatgtccttgatttggctctgagcttgaacattattggtgtataaaaatgctactgattttgtatgttgatttttttatcttggaacttcattgaagttgtttatcagttctaggagccttttggcagagtgtttagggttttctaggtatagaatcatatcatcagcaaagagagataatttgacttcttctcatcccatttggatgtcttttatttcttcttgttgcctgattgctctggctaagacttacagaattatgttgcacagacgtgttgagatttggcatccttgtcttgttccagtccttaaggggaatggtttcagcttttgcccattcagtatratgttgcctgtggggttgtcatagatagtttttatgattttgaggtctgttccttcaatgcctagtctgttgagggtttttatcatgaagggatattggattttatcaaacgctttctctgtgtctactgagatgatcatatagattttgtttttaattctgtttatgtggtgaatcacatttatggatttgcatatgttgaagcaaccttgcatcccagaaataaagtcacttgatcgtggtgaagtaactttttgatgtgctgctggatttggattgctagtattttactgaggagttttgcttctatattcatctgggatattggcttgtagttgtctttttttgttgtacctttgccaggtattggtagcaaattgatgctggcttcatagaatgagttagggaggacatgaagaggcctccaccccatgatgacatttttaatgcacaaaattttcactgagttgttttgacaatttaggttgcatgtgtggaaagctacatttgcaaattctttgatgatctacaacctgaattacattatttacataaaagccattcgttttagtgtaagggacttcttgcaggcttttccagagccctgtaatttgctttccttcactgactggctgtcactcttctgtgtggcaggttcccaatgggctgcctcttttgggtgctcatagtacagccctcttyacacttgccctacacagtctgctggcccagaatcatggctcagttttgacctctgcctgtcagcttcaacccacagttggcaagccacccaccctgtctccccttgctacagggtcccctcgctcattgagtggcycttttgggagtgcttaaatccatctgtacactgacatctgattgacatataggaaaatctccatatgctygccatggktaattgtgggggtgcagtctgccccataccactgcctgccttacctctgctgcccaactcctgcatttcgccctacatatttgcagcattaagcactctgaagatcccattgctcagcccttcaggcaagaaatgatcaccagtccctgacttagtggaggtggggagaacatttgggtcccctcaatattatakaaggcagtggtggagaagtccaagaagaaaggatgtcagctgctccaaaaaactgttataaggtgacctctctaygcctcttattctagccagatctactgagctggatggaggttgaggtggtgatcatggtggtgagtgttgaacaaagctcccaaatgaagcaagctctgtggggaagtgcctgcctttgactcctgacagttctctaaacttaggaagtgcaggagtcagtgcctttttggtcttaactatgattgctgcaaaaataagattccaccttgcccctaaccccatcctaccatacaagtcctgtgtagatgaagcaagcaggtctaaaacctcttaaagtgatgataattttatcaaataaactgactttactctctgcctgccaagttttcccttcagaattgtacccatttgtcaatctgtccaaaaatgtggtattttaagtgatgtttttccttctgatttaatgcagtaaatataaatttgtgactataacctatgagccaagtgctgggctaggttctagagattcaaataacaccaaacaacataagggtccatctattgggctttctctcaggccttgtactcatgttatatgaatgttattgctaattcttaaatctgaactgcaagatgagtatttttcgtgtttttatgatatgrcagtggaagcataragaggtttcataactttctgaaggttttatatccaacaaatttggaagtcagagcctatttccactatatttactataatatttcttaagaaattggaataaagacatagctcttgccttcaaggcgctcaccatctagtgaatttattagtgagtacccaaccaaaaataacagaaacctgattgtgatactgtagtccttgaagtggttaacaaaggaaatgaaagtctaagagattccagctcagttgtcaagggtaatttcccagagggggtctcaaataggagtgtttattctatctttggattcctagatgatgaatctgagaacagaattgagtgtatgtgatagataggctggatgtgtagaggcaagctgaaatggacggctgcttcactacagccccacttaggagtggccctagaaaaagccatgtgaagacagggaaatccatccaactggcagagctttgggtggtctacctggtcatctgcttggtgtgaaaagagaagtggcctgaagtaaagtatatgcaggctcatgaacagtgataaagggtttggctggttagtcagacatcaggaaggagaagtctttgcttctgctggcagtcaaggggtccctttgttcctgaaatatcagctctttcccaaagagttttgtctcaagatgcagtctcagactcatcttccttttcttgttactatttcaagggtcatcatgaaactttagtatttcaatctcaggctaatcccagtggtaggtcaagcctggattgctactttttttattcttcctgttgctctaattctgactctatttgtatggccctactattggcattttggactargttctgggcattccagcctgtgtcctgggaactcccacagtggccgtcacagttcctacagccgcttctttctgctcagttctcctttgtgtatatgagagagtgtgggtgtgttcttcggatctcctttgaagctagcaatgcaatgtgtgttcaagaatgtatcatttccaggttaactgtggtgtaggaagcttctttaaaacacttagatattcrtaattatgccccattctgtttttgaacccattctatagggcctttgcacccactgcttcaacaaagcatctcttacaagaaaaccaatgacctctaattgcccaataaaatggtgattcctgagtccttgtcttactttatctgtaggaagcaactgacttagttgttccccttttccttgaaatactttcttcctttggcctccaaggcacaatttattctctcttaattctcctcttgcttcacaggcagcttcttctcagcttctttagcctatctctctcttcttgacctccaaacactgaactacatcaggattcagtctccagaaattttctttatccatgttcactcccaagataatctcagccagtctcatggctttaggtaactctgtaagctgatgattctcttttctataactccatcaaaaactcttccctgaactccagacttgtacattcaacttcctacccaacgtttatacttggagtcctagtaaacatctcaaattgtaacatgttctcaaggaatttgaagaattgtctcatagtcttctctgcccaaataaatgatacttctagttgctcaggctaagaatcatggagctattactgactctttactttatatcatacacatcagtttctcctaaatctgtccagaatcctgactatctccattagtactacacttccacttcaccatcatcttttgtttggactattgaaatagaatcctaactaatctacctgttctatatttgcttcctagttgtccagtctttgcatggcagccaagttagatcatgttttttctcttctcacaacacttctaatggcttttcattgcactctgagaatcagatccaaaatcattgctgtggcctacaagacccttaactgatctagtcctcactacctctctcccacctgctgtttcattcttcctctgctcatttaaatctaacctgggattcttgttgttcttgtacatgtcaaaaatgcttcttacctgagggtctttgcattttctgtttcctctgcctggaatgctcttaccacatattctcaggatttgttccttttatttattttttataacttttatctcaaatgtcattttatcagcaaggtctttcttgaacatttcatgtaaagtaacatcttctgacaatcttagttcttaccccaatttcttttttctttatatcatctatcaccacctgatatatacatatctgtacttgtttattgagttttctcccacggacttttcctgtttggttaattgctatactcctgcagtcagggcgacacctgacaattggtagctcttagtaaatacttgttgacttaataagtgaatgacagatgaataaattaagggtggatatagtaaaattgagacaaaacacagaaacttatttcaaagtttctgttgactggttttaaccaaatgcaaatttcaaatccctgacagaaaagccagctcctctcttaattttgacacaatagttttgactgtttccattttcgtaaggaataactagggarctgtacaaatgatgagaagccctgtgggcatttggtaccatacatcatttcttctttgctgctagggctgttattgcattccacatttttactcccacacgctcatgtgatggaagctacaaggccagactaggtaactggtaagatctccttttgctctaaaatgtataccctgtgcatttcttttccttccattccactctgtgtgcatttagtgcagacattgttccttttcgcctcatctgtattgtttgcctgctcataacttgcagatgaagctattgtgggacatgatttggaagactgatcttgactatgtctttcaaatgtsagttaatggtggctgtagaggctgctaatttaggaatatgattcggatagtgtggatgatgcacctgttgttcagactaaggctctgcttgaggctatcagttttcatctgtagagccgtgtggagtttagggctccgaaggccattaaaaatggctgctttccgtttagtcaaagagatttgcagaggtgatttttcagttagtctctgaggttgttgacagaaaacaaggggacagggctctttctgtaaacatttctcaccagaatttttagcctctcattcctggcataagatttttgttacatttttgcctaaaatcaatacacttagatttctctgggtctaatagaattatgtgtgtgtttggtttgtgtttttgtgtgtgtgtgcgttgtgttgttttttcccttttaatttacatagcgtgggagaaagaagatttttatggctgggatgacagaatgtttgggttgagcacatgtccagcaaagaaaaggaaagaaaaaaaaatataagccctaacttagaaggagaaagtttatttagaaatagaattaacctgtcttgaacatgataaatgccatacttttcaaaggtttgttatagaattgatttctttccatatgtttctagtggtttaatttgattggcagaagaaaatgttgccatttgatataggagaagttatttttaatgcacaggactgtaggtgtgaattttatttgtgttaataatgttgaataaacgcatttatgtgttgggtttatttctggctactgtgctactacataatttgattgttcagttttcagacatggatttaaatctttacacagctgggaattagctagtcacattgtatttgcttctgcttatggaatcaggaaaatgaccgaactaaggaagaggagctatttcaaggttttcttatctttctttaaagtacaaaaatattttctgtaggaacttcttaatgagaagcaacttaactctttccagaaatgtgtttgaataacaagtcttctgacttttctgtttaattgctacatattgctaaacagaagatgtaatatgttttctatattttctttaaacctatttttattcttttaaaagagattaaatataaattaaaaattggcttttattacattataaaactattatcttcaatatttaccctgacaattataattttcaatcactgatcttcaagtactcaaacttgtgaaatggttacaggggtaatgctgtttcaataatactaaatgtgtagtattcttatatactaaagtagacttaaatttttgtagactgtaaaattatttgatcaagttgcatagcttcagtgacaattccagttaattcaggcaggattttaatttactattctacatcttaggctaastgttgcccaactccagtggagttaagactatgaggctttagtatacatatacttcgattttgttttgaagtcctcataaaataagccacctttggctcaggagtaaggtaggcttttttcctggcttattttattactgatttgttctatggatctgttagggtttaaatgtgtgtgtctccccaacattcatacgttggaatctaagatccaatgtaatggtattaagaagtgggcctttaggaggtgatgaaggtaggagggctccacactcatgaatggggttaacaacctttcaaaagggctgaagggaactacctagatcttttttatttgccagtcctttcttccactatgtgaggaaacagcaagaaagccttcactagacaacaactactggcacctagatcttagacttcctagatccagaactataggaaataaagttatgttttctataacttacctagtcttaggtattttgctatagctgcatgaatggactaagataagatatgactgcacgtttgtctaattggataccaaaacatgactagagcttaaatggttggaattattcaatctcaaagagttagtactcatggatagtagagctaactcaccaatattcagtccagctgattctcaacagggatgacaaaaatttaatcaagaatatcaatcaacaaaaaaatatctattgagtagatgatcctggtggtatgaaagtgaacatgaaacctgtctccaaggagcataaaattaaattgatgagaaaattatatctaatacttacctaatgctcaagcatatgaaaagttacttagctacatagtaatacaaactaataataaaatataacttaattgccaattgagggatataggggatacaacaaatgtcctgagtaaatttgttttttcaaacctgagtaaatttattctctcccctgactttttttttaatcccacttcttgggttaaggtgggttgttgcatataaataagcaagaacagtaaatagtatcagttcacatttactgaatggtttctatatgtagggcacaggtttattacctcatttgagactgctaaatctcatgcaattatccccatttcacagatgaggaaactgagaacagaatatcttgttgaaggctgcacatctggcaagcaccaagactgagatttgaatctaagcagtcaaggcttagtgccagtggtctttgccactactccatcctgcccatccagcatacctgatcctgtggtgtatcagagagggaaatctgaccacagagagccagcttctttcttgctgcaagtttactttcacagggctccaattagtacactgaaagagctcatttactaaacgggctctgagtaattggctaatgggcttggggtgagtggtgtcctccagagggctatttcctcgggctgacatatcgggcagtcaagcctgcagttgtttatcccactccaggatcacacattaatgctgctggaaaatgattctctatttaaaactcaaactgggtgaacagagcctggytctagctttctttctttcttttttttttttcttccaacttttaggttcatggggtacatgtgcacgtttgtcacatcggtagattgtgtgtcatgaggtttagggtacgaatgatcctgtcatccaggtagtgagcatagtggccaataggtagtttttcaactcaggactcggagcccagcaaggtggtcctgggtgtactagggtgtaagcttttaagctgggggtggggtggggaaatagttctcacctttcatttatgggtgaaaacaatgggggcttgtgtctgggttttccctcagttcatgtgctctgaaagaagcatgcctcctgtgaaaggggccaagtcactcagctttaccactctgttgttctaccaccattatcctagatcctgcccaaaggggaaactgtaacatgtagatcatttgtcccaagtgacacagtttattgctgccacctctttgtaccccatgtgtttcttctataaaatggggctaacaataatacccaataatacctaccctatggggttgttgcgagtgttaagagttgataaaaataaggtacttagaagaatggccaggccacaataggcattcaacacatattagctatctcattattattttttattattattctttgtatcagatagtgcagtggaaaaaaatgggctttgaaaagagttcaggttctgattattccatttactatgattgggagcttgggcaagtcacttactctttcagcttagagttctcatccgaagtgagaaamacaccaacttcacagggctgtttaaaggaatagtcacaaaataattaacatctatcaatttcatttgcaaactgtaaagcttcatgttcattatcatcattaattccctaaaactggttcttctattgaattctcttttgtattaacccaatgacacaactattaaactaggagtcatcttaagctcttttttcccattagttggcccttaagatttgttgatatctmtagcatctggccacttcttcmtattccgttgcaacttccttaagatagggctttagcagcctcctaattggcctcctgcctccagtctmtagtctgctggcaggatgattgttcaaaagtacaaattcagtcttgccattccctttcttaaaactccctagtggttcctcattgccytcagtgtaaagttctgatgtcttagcatggcaagcaaggccttccatgccatggcttccattaacttccttagggttgctgataccttttacctttgtcacaccaaattaaatatagctcccagaatatatctgttacggttcacttcatgtgtccacttgactaggatatgagatgcccagatattttgctaaacgttattctgggtgtgtctgtgagtgtgtttctagacaagattcacatttgaattgtggactgagtctagcaggttgcctccccaatgtgggtggacctcatctaatttgtccaaggcacccgtagaataaaaaggctgagtaagggagaaattgctctttccgccttactgtctctgagttggcgacatccatcttctcctgcctttgcattcaggctagacctttcccatcggctccctcgggtctgcagcttgctgactgcagatcttgtgatttctcagcctctataatcacatgagcgaattccttattaaaaatctctctctccctcatatatatttcctattggtttcatttctctggagaaccctgctgatacagtgtccttgtctctttcttgtgctttctggccttttccttcccatcctcttctacttacccttcaagattactctagcatcttacatctagcacctactccaaagaaaccttctctggcagtccctttcaacaccctggctgagttaaatgtccctcctctttgctcccattgcacccagcccagtatttgctctgatctgatcacatggtactgtagctgctcctttatgcttctgtccctttatggaggaaaccttcaggattctacttatttctggattcctagtgggttgggaaaaaaaacaataaacattgattgaatgaaaaaataaacattataattaataaaaaataagattatgtagttgcctttcaagaactatgtccaaattgccaatttgctctactcaacaagaagagaccctacttgagatttattactaaataaatgactttgagcaaatgacacaacctctctctgcataagttttgtcaacttgtaaaatgggactacaaatagtatctgccttataggacagtatctgccttccttatttttggaaaacctaaatgaaatatgcatattaaacttttaaatcaatgctttgctgcttggtatcctgtaaacacccagtgaatgtgaatttctactgtcttattagctccaaaattggagtaaacttaatccttcattcaagatagttgctattagacgtggtcagtgaaattggtgggagagctggtctatggattccctygaccccactgaagtagctcataatagaatgcatttactaaaatccaacaaggtaaatataaggtaaaacaatggaactcacagccttaaagagtcctggcatgacccagaggaaaaaaaaatgttgatctcctctccctctgtctgatggttttctctgccctgcagttcacagtgaaatacaaggtttttaattcccatgcacattttctaatctttctccctttctgcttatgccttttaggaatatttttgtctttttaatattcaaaaccagaaaagaataactgatatataaaagacagggaggtcaaataaggagagatgctagttggcatgtcactgtcagtcacatgctcagtgcaaggcacctgtctagagttcctgtgtcacctcatttgccatggccacctgcagtgctgtgatcaacagtcttttaaagcataagtacaataaataaaataccagcgatcctttacatcttaaactggggcatgaacgctgatgaagattaatcagcaaaagggcaagatagggtcttagaaagagcatggattttggaggcagacagctggatttcaatcctttctctaccacttttctttttctttttcttttttgagatggagtctcactccgttgcccaggctggagtgcagtggcgcaacctcagctcactgcaacctccacttcccgggttcaagcgattcttctgcctcagcctcccgagcagctgagactacaggcatgcaccaccatgcctggctaattttggtaattttagtagggggtgggtttcatcatattggccaggctgatcttgaactcctgaccttgtgatccatccggttcggcctcccaaagtgctgggattacaggtgtgagccactgcacccggccccatttttcttaattactttgaacatatttactttctttgaacttcattttctgtgtccatataatggacttaacagcatcactctttaagggttgttgtgaatagcatgggttttagcaacaaataagagctgttctttcttctatgtgcaagggaagtaycatgtgcaagggaagtatcaggtgccatctttggcaatcttctcatgttctccttgaatctgaaaagcattgaaagatagtatcatggctacatatttgttgagagcttagagataaaaagagttcagaaatactgttgattgtgtaagtaaatgttcctccctgcctccaacctttccctccttgctcccttcttccctcccttccttccttcctttctttcctttcttttcctttcccttcccttcccttctcctcccttcccctcccctcccttcccctcccttcccctcccctcccctccccttcccttccttcccctcaatatgtttcccaaataacaacccttagtcaaagaagctcatctttttgcatgttattgatgccatcatcaatgcctctaggaagcaacacttacttcttttatgtgtctccaggtctaccatgtaattttgtagttaaaatcttcatttcatctattgctattggttctacattcttcattttatagtaaaagtatgatatccttctatgacacaagtcaaaggctcttttgatgttgaacaagtggttcgggggaaaaagaatcttagcaggaaagactcagccactatatcattgtgcataatgattaggctaagccatcttatataaaatccatacttaaaatcttaacaggtaccactgtacactgtttagagtaaataaataaaagggtttcaaattttatgtagactcttagtttgggaagagatttgagtgcagtggatctataataatcatccattccaaaccagtcatttaatcatgtgaacactcacagatacacatgtcttgttcatggataagctaattaaagacagaggtggaaacagcacttggggcttcaaagtggatcacactgcccagggccttgggagaggtcagtgaaaatgacacatgaacatagtttcaaccccaatgtaactcataccttctctttaataactagctggcagaccctcatttatttttcaagattctattcaaatcccctttcctttggaaagttgtccatgaacttcccagaagggctaagtgatcccttcctttgtacctcaagttctttttttttttttcttctctttttgagagggagtcttgctctgtcacccaggctggagtcagtggcacaatctcagctccctgcaacctctgcctcttgagttcaagcaattctcctgcctcagcctcctgagtagttgggactacaggtgcgtgccaccacacccaactaatttttgtatttttagtagaaacagggattcaccatattggccaggctggtctcgaactcctgacctcacgatccgcctgcctcagcctcccaaagtgctgggattacaggcatgagccaccgtgccaggcccatacctcaagttcttttatagctcttgtttctctgtgtttccagaccagttcttttgggtctacttttccaatgagaccatttatagctgagggcagaaactacgtgccatttatctctaaatcatcacccttagcctggagtctggcacataataactgctcaatggatatttgtggagtgataatgaacaaactgtgcttctcacatatttggaccagatgtggagtcacagggctcacttgtgaaggaaagctgctcatatcccctccgcccctgacattcctgacgaatgatgttcagcctaaatgtatgtcaaatgctctcctgtctttccagggctgcacagttgcattgcttctttttcttttcaggaagactggagggttttgtatgcgatgttggagtctccagagtttaggaggagagatatatatcatggctcttattctgaggcctataaggagttttattttctgaataagtattgatcgcagcttacaaaatactgcaaacccatataattaaaaataatgagaccagtcatttgtgggcagtgcatggctaaatataagagaagacaaattcttcaggtgcctgagattttataattgtacttggttgggaagcttattaaagccttgcaggtgcaatgtttcctcacagagtagtgaacctttgaaagatatgcataataaacagagtttgaaatatgtttttattccaggccatatggtcctgtctggagctttcctggatctttgggtcagttcattgttgaaagatgggcttgcaaggacccacctctcggagcagctgtcagagccctatcagaacgaatctgcttttgcatgattatttattttatgtggctctctgaaatgagcccagccctgctcagtagctgaaatgtgctgagcaaagtctcttccctgaacagcttgtggccatatcaccaagcagtgtccttccttgtccttaaaaagcagactagcgagacttgtacattaggtcaggatggacagtctgggtgaggtttgcccacctgggcttgaacttggtgccagcaatatgaaaacttacacggtagcattttaaagaggtgtcattgctctttcttctcagctgtactaattttcctatctctctcaactctaggcaattactgtgacagctgtccataagtacttgaggtgtttttgtggtgtagtggtgagaacaatgctaacacagcctctccttttgtaacagagggtggcattgactcctctgagaatgtcttttaagaggcatttaatataatttattcagtatttattgcacatatatrwatatgtatatatacacaaatagcagttattgacaagagacttggttttgaagtccagtgatcacaagaagatgttctgtttcctaacatagaaaatgggcagtgagttgatcagaatggaagaaggttaaatctcatatctctttatggttatttgaaaaagttgaagttgaattttgtcatcttggtcaaggggaaaatcttgccgttttaggaagcgtctttcatctactcttatactgctgacattatattcaatatcatatatatttgtagccatttgttcatttggactatattcagtaagcacctgtcctttactagccactgtgctaagacttgagaatgcaagagccccagaattcttgcactcctggaacttagaatctgaagtagaagacagacattgaaaatatagttaattatgtcttacatatgttacaaaaagaaagtgaaagatattgaatgaatgtacatagcaagaaaacctatgtgtggtctttggagtctacttgccttaaaggaaaagtctatgtcaaatttctttcctcctatataggagtcactctgcctgaaacaataaattgtatatagtactagatgcttattttggtccattttctgctgttataacagaatatctcagactggttaatgtataaagaatagagacttatttcttacagtcctggtggatgggaagtccaagatagaggaccttcttgctatgtcataacatggcagaagccatcatgtagtgagggttgggggggagagagagagagagagagagagaatgatataaatatcttccattaggccccatctcccaatactgaggcattcgggatcaagtttccaacaaatgctttttggggaacatgtggaaaccatagcattacttaataaaaatttgtggatataatggagaatgaaagtaagaagaagaaagtgtaaagattatttygttaattcaggctacagtttaataaattataatttgaaatacctaaattagttttatggtaaaactacatatttttcttttgccgccacattcagtgttgccattttaaaatttacccatggtaactatttttccatttctggagtcatagaacctagaacttaacttcttacttgagtacagaaatatgagactctgatatttctctccagggtatcagctactttcttttggggatattcttaggtgtctttggttggtagaaatgagctatttctttttttcttttttttcttttttctttctttcttttttttcttttttttttttgagatggagtctcactctgtggcccatgctggaatgcagtggcttgatctcggctcactgcaacctccacctcccgagttcaagcaattctcctgcctcagcctcacgagtagctgggactacaggtgcatgccaccacacccrgctaatttttaattttttagtagagatggggtttcaccatgttagccaggctggtctcgagctcccgacctcaggtgatccacccgccttggcctcccaaagtgctgggattaccrcagtgagccaccgtgcctggccaaaatgaactatttctatatacaagtagatcaatattcttatggactaaaaagtggtagctatttcaaagtgtgtatcttaggcctagggataaaatcacatgatggaaaatgttttcttccatctgtactatggtaacctaagggactcccaggaccagggagacaccattcaagtttcaggctgtgcccaggagagtgtggtgctattaccccagaatatctgaagctttcagagttaacagatcaagaggaaaacactcaagaggactgcccagaaatgcagccaagggccaaatagagagttcttgagaagcattgggaatcagagttggaagtgtggtagcagccactgagacagtggaggagcttttaggcagtgtcataaagtagaaggacagtggtaagcgatggggaatacttggtctgaatggatggagagttgaaatcatcaggttgggactggaagcagaggctggttgtgatgggagacggagactaccggcagtggtagtccatcttaatccagagattaagatgctggataaggacttgaaatcaatggccaccgaagcctttgttgttcagcctggagatgctgtgattccaccacccagatgggaatagtgagaccagagtcctattaaagtcatgttaagatgatccctctttgctccttccctttcttccttcctctctccctccctccctgctttctttcattccttctcctctcatatctctttccctccctctcccacttgttccttcagcaagtgtttacttagcctctactatgtgctacttattgttctcagggtggggtatattaaaaagaatagatgaatatgatctctttttctcatgagcctttccatcttctgggggaaaataatacaacatgagtaaatacatgaagaaaacactttattttaatggtaagggccacaaagaaaacgatacatgatgacatgagagagaatgggttggttaggaatagaattttaaactggagagttagaaaagactaactaaggttgaattggaactaagaccttaatggcaacaaaggatcataaagtgattgatccagaatgatccaggcagatggaaaagctagtgtaaaggccatgagatggtcaagagctggcacattccaagaagaaaaaggatctcagtgtccctggaaaatggcaagtagagagcagtgcctcatcatataggactttgaaggtcatagaaggatttttgctattaggggtctggtgttccaggtgcttctcccacttccaaccacttcatgctctccacttggtctagcattgttcctcccatagtggctttgactcttgcttgtcacttctagtccttgtattctagatttgcaatctttcaatgttatccatatggaaagatcatgggctttggagtcagacagcctttggttctatcctcagattctccttgtattggctgtgtgacttctgtaaaatcatatccacagaaagcatctcttgtgattttatcagcttaagggtctgggggtatttctggccctctttctctgtctcccttttccagcctgtctttaaaagctggaatgctgtaaggcttgtaccaaagtcttgttttcttattctctaaattctattcaacatccatgatttcaattaccatctccccatcattatccaaagtttccacctccatctcggactctactttgagctctttatctgtttatgcaattaccttttcagctctttctttggaggtcaaaaaaggtaacgtaaagtcatcataaccaaagtttgattcattatcttccctgccactcccctaaaacttatctgtgttcaatattttctaattcagacattgacaatattcattaaattgtgctaactttgctttcttatctccttctgcactgatagtcagtgaattgctgaatcttgttgatttttatctgaatatctcctctgttgaatccatctggtttgctccatcttcacttaagccacccaagaccaacctctcatcatctccgttgtgatttactgtaatcactcctaaatgctctctttgattccattcttgctacactcaaatctgttttccacagaggtcacagtaatcttttaaaaatacaaattagctaaagtaactcccctgcttaaaacccttcgatttttgttgttgttgttgttgctgttgggataaagatcaaaatttttaaaatctttaaagggagctgaatgtctcaggcactactttgcgactttctccccataaattttttataatatatcctgctgaactgtcttttttaagttccttaaatgtgttgtgaccccttcccatagctgagctttcagatatgctattttgttttcttggattgctcttgtcgttcttcatctagtgctgtagacatctgtcatgttttcggctgtctagcgtttgttgaacacattggttacatttgaaagatatccagcattatgagttttgtctagccaaggtagagagtgagattccccaggtttctctggagcaagggaacagacatgtgtcccaccagtcagactcatctgtgtgtgaatttaattcaaggggaacagcttgacaaaggcaaaacctattgtgctggtaaggatggcagaagagacatccagcttttgagaatgatagtccttgtaaggtctagtttctggtacagaagttgccaagatgttggtgtctgctaggattgcaagaaagttggatgtggggagccacatgaactgcagaagctcacgctcattgggtcattagcagttgaggcagtttctttctttttttttctttgagatggagtcttagtctgtcgcccaggctggagtgcagtgacgtgatctcrgctcactgcaagctcygcctcctgggctcaagcaattctcctgcctcaacctcccaagtagctgggactataggtgcctgccaccactcccggctaattttttgtgtttttagtagagatggggtttcacgctgttagccaggatggtcttgatctcctgacctcatgatccgcctgcctcagcctcccaaagtgctgggattacaggagtgagccaccgcacctggcccaaggctgtttctttaaccaactagttctgtggtgtgcttctgagcactgttcctgagagctttatttgagcttgttttttcagcccaacactttctatgcttcaatagccaacttcagcttctgttgcttacaaccgagaaagagccctgctggttagtgctaggtaatccaactcatttgtgggcactcagctctagtttactccaggaaactgttccattagccttattctgccacttttgctgattaaggcagatcttccactctcgtgtgctgtcaagactcagtatggcatgatggcttcacctgctgctgctgttgttactctgcctgggtttctatgtcaactctcctacttgcttgatgtatgaattttgcaaaggttacctaaccgctctgtgtatcaattcctttacctataaaatagcgacactgataataactatctaactcataggttgattgtaaagactaaatggatgaatgcatacatkaaatccttaaagtggtaactaaatgttcaataattgttaactaaaatgttctcacattacccacttctttcttttcacactacttttcacagacagtaatttgatactcacagagtgataatttgatttagatataccttccacataagctgtaaatgaagggctgcttattttgttcatcattgtattcgcagttcctagcacaacgtatatttacttaatggatgtaggatggatgttgcaggatcccaaaaaccttgagtgatgccatctccatctcccagcacactaaagcaggggagcttcagcagtatccagtgttcctggcagaatcaccccgagctccttgtttttgctgattatttcttgtgacccacaaytgacccgttctyacagagcacaaaccctgtcccagatgctgaacttgccctmtatgccctgatttctctgcttctcagcaccgatcattttgtgctgactmtataccctctgaaagctgtttgaagccagatgggagaaagagataaaacagatttcattcattgccctcccagactctgagggaaataaaaacaatagcaacaacgaggtagtttatattgggtgtttactaggcattattcattatttaatacgcaccacaatcctatgaaaatgatactataaccccattttgcagaagaggaaagtaagtcccagaggagaaaaacaaaagaaagaaaggaragtakagagaaagggagggaacggggtaaggaaggcagcttttccaatagaagagaaattcccttgctgagaagaaatttcattcccataaaagaaacttctctactggaggataagatactgtaaaaataatattgatagagaagttatagaagatgacccagaacatgaacctagcctcagatcagctttaacatttagatttttaaaatataattcctttcaactacttgctatttgcagccttttctctccaaagtctaatgtaagtagtaggaataatactgataattaagaaatctgtgcagtttttttctggttaattggcattttcctataaaatatttaaaaattagcttttggttttcaaagactctcttttcagaaagtcatagtttttgctattaagagttcccgtctgcaggtggggcttcctgcactgggattatttgggcattttcacagatgttgtccagccactgatattcagctggagttggagtggggggcttatgatgcattttctatgtttagatcttcctgatgttgttttattttttttttccaatgaaaagagaaaacagccaacatgccagttttcttgtaaaaactgttatccagctagagatgccctccaattgtaatgctcttgtgcatttcaaccaaactcaaagaaacacattttcaaagtgagtgtgggtgcaattgccagaaaattggcttcaagctgggtccccggaaggctttctttctccagctttgacaggccttgagagaggttctcataagaccccaggaagatcaggtgggtggtttgggactcagagcccagttggcaaccactctaaaagagcatggtgcattagtttcccgtggctgctgtgagaaattaccacaaacctggtggctttaaacaacagaaatttattctctcacagttgtggaggccagaagtctaaaattaaggtgtcagcaggaccggttccttttggaggctctaagggagaatttactccatgcttctatactggcttctggtggctgctggcaacccttggtgttccttggcttgcagatgtatcactccaatctctgcctctgtctccacgttgtcttctttcctgcgtgtctttgccctttctcttatcttctraggacacttgccattggatttagggcacactgtcttccaggatgatctcatcttgagatccttaatttaattacattctcaaagacccttttcccaaataaggccacattcacaagttttgggtagacagacttatcctttgcaggggccaccattaatccacacacatggtgaactgagagaactttcctgatccactggggatgaagctggatttcagctaagcagtgggctaaaaaggcatttggccctgctgagccaaagcatcttcttagtttctcagtgatcgccatacatttctgaaaggagatacggcatttttcagcagaggctaacttctcgctatgtcctcacatggtctttcctctgtccatgtgccttcctggtgtttattttaccttgggttcggccttccttattatttcatttactctttttaacatcactaggagtagataatagtgtctccattgtattcatgagaaatgagaggctccttccagctagcaactggtgcagctgggattaaaatgtaagcctgtagaggttccctttccaaacatgtcacctcagtgtttctgggttcctaaccttgaagatatttcaggcttgtctgttttccttaagcatggtaaatgtggttgttgtacagtctgtatgacagttctaataactaagtgctttgtggatttgtttctgttgtctgttgattgtggttatttatttttctttatgtcataattttccatgtctttctggttatatatgattatgtgctgatgattatacttaaaatattgtaataactattggagttttagaatatacagatcactcttttcaaaaataacttgaatgtccatctgccaggtacttgggggtactaccagtatgccatcacctcaaaccaagatccagactttacacttgttgaaccaccggggattaaactcaagactttccaatgactagtttgtctctggcactctctcaccattacacggagtgttttatcttttgagtgtgtagtcttctctgggtggggtctcatactagacttcccacctgctatgactctgagttttgacatctagctttaccccaggaaacagaaaaagatttagattttctaagattggaacatgccatcaggcaaaagtagctctcatgtctaccaacctcaaattccactttcaaatttgacttgttaattctctactaacttgtcagatttccattgttttgaagatttatttttaaaaactatattcagccttctttacttactttccttaggaaggtttccttgaatattatagcttgccattagctaaacagaaaaatctagaggcctatatattttttctccctgctcattcctggcactttactcctctcttttttttcctttgtgaggcggctgctttttgcactgtcctgaatttttccattgattcttgacatggcagcttgggtctatggatgagtggtttttttttgatagcttgatagttttgtcacatccacaggtatcttatatataagtcctagaccatcgtgaaaacaaagactacctctgtttataaattgtggaaaaataaattccattgatgctgagcttccaatttmtagagttttgtaatgtgacaaacacaagcataattaggatgtttcataaaccagcaacttaaaaagattctgccccttgtcataaaataatgagtttctaaaataatgtctctatgtatatgagtatgcacacacgtgtagtgaagaattaaattttgtccaaagagcggtttggtttttgcactcagcttctaagaggcaatctatatcataattgaaaaaaatctctttgtttaggttgggagctcatcacatcaggaagaccaatcacatttaatgtgggggctttaggttcctggcatcagttaaccaggaaactgagttaatccacttgggcaatcaattgatcaatcatgcctctataataaagcccttgtgatggttaatactgagtgtcaacttgattgaattgaaaaatgcaacattgatccttggtgtgtctgtgagggtgttgccaaaggagattaacatttgagtcagtgggctggggaaggcagacccacctttaattgggtgggcaccatctaatcagctgccagtgagtataaagcaagcagaaattgggtgggcaccatctaatcagctgccagtgaatacaaagcaagcagaaaaacatgaagagacaagacaggcctagcctcccagcctacgtctctctcccatgttggatgcttcctgccctcaaacaytggactccaagttcttcagttttgggactcagactggctctccttgctcctcagcctgcagacagcctattgtgggaccttgtgatcatgtaagttaatactttatatataaagcgtagtttatatacatatatatcctatatacataatatatcctattagttctgtccctctaagagaaccctaatacagcccccaataaaaactctgtacactaaaactcaggtgtgctttcctagttggcaattctctatgtgtattgtgcacgttaataccaggaagacaatgcatttgactcccaggggagtcatatggaaacttcatgtttggaacccctcaggtcctgtgctatgcatttatttctttagccaatctctatctcttcctgtaataaatcagaactgtgactataacagttttctgtgaattttgtgagtctttttagcaaattaccaaaactgaaggtttggcaaacccttgatcttgtggttggtgtcacagtgaggacagtcttatggttgatgttatgccctcaaccttttcagtctggctaactgggcagtgcatttatgtgtgcatgtgtgtgtgagagagtgtgtgtgtgtgcgtgtgtgcgcgcatgtgtagagtacaacactagcatagggttttttttttttttggcagagtgtcactctgtcacccaggctagagtgcagtggtrcgatcttgtctcactgcaacctctgcctcctgggttcaagaaagtcttctgcctcagcctcccatgtagatgggactacaggcacatgccaccatgcctggctaatttttgtatttttagtagagatggtttttcaccatgttggccaggctggtctcgaactcctgacctcaggtgatctgccgcccgttttggcctcccaaagtgctaggattacaggtgtgagccaccgtgcctagcctgcatagggtatttataattagaacagcccgaaagaagctataacatattagcaaggcttagatacttctcttacacttttatttccaacctgcttactgtgagacgttttccactgatcttgtagtccaaacccataccctgactttgtgatgcatgtcatttttatcctagtgtgctccatactcacccaaagctcctgtgtttattttgactccaactctggaaacagaaagtgaactcatagaagtgttttttttccccctggcaagatttaagacctcataaatcatggtggcaagaaatgtaatgatggtctcttttggttcttgaggagattggaagaggagaggcatgcaggttccagtgtggttttgtaatttttcccagtggtggcaagtgaggaagattccagcaggctagttcctcagtcttaactaagtaattctctacttcaatgttcctgcaatgaaaatgcacagacattcaccagtgtcactcgggcagtttagtgcctgctgcrgaactcctggcagttaacaatgaaattgtcaagatttcctttttgttcccttccaagcaggcaaggcatcgtttttgtccagtggtttagcacatgaatcaatccttttatatgtgatcagtgggaccatgtgtgttttcagaaactgtctggctttatacctggcagggtttcttgttgggcagtggttctgcaaatgagaaagaaaatatgcaaattctcacatgtccccaggttgaattacaaggcaaaagagactattgctttctggcctggtatttggctttgagataaatatatatatatatatatatatatatatatatatatttttttttttttttttttttttttttgagttagagtctcactctgttgcccagactggagtgcagtggcatgatgtcggctcactgcaacctctgcctcccaggtaaaagtgattctcctgcttcagcctctcaagtagctgggactacaggtgcccgccaccacgcccagctaatttttgtaattttggtagagatagggtttcaccatgttggccaggctggtcccaaactcctgacctcaggtgatccagccacctcggcctcccaaagtgctgggattaaaggcatgagtcaccacgcctggccagaccattttgattcttagagatatgccatccagtacttaaactgggttcttaaaaaaataaattatataaaacattgatatttccagattatawctgacatagcaaatgtggacaggtaggagaaaaagggatatctagtaatgcttttattcatgcacagcttaatgtgcttattgctatatttcttatttctcaacaatatttatttaaaaagagctaatatgtaaatctgtacaaccactatggagtacagtgtggaggttcctcaaaaaactaagaatagagctaccatccagccatcccactgctgggtatgtaccccaaagaaaggaaatcagtgtattgaaggaatatctgcatggccatgtttgttacagcactgttcacaatagccaagatttggaagcaacctaagtgttcatcaatcaatgaatagataaagaaaatgtggtacatatacacaatggagtactatttggccatamaaaagagtgagatccagttatttgcaacaacatggatggaactgaaggacattatgttaagtgaaataagccaggcatagaaagacaaacttcacatgttctcacttatttgtgggagctaaaatttaaaacaattgaactcatggagatagagagtaaaatgttagttaccagaagctgggaagggtagtggagggtttgtaggagggggcaaagtgggaatggttaatggttataaaaaatagagagaatgaataaaacctagtatttgatagcacaacagggtgactacagtcaataataatataattgtacattaaaaaataattaaaagtataattggattgtttacaacacaaaggataatgcttaaggggatggatacatgagatacttcgatatagacatgcaatktgtaataataacatcatgataaatcacatcagttaccgtgtggtcgtggttggtgtcacagtgaggacagccttatggttgacactgtaccccgtgccatttaccatgatgtggttattacacattgcatggctatatcaaaatatctcaggtaccccataaatatatacacctactatgcactcacaaaaattgaaaattaaaaaaaaattaaaggagtcaatccagcttggcttaattcctgcctcaaggctatttataaaaaactctctaagcaaagcagatcttacgcctccaggcacaaatgttgagggggttatacgttagactgttgggggctttttgtctacggaatatccatagaaaaaaattccaagaatgtttggagagcaacgcatgtgtagtggaatatagatatagtgcttttaagagacctgaaatacaaaatggacaccaatgaaaaaattaaaggttaggtattattttgctgaatatttagaggagtcattttggttgaaagcaatctctgaaacaattaaaatatgatttagtatatgaatgtttattctcacctagcttatttagacatatatccaccttataaagcaactggccttttcatttaatttctctactgagaaatggatatttggtgttttaggaagtgcatcccataggttgggtttatttattctggttttaaaaaagaaaatgcgcaatgcaaggactcacaagacctcagagttttgccaagcttaaaatgctaagaaaatgtaagctaaattccctgaataaagtgatggaaatcagtgtgaaactatgtggagaatagttatatgtgttgaatctacattttgatgtcttaacatggagtctgtggatgggcttctgggcatccacaaataaaatcataccaaatatttatgaatgtatacacttagtggagagatgctccattgctttggctcttaaagggcttaagcaccattttgagtttagatatggggcaaagaggatgtgctatggatggaaagttttgtcccctccaaccccgcacaaattcatattgacaccttagctcccggtatcccaaaggtggggcctttgggtggtgattaagtcatgtggatggagcccccataaatggratatgtgcccttataagtagagtatgagagcgctccctggccccttctgccatatgaggacacagcaagaagacactcatctgtgaacaggatacagtcccacacaagacagcaaatctgttgccaccttgatcttggacttcccagccttcagaactgtgagaaataaattttttctttttataagccacccagtgtatggtgtgctgttatagccaccctatcagactaagagaggatgccatagcatttctgtactccctcggtctaggatatagtcatggctgaagctgcgtgctgacccttgactcttttcattttggaggctctgtctccagaattataagacatgtctcagtttgaccatggggacagcrggtaagctytgaggcttcctcaggcatgctactgttatctcttccaattttctagtggactttctggaatacctggaggctgtacttacaaacggaacagtgtctttactgaatatccttctaggtaccagagaggaacttgtgtgtgtatctttgtgcctaaaaagtgataggtactgaaaaattgttcattgagtaaatgaatgaagtaaattcgaaatgaatgaattgccgaataattagaataatatataacaacttattgaattaagcccctgcttgattcaagcagaaaactggaaaaggggatttttaaaatagacaaataaaagttggatatatttaaggtgtacagcatgatgctttgatatatgtacagcattgtagaatggctaaatcaagcgaattagaatgcattaccttacatacttatctcttttttgtggaaaagggggatagagaacaggttttgtcttctcccactgtgatctcctgcagagaaggagaaagagacccagactgctcatcartgattttgtctgtgttctcatcaggccttcccagaaatgataattttctttttttttaaatttcagctatccaacttgataaagtcaatcttcaagtatattgtgcatggtctcttctggataactttgagtggaaccagggatacagcagccggtttggtctcttccacgttgattttgaagacccagctagaccccgagtcccttacacrtcrgccaagkaatawgccaagatcatccgaaacaatggccttgaagcacatctgtaggcaagatggctgagaaatacaggagaggcgtctgcttttggaaaggaaatctgctttggtgatgatctttcaggcaatctcaacttacttctttaatcaacatttaatatcaatggatctgtgattaaaakgtctgaatatgtaatgcctcgtgaagtatttaataatggcctttatttgtatttggatcaatgaggtttttaaaaaaaatggaagagaaaaccactaaccttgatttttgtattgcaaaatcagatagacctggaaacataaatttaaatccttagacatttttctagaaaaaaatgcaaagtttataaagatgatacaaccatgatttgcaactgtaacaggagaccatttattataagcgtacctgtttgtgaacttaattattctgattccataagctgtttttgcttaggtgatccactgccatgtgatccataatttttctacataaaaaatcaaagttaaaagtcacattatacagttatgcattcatttcaacaaaatagtgaattgataatctacttgttaatatattcggcccatattttgtgtgtttggacaagtacatctcccttttgcctaatgaacttttgaaaaataataaaataatagaataaattagactttgaatggcagaaaaagtatttgagtgttgatgttcagtaaaaaacagattcctaatttggcagagtggtgccaaattaaaagctaagtgataagcagggcataatttccacttttgaatgtttctttaaagtttagaaccttaagaacctcatgaaaaaaatacatgaagtgaatgaccaacctcagtgtaagcaaaggtggggtggggatttattaccccggtagttgaaatgtctgagattggtatggggttgactggaattggacattttactgaacttcctaaggtaggggtcaggagtagaggcagggctccttctggcctccatgtctcccctccagcaaacccttcacgtatgtggagtttggtctttcacatccatatttcagtagacttcagtaagcacctagttacccattagacttgaagctaagaggtttaactatgatcatccccattttgcagactgagaaactgaggccatactgttgtgcatctttctcaagccatttgggttctgattaactggacttggcacttcccttggcatcagccctattctcacatgatggcaaactgtagtttgaggtaccatggaagtcttctctgcattttctgaagacaggaacaaagaaatagaggtgtggagttgccttatgcaggaggaagggaaaatggttttttgcatgcagcccctgcttccctgaggaaactgcacatgcttttggcattcttgtaaggcttttggccctgagcagatgctctgtcattttttttcttttataaactgtggtcaatttctggatcgttttcatgttcataatcagggaattatttacagcaaagaaacacactctcagtaactttggacagagtgagaaagaaatggttgtagtagttcaataaatgtggatgcactggggaaaattatattaagattaaaatggtatacagaggaaattctattacatctttgccactggtttgttatttttattgttcagtgagacattatctcacaatttgtgttcatttaagaagcacatttccgaatcttatttcattcctttcctatccagcctgtctttttcatttttaccatgtatcttatttacaatttatgtgcccttttgtattatcttgcaagacaactgagttttccttttaattaggatgttgcttcgaatattacttatcctacagggcatatttacaagttttacaacaatacaaatgagcactgtatttttgttaccaaaaccaaaaaaattagtattcacactgtaaataagacgatctgtcatgtttggtctaccaggtgaaataaagattctagctgctggcgcccaagcttacttacagtgctgtggccttctgcagttctttgctggattttaaagcccagctctttatcctagagatggatcatacaaagggtgcttccctaattggtcatgtaaattagtattgccacaaggttaagatgaaggaaaaaaaaataactcaccatctaaaaacctaacagccctgcagtatttcaattaatgttatttttaattacttacattagcatttgagaacaagactgattggcttttgcctgttaaggaaacagaatgaaaattctttaaatagaaaaacaagttgttaattatacttaaaaatccacagatactgtacttagatgtcttgaaggtcatctgagacttgtaaagcacatgttttatgtctgttttatctaaggagaaacctaggtatcacaatgatgaattggatctatttgtatttccttctctgttattttcctcctttcttttttagaagagtatgaacacatgttatttacattctatgaatcacttttaagaaatttttttgacagtttttattttagggcaagtcatttctgaatttctaaaaacatatataaaataacagtaggccagtttcattttagatgtgtagggttttagttttgcaactcctggttatatcaggaattatactaggaacaccaggaggaattgtctacctaagccctttatcgaatgagaaggtagaagttctcattaagaaacccataaactcagaagctggcaaccttggtatttggcagtgggatgccagtcaggttttcgtgttctgggaatttgtgtttggcctgtagcttttaattatttttatgaactagggaataatgaatacatttgtaatatattgaaaaaaaccctccaacactggctgaccaaaaaatagatttatatgataattcttaaacaccaattctattactcaatgctaggcagaatgaaaatagaatactgaaccttattactgagagagcagagtataatcaaagctggtagaattaatactgtttaattattagcaatatgcctcacccggagaacacatattcatcactaatcagaatattttaggctcttgtctgaggggagggacatggtagagagtacaaagcatgatgagccctaaagaatgaaattaggaaaaatgtgacatagagacatttgatgatggtctttcataatatgggttatggtgatgtgaaaggagaataaaccttattaactgtggcagtaggtaagatggggaggtgggggttgaagtgccaaggtagggccggccataggaaagaacaacccccaactatgtgagttgctgagagtgtctcgaagagagtagtagacaaggcctgtgatcccaggctttcccagtgtctgaatgtgatacctgagcaatgactgacctagatgaccttgccggagtggctatttgtatctggtatcaggcaaatgtaatgcatcattaagaatgtgggttcctgagccaactcacctggattcaaatcctggctccgatgtttattatccaagtgacattaagtaacttactcaagtttcccatgcttcagtttccctatctgtaaaatggagataaacttccttataagactgttgtgagagttagttaagctgatatatataacatgtttatatcctgaagcatggtaaaggcacagttagtgtcgagctattattttaaactctcaaacttgtccacactgagcccccagcaattcatcaattatagtttggcttttcctgttatgggaccatctctgcttcccacagaagtatctgtttatgagtctctgtcctggtaagttgggattcatgttttgcctgtccgtgtctaattctggtgtcagtggtttttcctatgaccttaattctctgatgactctaaaaatatatgttaattttctgtttggctgttttgcttgtgttaggatgggagtgacaagttctgagctccttaaatgatgggagtgacaacttccaagctccttaagtgctggactggacacccagagatcacattatttatatcattagagttgaaggtgtccggctgctcaatcagtacgtattgattaaactaaactgtgcaatactttatagagatgcaatactgcagacaagacagttctccaaagaagttcatgaactggttggggaactaggatagagactaaaatgatagcaaacaatgctgggtgaatttttagagaatcagagttgtacagctatgtgtcacgtaacaacgtttaggtcaatgacaaaccacatacacgatgctggtcccataaaattataatagagctgaaaaatctctatcaccttgtgacatcgtagccatcatgaaatcttagcataatgcgttgtgctaagatgtgtttgtggtgatgctggtgtaaacaaacctactgtggtaccagttgcataaaagtctaggatatatgagtgtgtgtgatacacagtatttgataatgatcatagattgatgctgttttatgtgtttactatacttttaatcattcttttaaagtgttctcattctactaatgaaaaaaagttaactgtataatagcctcaggcggattctgcaggaggtcttccagaagaaggggttgttatcataggagaagacagctccatgcctgttagggcccctgaaaaccttccagtgggacaaggtgtggaggtagaagactgatattgatgatcctgaccctgtgtagacctaggacaatgagtgtgtttatgtcataatttttaacaaaaaagtttaaaaagtaaagtaaaataaaaatagaaaaaagcttaaagaaaaaggatataaaaatatttttgcacatctgtaaaatgtgtttgtgttttaagctatgttattacaaaagagtcaaaaattaaggaaattaaaagtttataaagtaagaacattattttaagctaagattaatttattattgaagaaagaaaatttctttttataaatttagtataacctaagtatacagtgtttgtaaagtcttcgtgtacagtaacgtcctaggccttcacattcactcactactcactcactggctcacccagagcaacttccagtctcaaaagctctattcatggtaagtgccctaccgttttttaccttttaaaaaaacttttatactgtatttttcccatatcttttcagtgcttagatatgtttagctacacaaaacttggtcttgtgctacaattgcctacagtgttcagtacagtcacatgctgtacgggtttgtagtctaggagcaattggctcccccacatagcctaggtgtgtagtaggctacaccacctaaatctgcgtaagtgcactctacgatgtttgcacaatgatgacattgcctaacaatgcgtttcgcagaacgtatccctgtcattaagggatgcatgactatgtataagcagaggagagtgaggtgggtggggatggctttcatgtgcaagggaaaataatacaattaaaaaataacctgagtgataatacaaataatataggtaaaaatatggaagtagaaagcataaagcctgtgggctgttgggggcagtgctcaggccagctcacctcagggaagagagcaggcaggctgggacttgaatgtggagagtctctaatgttctccaaagaaccttcggtttttctctcagagtaaggttgaaggtttctgagcaggatggtgatgatttataggtagcactttgaggaatagtaaaggaagtgggatataggaaccagactgaaagcttatagtagagtatacttgatgtgttaagagtcctatgtggagtgggaagtacatacatggaaagttaatttataattgtaattaatgtatctaaagtacatgggaactgaaatgcaagatgattttttgtattatatcctggaacagaagaaagaacattagtggaaaaactgggaaatccaaataaagcctgcagtttgattaatgctgctttatcagtgttaactcgttagttttgataaatatacgacagttaccattagggaatgcttggtgcagaatatatagaagtctgtgtactctsttgaaactcttctgtaagtacaaaattatttcaaaatgaaaaattaaaaatgtatatggaagagttaatatatttatgtaatacattagatataggatatatattataacctctctctctctctatacacacacacacacacacacacacacacacacacacacaaagagaacagatggaaagaaataaccactatgaatatctaaattttttctaggttgtggtgttatagctaatttttctctcttccttataatttattccaatgttttccatacttagcttctgttttcttttattattagaaaaatgcatttaaagataaagacacatttcagcagtcaagataattgattggatatttggataatggaaatgggtaggtcagtaatggctctgaatacgaacaatggtccaattgatagacattggccaatatatacaatactccatctaggtgtgcatttaagacaacagatattttttccattttaataatttttaaaatgatatgtaataattgtaattttttagtgcatgtgatattttgatacccatatacaatgtgcaatgaccaaattcaggccactggggtatccattacgtcaaacatttatcttctctttgtaacatatttttaaagtacttgttaaagtttcgagatacttaaaaattaactgctccctctggtctgtaatcactaatttatatctctgtcacacataatttttttaaccaacatctccccaacccctttccactcccacccctagtccctggtaaccaccattttactctctacttctatgagacccacttgtctagattcaacatataagtgagatcacttggtatttgtgtttctgtgyccgaaatatttcacttaacataatgttttccaggcttattcatgttgtcccaaatgacataattttgttctttttaaaggctgaatagtattccattg

SEQ ID NO: 95995 - DNA, 137118 bp, Homo sapiens
  misc_feature (1)...(137118): n = A,T,C or G
ttggtcggaggactcccaactgacagcaccagcaaaacttccatttttttgaaagaggaatcttccaggctcttgcctggaggatataaacttggctgtcaccaagtatgcagactctcacttatgccacctctttgcatatggtactctcacctcaccctcagctctgcctggtgaatccaagtccagagcctgtttgggtcagtccatccaatcttctgctgaggtgaagaagagcaagttgcctgtctgcacagccttggagaggagatctgaggttctgaccacttgttataaagaacttcaatgatctttcctttttcagcccgcgtggatccttgccttgcaagatgggtggggtctctaatttctgatactttcctgtgtctccacagcagatatcagctggatgtagccctctccacttgtgagcttggggtttagctttctgttttgctaagacatgtataacttactcatcaccttcagtttccaaaacatgaacttcttatcagttttcatttctccttcttttctctttgtcctgaactaatgctttattttcttctttcagtgtcatttaggagagtttgaggaggcaacagacaaatacctgtatacaatctgctgtgtttagctagaaatcttctgactggttattcattagtgtactactatagaagtgcttgttgattagtgttggactactaaatagtctagggaactaaccctcaagtgaaattttttctttaattactcttttattgtattgtgtgtttatcatcacattatagacattttatttttactcacagtttatatatttaataaataactgggttttttttttgagacaggggcttgctctgttgcccaagctggagtgcagtggcacaatcacagctcactgcaacctcgactttcgggactcaagttatgctcccacctcagcctcccaagtagctggaactccaggcacatgccaccacacctggctaatctttgtattttctttgtagagacagggtttcaccatgttgcctaggctatgaataagttttgttataaaataatataggtttatcttagaaaatttggcaaacataattgattaggataacattttaaaagaaaaggaaaaactgcaatcccaccacttctgacattttggcctataaccttggagaccacttttggggttatatagagcttagtttataagattcatcaggtaaataaattgaattagtcatttaaaatcttcctacaataaaaagtgcaggtcgcagatagttttactagtgaaccctatcagatatctgtggaagaagtaatcccacttttgtacaccaacactttcagaaaaatagaactgtaatgaaacctttccagctcattttatgaggcaaatattgacctgacaccaaagccagatgaaaacagtaccaaacaaaactataaatcagtaggagcagagcagacttttatttgtaatgctctaacctactagggaatgcctgaaggactggtctccgctttgcctaactcagatctcaagcagggagaagcagtggctgctgcttgggaaagttgcagggagactggcccgtagacacctggggtaagacattatgggtagagatatataatagaccaccaaaggcctcaaggagaaactcatttggaaaataagacattaaaaagcagctgtgtatacagagaaatttaaaaagccacacaatggcccgagcaagatgcatgctcatacaagaacttgtaaggtcttaagctttctccttaagctgaagctgatcctaaggcttagaaccatgggccacctaattagtgaaaaacttcgctggcacagggccagtgtgcaaagactgggggaggtatctgttttctcaactgcccaattttcagcaataacaacaaaactcccacaagacatatttcaaaaacccagaaaaacatgtccctctcaaaaagaaaataaagtagcagttaccttccctgaaaaaacacagacattagacgtactagacaaatactttaaaatagctgtccttaatatgctgaaagagctaagggaaaatatggacagagaactaagtggaatcaggaaaacaatatgtaaacaaaattaatcattggcaaagagatagaaattataaactggaaccaaattctgaagctgaaaaatacaataaccaagttgaaaaatctattagaggggttctccagcagacttgaataggcagaagaaagaataagtgaacttgactataggacatgtgaaattacaaattctgagaaacagaaataaaaaggagtaaagaaaagtgaacagagtttaaggaacatatgtgacaccatcaagcagactaatgcatgcattatggtatttacagaaagagaaaagggaaagaagcagagagattattagaagaaacaatggcagaacactccctgaatttatagaaatcatgtttagatatcttagatcagccaaattcaagtatgacaaacccaaaaagacccagaccaagacattatcacactgctgaaaaaaaaaagacaaagagaattttgagagcaatgagagaaaagtaattctttacatatgtgggattctcaatgagattattatttaatttctcagcagaaaccttggagccagaaggcatccaaggcatgtggtcccctataacctgttgagaaaaatatttgcaactgatttacagatagttctgcattttatggtgcagacagtggacagctacaacacgatggcccctctctgtggtggttctagaggcggtgaagagaaatactcccagtcagcagaacttggagctgcatacctggttgttcattttgtctggaaaggggaatagctacatgtggaggtctatactgattcatgagcagtatctgactgcttggatagatggtttggacctcggaaggaatatgattagaaaactggtgacaaggaggtctggggaaggaaaacatgttggaaagattaaatgggcacataatgtgaagatatttgtgtttcatgcgaatactttctaaatattcaagtcggctattatatttcaaccatgtaaaagcctcctttataagaattttgcagtttttgatacttttttcttaggtacttttctttttgttacagaaagtaatagcatttctatatttaacttttgcttcctgtgatagttaattttatgtatcaacttggctaaactatgatgttcagtcatttggtcaaatactagtctagatgttactatgaagatatttgtgggtgtgactaccatttataatccattggttttaagcagattactctccatggagtgggtggacctcatccaaagagttgaaagcattaagagcaaagacttaggtttcctgaggatgactcaggtctgcatcaagactccaatgtagaaaccctgtgtgagttttcagcctgtggttctgctgtgcagatttcagactcaagactgcaatttcaactcttacttgaatttccagcctgctggcctgccctacagatttcagacttgccagccttcacaaaaacataagccaattccttaaaataactctctctccctctctctatatgtacatcctatgggttgtgtttctctgaataacctgattaatgtgctgtaaagaacactgtaaagagctgaaaaactctggtcttgagatactgtgtggtatggtggaaaacgcatggctctgaaatcatagaccagagttcactgggacaaatgacttatggtcttgtaatctgattcctcatctgtagaatcaggataaaattacctgacttacttggctattgcgttgggtaaagttaaacattgtaagtagaatgcctgtcatggttcttggttcacaggtgcacaatagtaaccaactatgttgaagggggatacattttttagttatctacttagtgctctgagtgtcattaaatgatttaatcaacctgagtctcttagatgttattaaatgtaatatagttattttatttggcacacagtaacatcacaccaatatcacctcctggatggttagatttacacagaattcaaacattatttgaggttagttcttgccacttacctgtgtaaggtctagggcaagcgtgtttccatgagcctattctcaacttaggtactaataattacctcatgaggtttttgtgagaagtaaacgtgataacgtaggaaaacttgctcagtataatcccaagcatatagtagatgctcaatacatctactagaagttgtgggagtaatttggatttcaaagatgagttggatcagctgtactaaaggggagcttacatcatctaatgaagacaaaatccacaagaccacgttggaggtcatagttcttttaatagtagaaagcagacaggtagaaaaatatccacgtaggaggtataaagttttagcaagagaaaagaaacatgccatgggaagatgataaaaggtctacttttgctcatttaccggattatgtgcatttggtatgtgatctcatcatcagtggaagttatgcagtgctttcaaaggccttccaccttgtcagtggctagtcatcacaaatcagtagaagggtggatgccctaagaactgaaccaaagcaataattttgccagcaggggagaggttgttcaggctgaaatcccaaaggctggaatgcattagaaacaattagttgatgctgaaagctttgaccgtttagtgagaaatgtgacaaaatgaacactcaaattacacatctagcttacaaaacaggtcaagagctctttatcttttctcgctttcgaaaaatcgaaagtcaacaaacaacacttttggtagaggggcatgcagtctactttttccctttgtcttctcagtatcatcctttctcattcttttcacccatactctcacttctttctcagtcttggttttttccctttgtctccgggtccccttctcacttccgaattctcggctcccctctccgcccctcgggctcgggatggccccggggccgcatctgccaggcgagcgctggagcctggccccaccgagggactggcagtgacgtagccaggaggacggtgctcgcgcggcccgctgacgtcactgccgcagcggtctctagcgaaacccatgaatgggaattcaaggagggaaaagccagcagtgaccccgcggtcagggctgaggacggcgactgcgccgggtgctttgggtttctggggtcggcaggccggaacgccgcctctagcgcgggacgagcacaccccatagcctaggcgcgctggaacgcacgaatttagcgctcggggggatgccccgaaacggtggggcctcgtgcgcacgcgccttggctggcgaggagctagggaagggagtcacggcggggcgcgaagggaactgcggatgagatagatgggggaaaacgtttgtcgggaggcgactccaacagagccccagggtgcagaacacaaggaaggctactgtcgccctcggccgcttgccagtctccctgggcgctgcggcggcgcggggcgctgggcctgcggcgcggcgtcgtgacgtcacggtggcggcagccgtggttggcgcaaggtccgcggctgcaaagtgtgaattacgccgggctcgcgccggcggcggagtgaagtcaggctccgggggaggggaggagnnnnnnnnnnnnnnnnnnnnnnnnnnnnnnnnnnnnnnnnnnnnnnnnnnnnnnnnnnnnnnnnnnnnnnnnnnnnnnnnnnnnnnnnnnnnnnnnnnnnnnnnnnnnnnnnnnnnnnnnnnnnnnnnnnnnnnnnnnnnnnnnnnnnnnnnnnnnnnnnnnnnnnnnnnnnnnnnnnnnnnnnnnnnnnnnnnnnnnnnnnnnnnnnnnnnnnnnnnnnnnnnnnnnnnnnnnnnnnnnnnnnnnnnnnnnnnnnnnnnnngcggccgcggcagggcgggcgccgcgcggaggcagggcgggcgtattcaatggaagtgtgttaccagctgccggtactgcccctggacaggccggtcccccagcacgtcctcagccgccgaggagccatcagcttcagctccagctccgctctcttcggctgccccaatccccggcagctctctcaggtaatcgccgccgccgggcccacacttgagggcttctctcttttgtttccctctgcccacccagcttcacctcctctacaacccccagcccgcgcattgtccattgtctggggatttctaggctggcctttcgattgcagagccttttctttgaatattcctggctgtcccccctcagttctccagcctccccaaaaccccaccctggtgggttccgggatcctctcatcagaccctccccaggctcgtcaccctctgtgcccagcagtttaagcctcaggaatgaccgcccttgtctttttcggtctggaagttgagtctttattccttagtcgtggccccagggtacacctgtgctcccccgccttgcaacatacctgtcccccttcccatacacacaactgtacggggttcgcgcctctcctcccccagctcccgcgcgccccgcggcgctcgcctggtcctgcggttccctctgaacaataggcctagatgccccgttgctgtagtctccccgactccttcgtttctgtggctgggctgtactgggtatcagaggaacaagtctgcaaagttcatagccaggaatcagttttgtttttaatttgataaggagattttaggagagaaactactgatgtacactcatgggaagactttgagtggtccaataccagttgctcctgagcatttctgtttttttcctgtggtgatgccgttggcccaattccttaggtttggctaattttgattgtcagacttaaaacagagaggtgaaaagaattttgtttacatctgaactgagtgccctcactttctgctgccagaagttatggctaatgatcacttttattaatcaaatatatttttcctattggctaatactatcttttatgggagtatattttctctctccagttatattgtatcttgagcaaggtgtgtgtgtgtgtgtgtgtgtgtgcaggtagtgtggacagcacctggtagaaattttgcgtgtaataagtgtctagtaaatatttgtcatttacttctttgcctaaagtgtttgtagaaggagcaagagcctatatttgggtctctctctgaatcctttttatttaaactaaaacttatttcacagcacaaggtagtatgctaatgaggtcagagcagacttgtgaaaattactataatgtgtcatttagaataatattacatggttatttattttgaaggttagacctgtgatctgcctttttagtaccacttaaagcatgttcagattccagaattaatgttgaggaaatcttaatgcactgctgaagaaggtttttaatagtagtagttaaaggtttttaatggtagtaactttttttacttctaaatattattttacttcctcagatcagcaggcacatgactagcaactcatttccagttatgtctgaataataaaggcaatcactgattatttatacaattataaaacatgaataaagttcttgtgctctctgagaagaaaatgaatgagaaggaagattccaagggattaaaatgaggctgatgccaggggtttttcctgatgtcttaattaatccacagagaccaattttaagctccacttcttgattcatttttccagccttaggtttaaatgggtaatggaattttaaaaatatgattgtggcagatgaagcaaatattgtagaattacaccatattttgctaacccttacaacttttaaaaaaatttctgaaccccaaagtgaagtatacaggaacttcttaaactttggacagaaattttcctcaattaacccttttttttctattaacattggggtaaatgtaaacttagtggatgcagagatggacatacttatcattatcaagactttgcatatcatttaataataaagcatatgttgatattnnnnnnnnnnnnnnnnnnnnnnnnnnnnnnnnnnnnnnnnnnnnnnnnnnnnnnnnnnnnnnnnnnnnnnnnnnnnnnnnnnnnnnnnnnnnnnnnnnnnnnnnnnnnnnnnnnnnnnnnnnnnnnnnnnnnnnnnnnnnnnnnnnnnnnnnnnnnnnnnnnnnnnnnnnnnnnnnnnnnnnnnnnnnnnnnnnnnnnnnnnnnnnctttttttttaaaaaaaagacattaagtaaaatagttacagtttttgtactttaaaatatgcttaaaactggcaaccttccttttcatttccttattgtcaccatagtattggagcccagctcatagtaggtacttaataaatatttgttgaatgaatgaataggtaatgaaattatctctgactgagcatcagttttaaatatgaaaacaatatggagcatgaaggtacagcacaaattcatttatccaaaacttggtttggaacttgtaactgcagaccataacgattccaggaatacacagaaaagaccgagtgaccaaaattgatttggagatcgtcttaaagccggtgtgttttaggcaaagttctgacacaacttgttttcaagtagcagcaaatttgaagtggggtgggaggctgccagagtcagttcacactgacagcagcaaaggttgacagcagacacaccaaaagccagggatcagaagaaaaactcttagaagccagcaacttttacaagcaccctgggacatttagttgaggggcttgagtgttgtataacacaataatttttagtcagaataatgttaatagagcctgtttttaaaagttgaaagattcgtactgtttttttgtttttaaaaagatttccatgccaaagagttttaagtattgatgctgaactgaaatggacaagcttgagttacctggaaaattcatttatgtggatggaacaccagctcttccaaggatgccaagtaaatgaggcattaattttttgttttaaactaggatgtatactatttcaaatggttaatgtgagttttttgaattagtgaatgataaagtagatgaagcctgttctttgtcgtttttggatatctattgttgatagctgagtttaaagatttgtctttcagaatagcattcatatttggaaaaaaaatattgtgaaggcagaaattgtgtcttattcaccatcatatctgtggtactttgcataggtaggttcttggtagatgtgaaagttgagtgagtacattgatgggtatgccaaagcactgcagttagaattattcagtcagattttctatgcactggaagcaaatcttatatgggttagaaatttgagttttaatttttagaaatctattgttaatttatattgttgctaagttatcatttgtctttttttttttttaagaaatatttcacaaatatatactcatagaatagcttcttgtgagtgaggctccttgtgttatgcgttgagaaaatgtaaagaattacaggctgagcagccctagtctgaaaatccaaaatgccctcaaagggaaactttctgagtgccgacacggagacagcctgctattatttgttgctgttgttgagcagctgatgcaggtattctggggctgctgctctgctgcctagttaccctaaacacattattttctcactgtattaatggtatgttgtactgtttactgttaagtacatttgtgtaagtgtgagaaatgattgcttatcactagcatataaattcagagtcagaaatgatggtgatgccaaacaagtacagatcaaccacatgggtgttaagatcgtccacatgagtgatgagacgcctttgctttctggtgggtcagtgtacacaaaccttgtttcatgcacaaaattatttaaaagagtgtgtaaaattatgttcaggctatgtttataaggtgtatacaaaatctaaatgaactttgtgtttagacttgggtcccatctccaaggtatctcatgacgtatacacaaatactccaaaatccaaaaaagtctgattgatatccaaaacactcctgatcccaagcattttggatagtgatactcagcctgtagtaattttttgttgctgctgttgttttaatcgtttgtaacactgccaccctaaccaagttttcctttgtatgcatacccttccttatacacaaccgtttttcaactacagtcattatttccattctctctttagcagtgttcttagtatatgacaaattatccaggtcctgtgagtgcgagaatagttcaaagccccttggataaaagttggttcctccttcaggaagcttacagaattgtgatagagaaaatggtatgattatatgtggtgtaattattatactggagttatcaaagtgttatgagatgataaggcatgtatgcctaaatttctggtttaaatcaggattagccttatgtaatcgttgaggctttcttaggccaaggactgaaggtgaagcagttgtttctagacaaatgggtgaatgtagggggaggaggaaggaggatggcccacgtggatatgatcagagatgtccagtagaactttctgtgatgatggaaatgtttttgcactatctgatgatagtcactagccttatgtggctagtgggcacttgaaatgtggctagtatgactgaggaaatgaatttttacttcagttttatttaaatagctacatatggctagcagcttttcaattggcagagcagaggtattgtcaataaactagagtgaagtcatgttaatctatgagcaacacattctctgaatgttgaacatttttgtttttaggttttcgttgatgtatgcaaaacttcatttaataaataccttcatgcatgcttgataaagtctttaaaatcactaggttgggtcaaaaggtaagaacatcttttgaaattcacaaaaggatctatcctttgatattaccaaaataggtgatcctgtctgtttcatctccaatcatatattattagacattttataaacattttgctactatagtagatgcagtgtggtacactgagtttgttttaaattgcagtaagcaagagtgtgctttctgaagtattgcttgtgctatttgtatttgctcttttgtgaaattttatttgcatatcccgtgcttgtttataagggctcttgtgtacccaacatcagtatataaatgtgcattattccaaattactgttagcataatagttgcctctttgcaaacttagatacagaagctgatacagggactagtgtggccagtgagtgggataccccaagggaagtggttatatttatgagaccttcctacctgtgtattctcaaaacacctgttttgttgggaccttggcttcatttctgttttcagaaatgcttcatactttgatttaaatttaatactaccatactttagctttcacttctgagctaatatatgtttatatttcagatacatgctcaaacataatattaatgtaaatccatagtgtatttggagtgggagtgtagttctaacagggtgttcaaattgctagtttataggttgtcaggaacacattcagtctaggagatgtgatttatatgccgagattttactgctttgttgctatgcctagagttccatcagctgtacatgctgtctacccaggaattccttcttaaacaccaaagtctgcaagaggtaaaatattaagcccttcacagaagttaggaagagagggagctcactttgggtggaaagagggagaggtgcccttcattctctttgaggcaattttcaactcttctcttcttttctcttccctcctcttccttcactattgaccagagcagttatagagaattgtgttgttttctgaggatgaatgtaggggcaagtttgggaaaagaagagctgaagaaagggggagtggacaaaacttaggttctgtctcatttttgtctaagatcgttaacagtcatttaactggattaaagacctagtaaatttagatgatgaagaagccttattgcatgcaggccctcttaaggaatttacttttctttgttttcttaattttctttgtttgactttatggatcacatttatgtgtttatgtaaaatctatttctgattttgttagaagtctcttgactaaagatcttttcagatctagacattcttaaattccctgtgttcactacaaaaaactccaattcattttgaatcttctaatttaaaaataattcaaaacttaaattctggctgtgaagttgcttatcttttatggttaatttgaattgagagacaattttgaatttattctcttccacatttaaatggcttattcttgcctaaaagtaacatagactttgttgatttttttatattgttgccaaacatgcttttcaaaaggttattcacaaataagtgatacttttgcatatttgcattcaggtatatttgcattcaggtagtgttcataggatcagcatatgaggagaggaacaaaaactagatttgtagatgagccttctaaacttgcagggctttattttggctgctggtaggttccttttataagggaagggactgtgccaatgattgtatggttgacactgaagcatctcctgcttataattttctttgagtagcaattttggaacactgctccatgcctccacctgctggtagggatggctcttcattttcagaaagtgatggctagagggagatggagaagaccaaggcaagtcagggtagaatttgggggagaaaattagttgttaactgggtaactaaatttcagcaaagtctgctttacttatcagaattttgagtagaacaaagtgtagttcaggaccatataaagtacttggcaagtggttcttaataaagatgcagtagttttgctttagtaacaattataattacagctgacccttgaacaatgcaggctgcaactccccgtgcagtcaaaaatccacatataacttttgactcctcaaaaacttaactactaatagcctactcttggtgagaagccttactgataacataaacagttgattagcacaaattttgtgtatgtattatattctgtcttacaataaagcaagctagagaaaagaaaatgttattaagaatatcagaagtaagagtttgctattcattaaggggaggtggatcgttgtaaaggtcttcatgaacctcatcatcttcatgttgagtaggctgaggaggaagaggagggattggtctgtctcaggggtgatgctttgcaagttttcttaaattttcataaatcttcacaaaatttcttagtatatttattgaaaaaaatctgcttgtaaggggacctttgcaggtcaaacccatattgaattgtcaactgtatttgtttctgtttttggagtaactcctatatggcagatacttttaattagtgtggtgtttttttgttttgttttgtttttgtttgagacagggtcttgttctgtctcccaggctagagtgcaatggcagtatctcggctcattgcaacctctgcatcccggccttaaatgaccctcctgagtaactgggactacaggcatgccccaccatgcctggctaatttttctagtttttgtagagatggggttttgccatgttgcccatgctggtctggaactccaggactcaagtgatccgcccaccttggcctcccaaagtgctgggattacaagcatgagccaccgtgcctggcccagttggtgtttttgatctttacaaaaactccgtgagattaagtagtattactctcatttttaccaaagaataaactgagtttccagacattaagttgctcaaggtattatatgaacttccagaaaggcctgttgtgctccaagaccttcacttttaatctggcctgcctaatcagggaagatgagtggactgcagttagaattttgagtttacaaattataaatcttgttgtcttatggatgtggattaggaaaacacatttgactgattatttgatgtagttatttgaagtaataactttcattctgatcttttcaaatcctatctggagtattttgttctaaatgccatgttctaggagggtataactcagctaaattgttctctgaagataatgagcaggttggtaaggtgatttgaaaccacttctctggagaaaaaaagtctcagattttagccagcagggatagagatggagatggagagttggtgagaggggacagagcattgctgtcttccaggatttaaaggactgccatgtgaataaaaggaaaaagagggttaatatgttatagatttcgattggttgtgtgttgttgattgctgtgcactcttcctactttgtgttaagcgtctctaatttggagaagatataagtttaaagctgtcatttgtccaaggtaacacaattaagtagtggaaatgggttaaactctaggtcatgctgactctaaagcctgtgtactctcttctacttccttttgccacatgggaaaaggacgttacctcagagggtaaaataagtaccaatagctaggaacagtaggaaataaggagatctggtgtttaaccatgctggtaatcaaagaaatgcatactaaaaaatgtgatactggctgggcatggtggttcatgcctgtaatcccaacacttgtgaggcttaggtgggagggttgcttgaattcaggaatttgagaccagcctaggcaacacagagagatcctgtctctgcaaaaaaaattttaaaaattagccaggcatggtgacacgtgcttgtagtcccagctaagctggaggctgtggtgggaggatctcttgagcccaggaggtcatggctgcagtgaattgtgatcgtgctactacactgcagccaaagtgagtttatagcttgaaggttacatgtacacaatgctagtaagattttaaaaattaatacttaaattagtatttttgataattcgcttttgggaatctattctgaggacatgactaaaaatgtagataaaggttaatcttcaagtttattcatcccattatttatcactgtgaaaaattgaaaacataatttacaaatgatgaagtagattatagtattatgtagtatagtatttttcattgtttctgtattatgttagcacttaaatgccttgaaaaatttaaaggatatataaaaatatagtttacaaatggctcaatggattctagtattatttctatattgtatatccactaaaatgatttgaagaatttgaggaatctttaatcacatggaagaaatgctagcaacataattaagtgaagaaaaaccccagagtatctacagattatcttaattgtgtttaaaaaacaaataacagaatacatacatatctatataccatgcatgcgtgccaaaaaataaagagaaagctagatgtatcccaaaatgctaactgaagctattgctgggtggtgaaattataagttatttttaacttctttataattgtatgtaactttattgatattcttgtattaacatgaatctcttttttaaccaaattaatttaggaataataagtcaagtgagttgtatttggacccagatctttggcaaagctgttcgtaaagggtgggcagctcatgagtttataaattctcaaccagtgactgttgagacagcagcttgaaaggtatttagataaggatagtctccaagggtttgactgatttcttccaccttcgtgattctgtgatttttttttttttggtaagtcatatatatgcatgacaggtacacctgcatagctctgattattgtaaagtaattttactttccatgagagatcctgggaggtaaaattaagtatagttattgttttgaagaagagctatttgatgacagctggtgaagagatcttcaacaatggcagtggtggaaggaagnnnnnnnnnnnnnnnnnnnnttgggaggtaaaaagtattcctactgttttagtttggaaagaccaggtagattgtgaagctaggaacaaaaatgcaaataggaagaagaggcaggtttgtttttctttcttctttcaaaaacaaatgtgtgcatttgtagaggggggtagataagtttacttcgaatatgtagagttcaagtgtctgaacatccagatgaggatgtccagtagaaaggttagcactaatgatatattctgacctttagtataagggttttcaaacattttgctcatacagcctttcaaagaacttgaacaacaaaaaaactgtgtaccttctcccacatcttgagtttttcatctaagttttaatatatataaatgatgtaatttctggtagtgttgttcaaatcacaattttaaatgtatatgaggggatttttaacagttcattcattaaaaaatatgtgaacaaagttaattttaacagaattttttatagtctttttttttctttgaactgttatttttgttttactttctctacatattatcctaatgtattcttttatgctggaaagcatttttatcaatcatgttatatttttctgcaacaaaaggaaattcattcatgaatttagtagatgggaataaaaagtgctttattttaatggtcactcagttctgagttctatggacagttataatacaaaaatacgaaaattgtgtatgtccataatgctctgtgtcagatttattttggactgagttatcagttcagtcatgtccagtagacaatcaaaacaacatatgttaattacaaattttaataagtattaaagtaaaattttgtcagaaatgcgttttcagtgggatagatggggctgatttatttcaattattttatccatttctaaatattagaaaagatggggttctgcttgattctgttccttttttactttaatatttgaaagtgttgagaaacctcacttacgaatttagtagatggtcattaaaaagtgctttatattagcagtagcacccattcttctaggttgtatgcataaaacaacaaaataatccataatcaaaattattcttaatgctttgtcaggtagcaactggatttgattctcctttcattttcatggaagtggtgacaccttgatttgaaaaagaaccctgaacttaaaataaatgttaaaaaaaaaagaaagaaaaaggtttcagtgtttttagagtaattaactttctcaacatgaatatattgaagtgtccttttgtccacctggatatttttagcccaaagacagtactcgacagcaagtttcagaaaatgtgagagttacggttttcttttatgaagtggcagaggggaatgaggtaaagggaaagaggaagtggaagtaaaggaaaacagacatgctgtgtcaacacaatggttctagaaaactgtacagatggaaagtgagaacctaatcatcaattctctttactctccatgctgatatgcttccaggggtatacatgacccaatttgtggactgctggtttactatattccctttgttacttgttgctgccttgttgctgtattttgctgctctccatagctatacagaaataataccttattcatctgtcattttttttctaggtttttgattgttactagttctgggtttccatacttcatcactctgtggaatcagaatatcaatgcttgaaagggactttataaataattccattcccaacattttagaaatttagcagctgaggctcagaagattgagtgatttgtcccagatcacacagtaagaaagtggagaagttacggctttaaatttagttcttccaacttttaatctgttgcttttctcactatattccctgcttccttataaaaggattgagctgtaggaattctttcagttgccgtctttctttaatggacattatttgggtggcatatcttctttaatacattgaagccatctgtttatggcccagtaatcgtttgaaaaagttaagagtacaaacacactcagttctgaaaatatctgagttacttttaattaacatataatcagagataaagcaaagccattatcagaagtataatgggtcatttgggaagatagcatttgatttgttgaaatgtgatttatgtgcaacttaaccttttataaagaaagacatatcttacttgcctttaaaaattaacttatgaatgaagccattttcaccttggggaacaaaagttaatatcataacatacagcgagctcactctctagcactgttatgtatgaaatggtgagtagtggaattttttagtaatttaaatttttttaaaattttactttttgtgtaaattcttcatagtgaatatatattttaagaaaaacaatgaagttattctaaaaagtaaaatgaaaagattctttacttttaacaaggataatacaatcaaatacccaagaatgtaaagactactcagtagaaaattagcaaaatactcgaatataagactactcggtagaaaattagcaaaagtctcaagcagttccaagaagaaatataaatgtagcaaaacatgtatagcttatctagtaataaaggaaatgcaaataaaaggtggtttggctttgttttgttttggcagaagagtactttcatattggtgaagactgacaaaatccactgttgggaaggatataagaaaatgagtaatcttatatgtggagttggagtatcatttgagtcaaccttttgagaggacagaaggtctatgctatacagatgaaaattttaaatgtagatactaccatttctgcagtcctggaatttgtccaaaggggcaattgcaaaactttgctaagatatatgtatacaggtttttggtaacaatttgcaacattggtaatgatagatattttaattcatttcagtgtttatcagtgggggattggataaattatgggtattttaattcaacagaaaactctgtatccaataaaatgatgccaaatagccatatttgtcatagaaagatacacataacaactttgggggaaaaaaactagttgcaaaatggcatgcctgtcaatttaacagccatttaatgctgctttctacatctgtatttttggataaaatcatggaagatattatatatcaatgtgtgaaaacatccaaatctggaaggttattcagtataatgttaacagtgcctatctttgggtagtgagatttctggtaatttttaccatcttcctacttttctkatttttttttttaaacaatgaaaatatatctatttcagaaatcgacaaagctattttttgaaatagtccctttaaaaaagtaacatgtctgttagagtatcatataagtggaatttttaagttatgaagagactgaggtctagttagttaataatctaatgagttacaagtatgtgagttggaagtgggttattcactgccatagccctgtgtgcctggcacatagaaggtgttcagaggtatagtctgttaaaatgaaagtagagtcatgtgtcgcttaacaatgaggatacatactgataaatgcatcattaggcgatttcgtcgttgtgtgaacatcatatttacacaaatctagatagcatagcctaccacacacctaggctgtgtggtatagcctattgcttctaggctgcaaacctgtactgcatgttactgtactaaatatgtaggaagttgtaacacaatggtatttgtgcatttaaacatagaaaagatacactaaaaatacagtgttataatgttatgggtccactgttatacatgctattcattattgaataaaatgtggttatttggcacatgactgtatagtgttataatgtttggaggaatatgctgcattcttaatgaaaaatgaagaaaattaaagtgagtgttatggtggctagtttacaaaaaacattctacctacttcaaagctgagaaaataaactttctgttatatttaaatttactaaaatatttgagggtctctatatgcctaatacgttcgtaaaatctaaaaagttgtcaagaaaaattacggcttaagatcatagaatattaccattagaagagcctgtaaacttctcataacatacagatcagtaggctgaaacaagagaggttaaaggacacacaaaggcaatacagaaatctcttctgttgaatgtttctgattttgactattcagccttatggaacacttttggagcgggaaggttaccacttggtaaggcaatgcattgtggtgttyaatggtgtagtggggttgaatagtgtttaccaacaattcttgttcaccaggaatctcagaatgtgaccttatttggagtaagggtctttgcaaatgtagttaagatgagaatatatgggattaagacagaccctcgattcaatgagtggtatctctggagtcccagaaactcagacacactcaaggaagaaaatcatgtgaagatggaggcagagattggagtgatgcagccaccagccaagaacaccaaggattgctgggagacatcagaaactagaaaggggcaaggacgattctcctctaaagccttcaaagggagcatggtcctgctgactccttgattttggaccttcagcctccagaactatgagagaatatatttctgttgttttaagccacccgatttgtggtactgtgttaatagccctaggaaactattacagatggttttgattatttcaaatttatttgttcattctttcaatcaaatttactgagcacttacatgccaggcactctgctaggtattacagagataaataagacattgttcctgccttcattcttggggtttgactcagtagaaaaagcagctttgtaaatagacagttgcaatacattttgatacatgttttcactagaatgttatatgaagttaagtgatggcacctgaagctaggagaacctgggatgttttacgaagtgagatctttgtgtttggtttcaaagatagagttgaaaccagcctccataggaattctgttttattctgccactgcagtgctatcagtcctacctagttcaaagcatatttagccggctgcaatagcctcctgtcactagaattctacctccacaatttggttgaagtaatttttaagatgcagtaagattgtgtcagtctattgaaaacatcagtgtgttctcatcacagtaaaacacaattcaaactccttttcatgatatggccccatgtgatctggttcctgctacctcttcaatctcttggcctttcacagtggtcttcctgctgtttgtgaatatgccagctttgttctggtctttgtctttgcattggctgttttgtcagactcaggctcttcccatggctccatgtcattcaagtgtcagcccagtctttgcagaggagccttccttgaccatcctcttcaaaatagcacccatcccccatctatcccattacctgttacacttcgttttatttatgacacacctcactaatttgatttgtatgtctctacctggcattcatctccgcctcaccccccaccttcaccgccattgaatatgtggtcagccaacaggagtcctgtttaccctattcactactgtgtccctagtgtacatcacatagtaagtgttctttacaaaagaataaagaaaaacttactcatttaatctcatgcataccatgtcagagcatatgtcaccataactttcctttggatgaatcccaaattgtattcttcccacctacctcctccaagattccaccttcatctttataccctttctgaattgccctttgtaatattggaactatcttaactctaaatatataaatataatatatgcaagtcttatttaagaatgcgttgaagtttagaaaagtaaggtgcccaaagtaacacagctataagtggtatttctaggatttaaacttagatctctctctaactaaagctcctctgctatgctggtgtggaggctgatgttcttggtaagtgggaggtataaatccagaattagaataggagccctgtccattggaatagaaatagcaaacattcattgtttgtttctataagaagaactgggtgatatttgctaacagaacctttaaaaagtaacctgaattttttttggactaaagttaatgtatgcttgttataaaatacatggaatatatgaaaaaatgtaaagaagtaaagaccatccatagttcttccactgagagataaccactattaacattttagaatattttaatcaagtattttttatgtaaaaatattgtgatgatttttgtgcataaatcttgaattttgaaatcatttcctaatgtaattactagatcaaagcatactgtcaaatttgtttccagaaagatgatgccaatttatatttccaatatatttagtttccatttctggaattttttaaatattaaacttgtaatatatgtttgttattaattacctgctctatctataggcatacctcagatattgtgggttcagactatcacagtaaagctaatatcacaataaagcaagtcacgtgaatcttttggtttccccatgcatataaaagttatgtttgcgctgtactgtagtctattaagtgtacagtagcattatgtctaataaaaacaatgtacacactttaatttaaaaatactttattgctgaaaaaggctaacagtcttctgagccttcatcaagttgtaatctttctgctggtcgagggtcttgcctcagttgatggctgctgactgatcagggtgggggttgctgaaggttgggtggctgtggcaatttcttaaaataggataacaatgacatttgctgcattgatggactttccctttcatgaaagatttttctgtggcatgtgatagtgtttaatagcatttttatccacaggcagaacttccaaaattgragtcagtcctctcaaaccctgctttatcaaccaagtttatgtaacatcctgaattctttgttgtcatttcagcagtgttcacagcatcttcaccaggagtaaatttcaactccggaaaccactttctttgctcatcagtaagaaggaattcctgattaaatttgagtgttatgtggacaagtttcatggcgccccagacaattacaatagtatcattaaagatcactatcacagatcaccataacaaatacaataattaaaaagtttgaaatattgtgacagttatcaaaatgtgacatagagataagaagtgagcagatgcagttgggaaaatggtgccagtagacttgctaggtgcagttgccacagaccttcattttgtaaaaaaaatgcagtgtctgaaaagcacaataaagcaaggcattcctgtatcttctgtgagttgtttctattggctcttgtttttgttgtcaacttagtatttttatatcaatttttgaattattttgtattgagaaagaacattttgtcatatttgtgggaaactttccctttttttgccttatttttaatgtcctacttgtactgccagatcttaactagtaagtctttagttgctgtaatgatgtaataatagcagtacgtttattattaataaaagtttttagtattttataaatctcgcacatgtaaactttttgtcttcaatatactagtttgataaagattttaatatattgcattggctaattgtcagtaattaatgactagttatctcttcatgtttttaatatatggtaaaggtgacaagataaatatttttctagacctgagaatgtggaatgggagggaaaaatttttatgcgtgtaactgaatgtactacagaagcactcagtgttaaagaaattgccacacataatctccccctaaatcaagtatttttaattttgtgatgttatagtaagaaaaatagaaaataagacccatttagacagattagttttctgaaacttttaagtttttaaggagaatttatatcttgcaaacatttaaagggatttttaaataataataacatacaagaggacaatttgaaggtaaaagcagaacatagattacctgcaatctgtagaaacatcattattcagtttaatgttttctttgtctcacaatgaaaattctccaaattcatttttggagaaaaactttgtggaagtgactttaaggattttggtggttggcctcagctcatttctatttgaggtgtggtttttcaaactttttagaggttttccaccctcttctccccatcagtggtatttttaaatgtctttattttaatgttaggacaccttagagcaggattcaagtgggctgtgcaagaagaaccactggaaatagaaaaataaaacttgaagattttacttgtatttatttttaactttaatttttttgatcctagttttatttattttccatagagtgtttgtgtatatagatagatagatagatagataaagttaatagataagataataagtgctttaaaattttggagactgctgcctcagataatctgttaaattactatgcattatttccacctcctccaaaaatgggagtgggggagcctgtatagaaatgtttgtaacacttcaaacatttgggggttcttgaagttcactcatcatacccctaggataccatgtatctataactttctttgcttcctgagtccagttgccctcagctttttctctactgatttatttgactttattaaccaactctggtttcagttcttaaggttacagcctaggattaactcttagcacagctgaccttgtccactgatctgttccgacttcagtatgtttggttagaatatgtgcttcttaagagtggatactgtttatttcacttttgtaagcccagtgcttcacaycaagtagatattagcaaatatagaaagtgaatcaaaccattatcaagtcctgtcagtgacccagtcctacggagagtccagctgtctgctctacccacacttcctcctttttctccttcccacaatgccatccctttctctgcggtggcattcagtcatttctgttctaaaataccatatgccatctcaaggtggctactgttttttcttagaatgacggaggatttctggagcacttcttgaagtggtatagcattcacagtctctcatataaagctgatggacggcaaggtcagaatgagggggcaggtttccagccccttaaagactttacaaaggtctctggatttctcctggggacttctttctttaatagatgggtccctgttgagtagcaggatgactataggcagcccttacctttggtaatctgtgggacataaccccaggtcaacataccctctttgtttcagcataaaagtatgggactagagagtactaagccaaaaggcagtggttataaaattctgcctgttaggaactggatcagcttgttcagttatgacaccattggtgtccagtagaaatatactgtgagccacatgtgtaattttaaattttgttgtagccatattttaaaaagtaaaatgaaacagacgaaaataattttatttaactcactgtatgtaaaactttatcaatttaacatgtaatcaaaattagaaagatactgatatattttatagtttttagataataagtcttcagaattcagtgtgtattgtctactggtagcacatgttgattctgactatcaccatttcaagtattctatagctacagatggctagtgattctcattggacagcatagctctaaaaatgaacatttatggtacatattgcttgggagtcggggtaccacttctatagatttgcagtagcaatatattacagggttatacacatttcttcctcttcaaaacttaagtttaatcgttggggaatatcaagatactgtataaattggctatatttttagagggattatatagtttcaaatatgagaggatggcaaagtttttacatttattttgctttctttgggttgggctgtatcttggtttaggggggagggaattttaaccttaaattgctattttatgagaagctatgcttttcacagcgggaacagtgctcatccttctttagacagatttttaggttaatggaagcttcataaagctttttaggtctggttctcatatctccttgcattgaggcattattttctcttaaaaaaaatacaaatatgaaaaaagggtttttttttgttttgttttgtttttttaaaaagtcaaaaaggcctattcagttatatggaggtagtcttactggttaaggctactagctagtgcccttgagaagtatgagtagataattcttattaaagaatgcagatgacactgatttgcagaccaagcaccttggatttggaatattggccagaggacccatgttttataatatgaaagtcaataggataaaaatttcttaaatctattttggaactgcttttcactgttttattatttatatcctcagttgtttaaatcaacaatttcagccaggcatggtggctcacgcctgtaatcccagcactttgggaggctgaggcgggtggatcatctaaggtcaggagttcgagaccagcctggccaacgtggtgaaaccctgtctttactaaaaatacaaaaattagcctggcatagtggtgtgcgtctgtagtcccagctacttgagaggctgaggcacgaggatcgcttgaacccaggaggcagaggttacagtgagtcaagattgcgccactgcannnnnnnnnnnnnnnnnnnnnnnnnnnnnnnnnnnnnnnnnnnnnnnnnnnnnnnnnnnnnnnnnnnnnnnnnnnnnnnnnnnnnnnnnnnnnnnnnnnnnnnnnnnnnnnnnnnnnnnnnnnnnnnnnnnnnnnnnnnnnnnnnnnnnnnnnnnnnnnnnnnnnnnnnnnnnnnnnnnnnnnnnnnnnnnnnnnnnnnnnnnnnnnnnnnnnnnnnnnnnnnnnnnnnnnnnnnnnnnnnnnnnnnnnnnnnnnnnnnnnnnnnnnnnnnnnnnnnnnnnnnnnnnnnnnnnnnnnnnnnnnnnnnnnnnnnnnnnnnnnnnnnnnnnnnnnnnnnnnnnnnnnnnnnnnnnnnnnnnnnnnnnnnnnnnnnnnnnnnnnnnnnnnnnnnnnnnnnnnnnnnnnnnnnnnnnnnnnnnnnnnnnnnnnnnnnnnnnnnnnnnnnnnnnnnnnnnnnnnnnnnnnnnnnnnnnnnnnnnnnnnnnnnnnnnnnnnnnnnnnnnnnnnnnnnnnnnnnnnnnnnnnnnnnnnnnnnnnnnnnnnnnnnnnnnnnnnnnnnnnnnnnnnnnnnnnnnnnnnnnnnnnnnnnnnnnnnnnnnnnnnnnnnnnnnnnnnnnnnnnnnnnnnnnnnnnnnnnnnnnnnnnnnatgtaatactttttaaaatgtggatttttacagttacttagtcttcataataagataacattttattttgctgtcatgtagtaggttggagatattctattctgctccatgaagtaatacagggatccacttgtcatggttgtacaatttcacacttcagtctgtggggaggagaaggaggaaattcaggcacagtttgccattgaggaggtgagcaggaagttctgctatttcttttactcacattgcatcattggtgagaacttagtgacacggctatgcctacctataagggaggctgggaaatggagcctatgtgactgattgtatgctcaggaagaacatgagaatagatgttttgggagacaactagtagtgtgccacaatttgaataaaattaatcttactaacttttgtcaatgggaagaattaagaagtttacaatggaataatttttgtaattttaacttttaaggattatgtaatgtatcagttgtgtgtaccatggttttattaatatctagctctgctaaatacttacattgctttaatttttttgctgttaacaataactttgtaaggacatgctaattacagctttctccatattttggtgttatttctttaaggatggtttttatagaagtggaattattggtccaaacaatttgaacattttaatagaatttttatttcttaaacaagttttcttttctttgagacagggtctcgctatgtcacccaggctggagtgcagtggtgtggtccgggctcactgcaaccctgaacgtccgtgcttaagtgatcctccctcctcagcctcagagcagctgggatcacaggcatgtgccaccacacccagctaacttaacatatatttttttgtagagacagtgtctcactatgttgcccaggctggtcttgaactcctggcctccagtcctttcaccttggcctcccaaagtgcctgcataacagacatgagcccttacacccacccttacattacttttgtaaagcagccatttcagtgctctggaggttgactaaaggccaattgtataaaactttgaaaaatgttatgctcttgaatttggagtgagaacagtgggagtcagtggccattctagcttgaggctactcacattcccccaattctgccccagcttggttggcatgaaggtactgccagtgagaagcaggacataaggacctcagtttgaagggggcttagttctttggagtggtgggtaatgttgtggatatgaatttccagaggtacaagggaagaccaggggctcagctcaaatagcctgaagattcagtagtgtttggggcaagaatattcctggatgaggctgtgcatgtgctcaacagagaccttagaaagcctaaggtattcacatacttttggctggttccaaaggtacatgcttgcacataggagacttgaaatttctctctttgggaagttcaactcagagcaaacttgaaaacaggctgaactttgaatgcacttccctgcccacacacatgcccatcaacaaagatggaagccttgctatcttgaggtatttgaacacagtctctgttgagtgtcacagtaactactaaattgtgcaaagggacaactaggaaggcaggcttaaaaatacaaaatgagaatatattaaaaaaatgagcagagatatcagtgattgtgtacaacagaggagacagattccacatatttgtcttgatcatgatgctaaacaaaaaaacaaaatggcaacactacctttaatggggaaaacagaattctgagtcactacattatctaaaatccctaggtttaacaacaaaaaaaattataagacgtaaagaaacagagggtgacgcatacacgaggaaaaaaaggtcagtagaaattgtctctgaatgtccctaaatactggatttagtaaagacttaaattactataaatatgtgaaaagaactaaaggaaatttaaagtataacagtgtcaacaaattgagattctcaacaagaatatagaaattatttttttaaataacaaaaaagctggctgggtgtggtggctcatgcctgtaatcctagcaccttgggaggccgaggcgggcggatcacgaggtcaggagattgagaccatcttggctaacacggtgaaaccccatctctactaaaaatacaaaaaattagctgggcgcagtggcaggcgcctgtaatcccagctactcaggaggctgaggcaggagaatggcgtgaacccgggaggcggagcttgcagtgagcagagatagtgccgctgcactccagcctgggcgacagagtgagactccatctcgaaaaaaaaaaaaaaaacactccttgatatgatgagatataatgagagggacttcacctctgtagtgttctcccctaaaacctataacctgagtccgatcatgagaaaacaacagataaagccaaactcaggcttattccataagagcacctgactagtactcatcaaacctgtcaaggtcatggaacacaaggaaaaactgagaaattattacagggcagaggagatcaaagagacatgatgactaaatgcaatgtggcatcgtgtattgaatcatgggcaggaaaataacagtagaaaaactggtgacaaataaagtctatatttttgttttgttgcaccaatggaaatttgttatttctgataaacgtaccatggttatgtaagacatttccattattatgtctgttaatgtaaatgtgttatatatagacatgtttgtgtatttgtagatgtgtgtttatgtatatggtatgtaagtataacacagttatgtaagatattaattagcattaggagaaaattttgacattagggaggcatatataggaacactctactatctttgcaacttttctgtaaataatttattgcaaagttaaaagttttaaaaatcaaatggaaattctagagttgaagaatacaatatctgaaactaaaaattcactagaggggctcgtagcagatttgagatggcaagaaaatgaatccatgaacaacagaccagtagaaattattcgatcttgaaaacatttgaaaaaggatggaagaaaattgaacagagctcagaaatctgtgaaaaacattaagtgtactacagatgtgtaatgagaatctcaaaaggagaaagggtcagaaaaatgaccttttggacaacttctcatatttgatgaaaaacattaaactacacatccagaaggtcagtgaatgtgactaggattaatacaaagagacccatgcctagacatagtcaaactcctgaaagataaagagagtatcttgaaagcagcaagagaaaatcaactcactacacaagagggaagcatcagcaatgactaagggctgctttctcatcagtattggtggaggcccaaggcagtggggtgacatattcaaagtgctggaagaagaaaactgtctgtgaagaagtctatatttagcaaaactaacctttaaaaatgaaggtgaaataaatacattcctacagaaagacagaatttgtagctatcagacctaccttataagaaatactaaaagattaagttctttaggttgataggaaatgacaccagatggaaactcaaatccacaggaagaaatgaagagcactggaaatgtcaatatgtaggttaatatagaagactataaatatattttttctcatctcttctttaaaaagcattgaattctatctaaaaaacaaatttagtatctaacattaccttctgcacattcgtcctagttgtaagcaaattgctttcacctctttgccttttgattcatagaatagactgtgataatgatactcaaaattttttgtttcaggattcttttccacttttattattctgagaactctaaagagcttttgtttatgtgggttttatgtactgatatttattgtattagaaattaaaactgagaaaagagctaaatattattcatttacaagaaataccaattacatgttaacataaataacatgtgttaaatgaaaatagatattttccaaaatgaagtaggagagtggcattgctttacattctcaaatctcattaacgtctaccttaatagaagacaactggatttcactttaggctttgcactgaatttgttatagtgtgttgctttggctgaagtaagtgaagaaaatctggccccactaagatgtagtcggaggtatattttaaaagccctttcatataatggtgaaaattctgtgatatgacagtaaaactcaagaagtgatagttttgtaaaagttagttacaacataggatctgaaaccatatcaacgaatttttttgtactgttacattaaaatccattattctatcaatggatcttagcaatgtataattctatctctaagaccctttgaaaaggtattgggtctccctgtatgtagcacactttgagaatcatctgactattctttcatttttaacatttattggaattttagtataaaatgaacacatctctcttttttcttaggaaaagttttaaaacagttaaagttgcttcagtgagcacagatattttttgtgtcatgactgggagttagttttgcttatcttttgcctagttcttaaatctcaaattttgtttcacaacttggtaatcagagaccagatcctgtctctaaagtgtaaaaaggtaaacaaaggttttctgtctgaagtaattagatttgaaaaaaactgctagggtaattgagccttgcattagaatgttatttaaatggtttaattagtatttgagatttctaaatttaatggctcttataagttagggcttagtttaaactctcgaaagctgggatcatagattatctatcattactatgtatttaatttaaaacctagttatatcaacatcaccattactgtgaatacattataaatattgtcaacattattgtaaatgtgtattattctttgtggcaaaattaattttttttttttttgagatggagtctcactctgtcacacagcctgaagtacagtggcgcaatctcagctcactgcaacctctgcctcctggtttcaagcaattctcctgcctcagcctcccgagtagctgggattacaggtgcccaccaccatgcccagctaatttttgtattttagtagaaacggggtttcaccatgttggccaggctggtcttgaactcctgacctcaggtgatccatcctcctcagcctcccaaaagtgctgggattacatgttggtcaggctggtctcgatctcctgacctcaggtgatctgtcctccttggcctcccaaaagtgctgggattataggcatgagccaccacacctggccaaaattaaataatttagaaggatataaaatacacttaaaggtaacttcttcttagcaattccccagagttaagcaatgtttatagtttcctgaatgctttttctgaaaatttgttcacatataaagatagacatcttcgtatgtattatatrtrtacgtattatatatatacacatatgaaagtccttttttttttttttttttttttttgagacggagtctcgctctgtcgcccaggctggagtgcagtggcgggatctcggctcactgcaagctccgcctcccgggttcacgccattctcctgcctcagcctcccaagtagctgggactacaggcgcccgccactacgcccggctaattttttgtatttttagtagagacggggtttcaccgttttagccgggatggtctcgatctcctgacctcgtgatccgcccgcctcggcctcccaaagtgctgggattacaggcgtgagccaccgcgcccggccgaaagtcctttttaagcaaatggaatcatactacatattgttctataaataaatgtatcttgcacatctttatatcagtataataggtcattttcatttaatcatctgcttagcatctgtgttactgcattggttatgtaagccaaggtcttcagaaaaaaaaaattcagtaatgaaaataccacttttaaaattagtttgcactcaaatgttgctcctgaccatttattagcaattttaataaaagagaataaaatcatttgcaaactgaaattgctcaacttgcaaaatatgcaggtgtttatgaagttcatgggtgtgatattaaagaactcaaagctattgacagttgaagaagagaaaattatcaaggttgatgatataatagatgctgtaagggagcctgatttgactaccagacgattaaagagaggaccttaggaaaatggatggaacccttcagaatttttgcaagaatatcttctttgtaattgtcccataagagaaaaacatgaaggatatccaatcgtgctattatacagttttgtcaaaaagattacattaaaaaataaagtcaatgcttgattcattcttttagtctaagaattttgcagttgaaattataacttaattttgtcaaatataaaataaacttgtttttatatttttgtcttatttttcaagtcaaaatttgaaaatcagctatcattttcaatatttacaattacattttggttcctggtctaagaagattcactaaatggtcttttcccagttcataccaatcatctttgaaaaactaggatttcataactttctatgaatggactgtaatttaatcaggtccctactaatcaagatgcttaggctgttaacagttttttggttgttgggtttcttgtatttttttttaatagtactttcaaacagtgctgcagtaaatattctgtgcatatatatttacattcctatgctaatatatctgtgacattcatttctagaagtggtagaacttgggtcagaagctatgtgcatttacaactttgatatctctgaaagggttatgctaacttacattctcactacaaaactgtatgttttgtatttttatttgtgtttttcacagtgcctactgtgtccaaatcttttccttttcttgaattagcacagtgagttcaaatggtgagggatatggtgttatccaaatctgtttagttcctgagcaagtgtagggacagtccagataatgagggttcatttgaaaatttattctaatgtgtttggttcctgagttggctagtgagcctttttgaacagtgcgggtatctgttgtttctttctcgttatctccatacccttactggcagtgaggtgttatcagtctttcgaatccttgccagtgtgataggttaaaataaaaaggtatctcattaggtttgttttgcttctattaaaagtggtgctatgcatgtttttatgttaatagcatttgtatttttcaaaaatacgtatctggccattatcttgttgcattgtaagagtaatataagaaaaataaggttttattacaatattaccaatattttatctaatgtcttgtcttttgactttttatggtagtttttttgtgtgtggtggttttatttaattaaatgtgtcattttttttccacttttaaggcttctggtgctatatcatgcttagaatattctccttactacttcaagataatacttccattgttgtgttcttatacagttcttttacattattctttatggttctgcttccacagtttgtttttcatgttttgatctttgctccatctggaatttattgtggtataaggaataaggcaggaatttagcctttcctcctctatttactagccagtttctccgaaatcatttattaaatactgcatcttttctccatttatttgaaacaccacctctatcacatgtgaaattcttgtgcatgtattttgttctattcctggacttttttttttttttttctgtttttgaaacggtctcgcgctgtcacccaggctggagtgcagtggtgcattcttggctcactgcagcctccacctcctgagttcaaatgatcctcccacctcagactcctgagtagccgggaccacagacacatgccactctcctggctaattttttgtattttttgtagagatggggttttgccatgttgcccaggctggtctccaactcctgggctcaactgatccacttgccttggcctcccaaagtgctgggattacaggtgtgagccacctcgcctggcctggactttctattcttttccattgatctgtctattcatgttccagtatcaaaccatttaaactaatagtttaataattaatttttgtatttgataggattatttttctcttttccccctccctgaccttgcgtgtatgtttatcattctagaagaatctatcatttgtcgaaaactcccttcttccctctaactacacaccaagtatttttactggaattgtttgaatttgtagtttagggttaattggcattattagaccatgtgagagttaaaaggattaatccaaataaagtgcctagagcagtgcctggcataaacagtcaaaggagaatagctgctgtgctggatattccttttatccttcaaatatattctctactcttcatcttgctctctgctgaaagaggctaacctctgtggaatcatccagcctctcatgccgtctggcttctcgttgggttggccaatgggaggcctagcaggagatgggcgggtgggaggagagagagtttagggtacatttcccagcttttccccctggagggctgtgtttgttcacctaaggccacatttcttgtcttctctcccacagtgagagtcttcactagggttcagtagtaacatcttcccactattgctagcccctgggtgctgcaccctggccagacctcagtaaacagtcccttcatgaagttctctttagttacctccttgagtttgtcatcagttttctgctgggaacctgactggtaaagttgctctcatcttcctcctttttttctccacttcctcctcctgttcattttaaccgctagcactgaatgttcctattccagtcttctctatccttcaatagagatttaaattttcttcatagaggcctttacaatttttgttgtttacacccagatttacttttatttggttgcagatataaattttttccctcattatgttttctacctaattggttgtatgtgggcaaactataataatttttgaattaattttgtaaatcagttgtatattaagtttattgtttctaatagtttttcagtcccttttcttgtctgtttcataatcacctgcaaataacagttttacctttttcttactttattaggaaatatttattgggaatgattgtttcttaaaatatgtttgaatattaggagtatttatatgggagtgattgtttattcacatgattttgggtcatttattgagatactttaagtttttcacctttgctctaatatagtaaattaccttagtggatattctaatattaatttatccttaaaaaataggatgatttttacttggttaaaatatattgttcttttaaaacaaaaaaaaatgtattattctattgatgactacttgctaatattttatttagggcttttacagcaatactttttttattacactttaagttctagggtatatgtgcacaacatgcaggtttgttacatatgtatacatgtgctgtgttggtttgctgcacccattaactcatcatttacattaggtatttcttctaatgctatccctcccccatccccccaccccatgacaggccctggtgtgtcacgttccccaccctgtgtccaagtgttctcattgttcaattcccacctatgagtgagaacatgcggtgtttggttttctgtccttgcgatagtttactcagaatgatggtttccagcttcatccatgtcgctacaaaggacaggaactcatccttttttgtggctgcatagtattccatggtgtatatgtgccacattttcttaatctagtctatcattgatggacatttgggttggttccaagtctttgctattgtcaatagtgctgcagtaaacatatgtgtgcatgtgtctttatagtagcgtgacttataatccttggggtatatacccagtaatgatatcgctgggtcaaatggtaattctagttctagatccttgaggaatcgccacactgtcttccacaatggttgaactaatttacactcccaccaacagtgtaaaagtgttcctatttctccacatcctctccagcacctgttgtttcctgactttttaatgatcaccattctaactagtgtgagatggtatctcattgtggttttgattagtatttctctgaccagtgatgatgagcattttttcatgtgtctgttggctgcataaatgtcttcttttgaaaagtgtctgttcatatcctttgcccactttgtgatggggtttgattttttcttgtaaatttgtttaagttctttgtagattctggatattagccttttgtcagatgggtagattgcaaaaattttctcccattctgtagattgcctgttcactctgatggtagtttcttttacagcaatatttcttacggaaatcaatctatagctttcttggcttttctagtgtcatgttgtggtaatgctaatctgttgacatccttggattttttgaggtaacttaaaaagagtaatgcagtaaagaaaatatttttaaaacttttttttgatacaaagatcttcaaagcactgagcaaattaacctgttaccagaaaaactggcatcataacttcctgattataaagctgtttttctgtatcaaagtggaacaaaatacggttgttataagacttttaatgtttatgtaatgaagcagtggcatatgataccatctttcatttgatagtcttcatatactttatctcatcctgtgaagaggaatgggtgttattagctccatttaacaaatgagaagatttaggttcagagagattgctccttgccagaggtcacatggctaataaggtttaactctagaaccagaaaccaaatcttctaactcttggtccagtgctacttcactttactatatcctctttaggagtagaggttatgcaatttcatgaatcagatcacatttttttcaaagcgattatgtgtgaagaatacagcacttttcttataatgcatattgtaagttatgactacattgtcttgaggtagagaacaagtttataactttgtattataaatagcaacaaagaatcacccagtttaagaactagtgctaccttcctacctgcaaggaattgtataggttcttcctagataaaatggaaggaaaaaaagtgtcttcttgtgctcacggacaaaaattactatactttacgtttcttcctcttgaaaatataaattgtatttttctttattactcttagtaagttaatacatgttcatcattaaaaatcaagggaaagaacatgcaaaaataataagaatcatctgtaatgttactacccagagataataacattgtgaacacattggtgtttagctcgacagtcctagtatctgttcattgaaatagattctttctcctactgtgtgtaatgttttataatcagtttgtttttaaaaaaaaacttataatgtcggtgattttccatattctgaaatattcttttatagaaataaatactggagacttttttctagtaaagtcttattagaaacccagatatatacagtattttgttggtaaaattcttattgtagtaacttattcattattattaactttattatgggaataagaaggtagatttgatgaaaagaaaactttgaaacagagttgtatccagtggtatgctgctaaatgtgtagcaactggatctctgaaagaaaaatggtgcttgccaatttctgctcattttaactactagcactgaatgttcctattccagtcttctctatacttcaatagagattaaatagtgtacatcctgttaccatggctgatttgaagctgtcagtgcagtatcactgaatgggggtggggaagacatgtacagaactggctttcctgaaacagtgtgagcaggctccagtatgacactcgttgtatcagccagaatttctttagtggcaagtaacaaaaaacttgttccaaattcttgtatacaataagatttacctagaagacccagggtttagtggctccagatatggttaattcagcagctcagaatcatcatcactgacccatgttctgtctcttttgctactgatgtaatacaacatgtcagtagaataaaaaaagccatgtgctcatcccagtagatgcaggaaaagcatttaacagaatctaacaccattttatgataaaaccatccagaaaactaggaatagaagggaacttcctcaacctgataaagggcatctacaagaaacccacagctaatattgtgcttactggtaaagactgggtgttttccctgtaggaccaggaacaaggtaagcatgtctgcttgtgttacttgtattcagcattgaactaaaggttctagccaagtcagttaggcaagaaaaataaaaaaacacatccagattggaaaggaaaaagtaaaactatctctagtcatagatgatatgattatctacatagaagatactaaggaatctactaaagaaattttagcactaataaatgagtttagcaaagttgcaggatgcaagatcaacatacagaaatcacttgtatttctgtacccttaaagtgaataacctgaaaatgaaatggaaacaactcaatttttaatagcatgaaaaagcataaaatacttaggaataaatttaacaaagggagtgcaaagtgtattgtctgaaaactacaaaacaatgttgaaagaaattgaagatctaaataaatggaagaatgtcccatgttcatggattggaaaacttaatattgttaaaatggcagtactccccaaattgatctacagattcagtatagtccctttcagaatcccagctgattgctgtagaaattgacaaagtgatttgaaaaaatatatggaattgcaagggacccaaaataacacaaacaatcttgaaacaaagaacaaagtaggactcacacttcctgatttcagaacttagtacagagcaatggtaatcaagacagtggggtgctggcataagcttagacacatagatcaatggaatagaattgagagtagaagaataaactaatgtgtctgtggtcagctgatttttgacaagggtaccaaggccatccaatggggaaagaatagtcttttcaacaaattgtgctaaacaactggacagccacatggaaaaggaatgcatttctgacatgtgctccaacttggatgaaggccagcgcagagcccaaactttgtgaatcagtaacacgtgtatggaacattcacttacatgcacagaggtgccaagggacagcctaatttaagattcatataaacacatttatctggcaacataagttaatattgtggtaggagtcccaccaagttaaaattctaaagtgtttgaatatgtgcatttttaaagaaagaatttgcataccataaattcacgcttttaagtgtatgattcagtggtttttagtttattcacaaagttgtgcaacctttactactctaattccagcacttttttatcacctcaaaaataaactctatactcaatagcactccccactccctcctccctcaacctgtggcaattaataatctactttctgtctctatgaatttacaaagtgaatatgtacttttttttttactacaaatttaaaatagttaaaagtgtccaagaattaagttattatcatttgggagatagtttgaaaatttatgttttgcagcatttacttcaaatgattgtaaatatttcgtacttctacttttacagttagtcaaccagtcattccttattgttggatatttagagtgtttacagtttttcactattataaacaatgctgtaatgaaaatctttgttgctaaatcttcatgcttatccatgattgttttcttaagattcctagaagtagtgtaactagttacagtgctaggtgcagctttaagtctttgataaacatggccaaattaccttccagaagtttgcaccaatttttgctcaaacagtgatgtaagaaagactcatataagttttaaagtataataatacagtaagtgactgttctgtggtgggcaggtctgtgcaaacctacccccaaagtttgagagagctgagaaggcggctaacatatccagtttctcagaaagaagcatttaatagggacttacgaacagaagccatgcctgtgtcttaggcagcagcaagacacgagggtgaatccacagtaccattatccctcaaaccagggcttatacaccatagggaaggggtgtacgtgattcagaaggaatgtgtgggacaactgaaaaacgataacatgaaggttgttttgacccaagagcaagattgatggtaagtccatgctgttacacaggaaatagataaactggaaatcttagaggccttcccagaacaggttaattagaagtcaacatggtagattagcaaccaagatggagttgccttagcctctacagcaccatattttattttctttatatagggtaatctctgctgctcaattaaatgtttacttgactacttttgaaaattgttttctgctcaacactttagaaacttttcagtgaacatgagtcataattttaaaatcaaatgtacttgaagcattacctcaaataagcaaagctactgtggtaccagtttgtatcccaggttctaaataaggggctctttaaatatatattagtcatcacccataaactgcttgtactatatccaactgattcttaactgttcatacaatgaattaaaactttcagctttggctgggcacagtgttatacctgtaatcccaacactttgggaggctgaggcaggaggattgcttgagtccaggagttccaaatcagcctgggcaatatagggagagtccatctctaccaaaaattttttcaaaaattagctgggcatggtggtacacaggtgtgacctcagctacttgagaggatgagagacaggaggatcacttgagcctaggaggtcatggctgcagtgagccttgatcacactactgtactccagcttgggtgacagagcaagatcccatctcaaaataaaagaaaacttggctgggcacggtggcttatgcctataatcccagcactgtgggaggccgaggcgggtagatcacttgaggtcaggagtttgaaaccagcctggccaacatggtgaaaccctgtctctactaaaaatagaaaaagctagcttggtgtggtggcacatgcctgtaatcctggctacttgggaggctgaggcaggataatagcttgaatccgggaggcagaggttgcagtgagctgatgttgcgccactgcactccagctgggcaatggaaacactgtcttcaaaaaaaaaaaaaaaaaaagcaacaaaatgaaactttcagctttctcaaattacttattttggggtttttaaagcttctccagtaaatcttgaaataagcaattctggtgtccaaatatgactgaatttcatttttctctttatacctatgttttagagatgttaaagttgacacgactttcttgggatggagggaattcattctaaaatgaggaaataaattgggtaaaagtatgacagtggtaatgccccagccatgttcaggaaatcatgagtaactatttggcttgaattagggtaggtatagggttaaaaaatgaaatattagaattaaatttgtgccatgagagagactttaaaaatgatattctgtctttgtaatacaaaatatcatgctgttggctagagaaggatgtgtgataaagtgctggtgtatgcagtttgataagagggttacatattgtatgttctttgctgtgtccccttttaaacctttgtcatatagatttttcttaccatattagtttgaattatatcagcatattaaaagagatatgttggtatactgaatgatgcatattttttctagaatgtgtatgtgtgtctgtgtgtaggagaggtgcaaggagagatgcatatacacacaccttgcctctgctggtttgttctcccaatcgtatcctctgtcctatggttcccaactgctggtggcaaatcccaagagaatttgggaattgacaggagcttcatgaattcatgtatatttcagaaagtaaacttaaaaactctcatacatatatataagcatatttcaaatataaatactgttgtgatgaattaaatccatttaaacataaattcacaataatgttatgctattttgtacttttctcagtggataccagaagaaaaaggcctatcttgtgggtgtgtgcaaactattttgccattaaaaggggtttgtcattcttcaaaagattaaacaccacctattccagccatgtcttgtctcctgaaagtaaatttgtgatttagactgtcaaacacttgggaaaatttctgactggtttaacattgttaaatgcacacctgattactgatgcagctgactgaaaattgactattacgttgagtaccaagagtgctggctagccagaacttgaaaaggggagcactatggtcaaacttttacttgataatgaatcttcagtttatttctttttaaagtaccatgtctgtctgttgctgtaacttagagaagctggccatttaaatgggagcaatgggaacaaggttgagtaatgtctgctctgtagagaggcagaaatcattttaaagaattgaatcaagtcatcgatatgcctgaatatattatcagagcactgtgtattaggctgttcttgctttgctacaaagaaatacctgagtctgagtaatttataaagaaaagaggtgtacttggctcacggttcagcaagctttataggaagcatggtgctggcatctgtttggcttctggtgaagcctcagggagctttcaatcatggcagaaggcaaagcaggaacaggcacattatgtggcaaaagcaggagcaagtgagagtgtggggagggggaggtgccacacacttttaaaacgaccagatgagtgaacccagaatgctcacttatcaacaaggggatggcccggaccctttcatcagggatccacccccatgatccaaacacctcccaccaggctgcacttccaacattggggattccatttcaacatgagattgggcagggacaaatatccgaactatatcatactagttaaagagagatgatttttcaggtttgcaagttttaattgatgactttatttggacttgcgagagaattggataaaaacaacttggttatcttcctggattatttttatgaataccatcagtatctattttaatccttgtaacaactgtccaagtaccttcccattatcctggtggagaaaactgaggtttagaatataacttgtatgaagactccgtagttaggaagagtaaacactggatttgaatcagtgatcagatgacccaaagccagtgctcccctggtccaattttaagagcatatttgtttgcatgaatttcagactagagagaattcctaactttaatgaattaacatgaaaatacttttttcttttgcatttttttattgtggtaaaatatgcctaacataaaacttgccattttaatgattttgaagtgcagaactttggtagcattaagtacattcacagtgttgtgcagtgatcaccattatctgttttctgaactttttcatcatcccaaacagaaattctgtaccccttaaacaataacttgctattccctgctctccccagcctctggcaacctctattctactttctgtgtttgtgaacaaagtattttcttaatgagaaagttttgttgatgttagatcatgtggcttaacttttaaatttctttgtagagtgttgatcataaatgaatttctttcgaacaagaagtaccatgtacttcaatgcaaattaagttatttttgacttcttaattttttgtctcttctattttaaacaaagtgttataattacatatgctaaatacagaaggcttcatgtcctcttactttattaaatgtaaacaaatggtgttaagagaaaatagttttttcctgaaccttactaaactgctttttatacactgttctagttagagttccttaagttacattgctgttagtcttaattgcctttgcaattaagctcatcaaaatgggtaacaaatccaagagatctttttgccagcctgcataaatttgtatcatgttctcctagctgatggttatcaaattgcacataatttgactcaagctattacttctatttatttatttacttatttttgattcaagctgttttttttttaaatgagtgtagaatataatgattattgctcattgtattccgttagtaagagttactggggggtgctctatactttggtcaggtccttggctttgtcagtttttgttccattgacccatgaggttgtgaaaatcctaaaactcaggttcacccactttaatttgaccttgagttgaaagccagcttcattactttacttgttgcattccttcttttactgtttttgtcagaataattattttcttaactgctcatggattcatttcagaatatattttcaatatcttccagcatttttagttgttttcagtggtagagttgtgtttctaaactagtccattgttggaaatggaagtattcttagagactttgctaaatagtttcattcactccacccagttaacagtaataataggaacacagattttgttttggtgtgttttttgtttttattttttgtcgcctttgggggtctcactgtgttgcccaggctggattggagtcactagtcaaagttgtgatcataggcctgaatttctgcctcaacctcctgagttgatgggacaaaaggggtgcacgactctatctgattctgccactgtgtatttttgactactaagtcagtgtctgttcgtgtctgttttagactcgaatgaaagaatttttgatgttagctgcaatagcttgctttcatcttctgaaggcactaaaggagcagatgaggggatggagagggtttgaacctaatgttctttttctagcctagcactggacgaaactttaagccctaaaaggagtttctgtttgatgttcgttgagcaagggccttcttgtcactttatttttatattgtattcaaagtggcgtctttctggttttaaccttactgaggtgtgagagggagaggaatgttactggtatgtatgtgtgtgagagagaatgttatagaaccaaactagggcctactcacctggcacagtaaaaccaaatacccacacagaggaacacagcaataggtgtttactgcagagtgctaagcagggaggacaggcagctaaatgctcaaatcctggcctccccagtgacttgcaggcaaggatttttaaacacaggggtgagtttcaggaaagcagaagctacaggcaaaatcatacttcaatacagggagattacacattggtttaagtttaaaaggttgagatatcttgaagcaggggcttacatgttgcaggtagattcaaagatcttcagatttgccattagttaaggaagagcagctttgtttaaaaatttagggtcagtagaaaaatgttaactggctagggggtgtgactttctccaagcactgcaggaagaaacttagaacaaaaagcagttataaagtttagttttcactgtctccttatctggactccaggtgccagtggatctgttaggtggggggtccgagcctctgaaagacaattcagggacatatgttcagatgttatttttagtttctatarggaaagcaaacatctctggagctttaacttctttggctgttgttttaggctactattaccttcttgttctagttagtagttacctctggggctagctagatgcctggaatttcccttgaaggaacttaaggattttcctttgtgagtccctaaaaaagggagtccctgctctgtctcaaaaaacagctatcttcaggggctgctatttagtttgaatagttaccaattgtgagttttggcctttggccctcccagtccttttctgtctgtgagcctaaaggttttgattttagctgtcttcacttctctccttgggtaatcctacttagcagkcttgattggcagaggattactccaggtccctctctccagcccagctctctttccaggccgtgagacccatgcccagccatgagtgaatatttccactcagttgtccttagtatccagacacttaacctctcctaacattaaagcaaatcaacctcttaaatcccgtcacatttctctattctcctgtttactaccctagtctagaccatcttctcttctggattaaggcaatagctttcttacagatctccctgaagagtgaagtcttccgctgtgttaatccattccactctgggacctagagtattttttccaaaatgtgtattagtctcctggatgaaacctctcagtgacttccttttgtctttgcatgcaattcagactccctattatggttgacagttttgattactcctgtggtctcaaccctcttgttgctcccaatttaactttaaattctattagtaattatgctaaatttcctctgggggttgggggtrgggtggattttgctcctctttctgaaattcagttttttgagggataattgacatacagtttgattaattttaacaagcaggtacactcatgcaactagtactccaatcaagatattgtactctttagtcactccaaaaagttcttttggggccctttgccataggttccccccagcccctgccccagacaaccactgatctgacttctatcactattgattagttttgcctgttagaacttcatataaatggaatcatagagtatactttctctttccctggcttctttcacttagctcagtgtttctgatatttatttatttcattgcatgtattagtagtttgccctatcttattgctgagtagtattctgttgtatggatatgccacaatttatccattcatcagttgatgaatgcttatgttgttaccagctttgacttttaggaataaaactggtatgaatatttgtgttcaagttatttttcatatatacattttaattagcatgagcgttctaattgctccacatccttgataacacgagatattgtcagttttcaattttagccattcttgtggttaatagtatcttgtagttacattggtttgcatttatctgatgattaaacatgttgagcatccatatgcatattggctattcgtatatcttctattgtgactcgtctgtttaaatctttagcttgtatttttaaattgggttgtcttattaagttatgagtttttaaatatggccaggcaacaaggtggctcacacctgtaatcccagcactttggaaggccgaggcgggtggatcacctgaactcaggagttcgagaccagcctggccaacatggtgaaaccccatctctagtaaaaatacaaaaattagctggggatggtggtgcatgtctttagtcctagctacttgggaggctgaggcaggagaattgcttgaacccgagaggtagaggttgcagtgagccaagattacgccactgcactgcactccagcagcctgggtgacagagcgagactccatctcaaaaaaaaaaaaatatatatatatatatatatatatatatgcacacacacacacatgtatatatttctggatactaattcttttattctgcctttttttggtacaagttctttatcagacttacatactacagataattttctctgagtctgtgcctttttatatcttaacactgtgttttgaagaacagaggtttttagttttagtgaagtccaattaacacattttttttttccttttgtgattggtgttcttgtgtctagaaatctttacttaaccctagattatggatatattctcatacattttcttagaaattttattattttagtctttatgtttaaatatataattcatttttaatttttttgtatggcatgagattgttagactcattttaaaatttattttattcatttaaaaaatatttatatagtttttccagtgtcatgtattgaaaagactatactttcccctgaattactttggtacctttgttgggcatcaaatttctaaaaaaaagtctgctgggattttgagactgcattgaatttatggaacaattaagggaaaattgacagtattgagtcttccagtccgtaaacatatgtattagtaactagggctgttaaaacaaagtatcaaaacctcggtggcttaaaacaacagaaattatctgtctcacacttctggaggctggaagtctgaaatcaagttgtcagccaaggccttgccccccggaggcagttgcctcttctagcttctttttagtggttgatagcaatccttggtgttctttggcttataaataaatcactacaatctctgcctctatcttcacatgggcttctcccctgtgcatttgtgtggtctgtccaaatttccctgttcttagagggacactagtcattggatttagagcccacactaacccagtatgccctcatcttaacttgattacatttgcaaaaacctgtttccaaatgaggtcacatttacaggcacctgggggttaggactttgacatatcttttggggggacacaattcaaccccatactatgttttgtagttttcattgtatggatcatgcatatatcctattgattttatccataagtattttatgtttatggttatgattgcaaatggtatttttaaaatttcattttccaatcattttttactaatatatagaaatacagttgatttttttaatatcaaacttgtgtctattgaccgtactaatttttattagttccagtagctcttttgtagggtctttaggattttctacatggacagtcatgttgtctgcacaaaagacagttttttctttgtttctaatttatatgccttatgctttttctttttgtggccttaatgtatttattggctttgactttcagtaccatgttgaagtggtagagcaactttgcttgtgatcttagggcaaaaatatttagtcttattgttaagtacaatgatggctatggatttttttaatagatgtcctttatatggtgaagaagttttcttttattcttagtttattaagattgtttatcataatgactattgaattttgtcaaatgcatttttcttaccaattgaactgattgtatgatttttcttaattctgttaatgttgaattacatttattgttttttgaatgctaaatcagctttagattcctaggataattgccacttctcataatgtatttcctttttatatgctaatggatttgatttactaatgttttctaaatgattgttttatctgtgtttataggggatattagtctatggttttattttcttgtaatgtcattgtctgcttttggattttcagcatttgattgctatgtatctaggtatagttttctttgtgtttttttrtgtttggagttcgtttaacctgctttgacatatggattgatagttgttatcagatgagaaaaatatttcatcattattgcttcaagtatgtttgctatcttttacattcctttttggagtctaattactccactgcttgatgttgtcccgcaggctcacaggttcagattcatgtttttttttttagtttttatttatttatttatttattttttggcttttgtttctctgtgtgcatcaggttaggtaatttctattgatcttttcttatattgtgttttgtttgctattaagcccaactgtgaatttcttagcatagatactgtatttttcagctatagatgatccatttttttagtttcttttttttcattgtgtacatgttttcctttaaatctttgtacatatttacaataacatttaagaagtctttgtctaccaattctattatcttaatcatttttgggtttgtttttattgaacactcccctccaccccagttttgaggtgacttttttattttccctactaatttgtaatttttgatttgtcatcttttaaagaatgttaaattctgttctggtaggcagtttagtgacttgcagatccacctgatccctttacgcttattgtaagttttgttagtgtttctgatagggctttctacgctgatggactagtacctcctaacggtatggcatttctggaatctctatggaatgtcccaggtattccctgaggtctcttctctgtggttggttggaactctgaactctcctgtagttgttctttccctggtagttattatttttctggcctcatggagtctaatcctacacatactcagcttagtattcagccaaagattcaaggggatccaccatcagacttctggagctccttgtcctcacagctccctcctctctggcattcagccctgcaaattccaggtacctcagcctccctgagctgcagtctctgtgtccttagctttgtgagaccgctgtgctctgcaggattgtgccttgctttcaggtttggcgactgcctataggaaggagcctgggcaatgttagggcttaccttggttttttccattctctcaaggatcaaagtcctgcagtacttgctgtctaacatctgaaaacaatgtttcatgtatctcatattgaaagcttaactttttagttgtttatataatgggagagctagtccagtaccagttaccttataatttattgaatcttgtttatgttttttgctggcgaagatttagctcacctctgataatttgtacatattgctctttctgcctggggctcttttccccactgcctgtacctgacaagctcttattcatcatttttaaggatgagattacattgtcgcatttttcctggtagtcttctttgatgttaacaaatcctgggttaattgtcatacttggtacttatagcactctggatttacatgtaattgtaattacttgttgttatgctgattgtttgtagcccccacaaaaacttaagctgtgtaaaggcaaggactgtgtctcattcacattatttcccttgtgcctaacacagtgaagatctcaatctctgtgtgtgtgtctctctcttttgcaatgttatatgtggagatgaaatagtactattcaattcaaagtgcctcaagtatacttcagaaaatttttggacttctacactggtttggagagacaggcaattatggacagttaccattcttattcagaagtcttcttttaaaatttatcctatttctgccaagattggtgtttttctccttaatgtctatgttataatttatatttgcctacaagtattggtctgtttataatactacttataggtgaagttttttttttttccctcacctacaaatcggtctcattaaaaaaagtatctttcaagataaacactgtaaccacttagttgccatagtagttttgaggaagttcatgtggcttggtcttgtggggtgtggtggtgggtgcactgtcccattgaggagcctttgataacagtagctttcttagaaagacttctttcattattaaattgaagaaggtgcattcatgccatgctaatcttatttatcttttgtgtatggaaaaagaatgtttccatttttcatttcacagagttgtgagtgatagcattttcagattactagtacaaaaatttgtcatgatttggttcaagtttgccatcagtttaaagtttaaaattaaaattgttagcctataagcacttatgagctgtcagttacattactgtagagccttagaattggcagagaccttgaaagtcatttgttctagcctacccgaaaagcccctgaacagaggctagtttgaggcagatccttacatgattttaattgtagaaagttgtaagaagctgtagaaagttcttaggaaataagagtcaaattctgtttttaacaaacttgtgctcctggtcctacttctgccttatgtaatttcccaaaataaaggtagacttcttcttaggttattttatgttacagcagtttaacacctattctgtctttctttttgtttctttgcctaaagcttcagttttaaaactattccttatattgtatccctgtcsacattaaaatatgcatgtaatcatgcatcatctgcagtggtattcagaactgaattcattcttatgtggcccgtattgaagatagtggagcatccttgatttggaaacgtacctgatctcattgcctcctaagattgtcttcacttattatctctcatttagaatttaaccatatttgcctttttttttttttttaggaaactttaaaaacttattttcattgttttataggtatgcaatttattgtatatcaaaatgcagacaattttttttaaatttttgaaattcagcatactgacatacctttaatttttttaattttgtaattcagcatgctgatatacctattgtgttttatatgcagatttgctatatgtttttctgatctacatgccagtaaataaactgtggaacaagacaagatctaatgaagagtcttgttggctacttctagaattcttccactagtttgaagaattgggtgggaaagtatttccgcccaaatactttatctctgggtgtgtttgttcaactaggagtgtgcctaattgtagcatggggctctgtttggttcttaagaatgtcaccagagactttctaagtgcttttagtatcataaggtgatgttttctggacctgaagacttgaattgttggtaaagtgtcaagatttttttttttacttctttatactaggagaaatcacatgacattttcatcaaatattcggatactacatgacaaaaaattcagagctctaagtcagtattacagaaaggtcttaattgaatggcaaaactctcatagtaccatagcttttaaataattttttgttatggaagcttttttcttagtttcatgtcacttaaaattcataccatttgaagaataataagccttggtttttagtaaaagaaataaaccaaaaccttactctgatttattacttgttattaaagtgggctggaattcaaaacaatgagagcacagttggagggtttttactatagygttcacattttttctgtcgcaaatttggttatagttttctacagacactacatttgtataaagaactctgtgatagactatttctgtccatgggattccaaaattatagacactgatrtcaatgcagatgaggttagcctaatttgggcaagagagggacatgccgagtctctgtatggatagctaaaggctattgccaagattgacaggtgtcctgtgagtggcagagagccccagggataaaattttctcttggattacttctctaagaaacaatgaacaaagtcatatttttttcctattgatcacactcataaaatagtgaggtctgcttttaactcagcttttctgatattagccttataaaccccagaaaggtaaaaagttttatactttcttcttatagtatcaaattctgtttttgaaaattttaagtgtatcctatgcattaatttttctagaatagtcacctgatttattactttgccatgtttcactaaggatatgagacaactacgaaaacagttaatgtaaaagaatacatttgttgttagtgtaaaagaggtaactttatagaataataaactacatgatccamctctggaaaaataaacttttaggagaattatctaagttataagcataatatttatggtaaaagagattttatagtaatttgaaacagcatttgtttttatttcatcttattgaaattttattattattaaaatttaattataaatcaccaagataagtagtactaagtgtatctcaaaataagaaaaagtcttacagccattaggtttatgacattgagaaagttgagattactactttaagaaaaactgtgttgcctgagatttttgtaagatttgagtgatgtaaatgtgtcattagcaatgaaagctttacgacttcaggcataaactcagtagctgtttctgttctaataggaaattttctgatctgggggagaattgtgtcttgattatctctgtattaccgtgtcagacattagtggaaattaggaagtggatgctgggggaagcattttagggagccaacctattaactagcgtgagaaatgaaagccaagagcctaatcctgctgagaatsggaggtttctcagggcacttgcaaacacagtgcaagttcccttcatggaccattgtgattgcagttaggtctagagttaaggtgaagctggagtgtttagggcattctcatttctaggttttaaatacagtagaatttaattctgatttagcaaaaatttgttgagagtccactacgagctagctgttcgtttatagataccacttacctcccatgaaggggagaaaaattaaggcacagagaagtggtgatttgcccatggcagtaaagctgggaaataaatctaggctctgaacttcaagcacagtagagttttgagatggtagaaataatctagatagaaattcatttcagtgagacaacttttagaactgcctttcttacttcctctttttaaatcttcatctcaattatgatttttcaagtattgtaccaaaaatagccatcttgtattcgctttccaaaacttgactctttttgagcagttgattggaagagaaatgtgaaggtgggaagggtagcatccctgggccaagcatcgaggttataggctggtttggagtgtatagcccaggccagagtggcagagaatgacctcgaagccaggggcccaggctgcacagcctcttacagatgaccgccagtgtttccctggagcattggcctaagatacactctgctgctctgtctcatgcctaggcatccttcaagtttagttgctagaaccttactggaagacagagtaatcagagaccttgacggtctcatattaaagctagtctcatggcaaaaattaaaatgttatctggatttatgcaaagatgagtattataacttgttagttctgtagcaagaagtgaaaattttatggccatgtgttaagaatggtttcaggttaggaaaatttggatttacacctataaatttaatttgcacttcattttgacaagcctagaactgacttctcttttaaataagctctttgtactgaggattagataatgaaaataatattattatttgaactattttggttcttttcaaatattttaggatcatcatttgtgtacattgataatcagatgacgttgtcttgtcatggactgcagtcacctcctgagtgttcttcagtcagcccatgccatcttcacctttctctgggacctctgcagtggtggcctgactgcccatccagcccctaccccacctccctatacttgaccaaagtggtctttttaaaaagcaaaatctactacagtacttcagtagattgaaattcagacaagacacccccacatggccctcgtagggcctggcctctgctccccagggctgcagcgtcatctggctcctcctccctgcccttgagccgccctggtctttctgtctctcagacttgcttggcttggttttgtctcaccctttggccctcacgcctgttcttcgtctgcacaatctgtcttctgtcttcacaattcttgcaccatcacactttatctcagggtcatttcagagattctggaagaagtccttcacctcttaactaggtcagattcaggtttgttggcgtttcctacgtctgcttcatcgcatttgttacagttgcaattttgtgtttatttacataatttgattaatgtacactccaactaaattgcaagcaccacaagggcaggaaccttgtctgcttttacttgatgcttatatccctgccatctggtgcagagcctggtacatattagcagcttaataaatatttgctgaatacttgaatgaaagtttcacaaaaggcattttctcagcagtattatctgcagcctctcggttatgaagatggatgaatagaagcatactttgttattagaaagctcacttacagccgcgagaacaagatctgtaccaaaaatataagttagattgcagttagtgcttgaaaataatatgtccttaattatttgaaaatgcactattagactggctttttttcagtaagtccaaaatgagtgaattataatgttaagaagcatagataatatgacagcctctaatattcataaagtagttctatccctaaaagaaataaaaagttgaacaaatttcaattaaaaattgaaaagatggaataaaatgcattaatattttaaaatgtcacaggacactgtgcttgtgaaacagttctatgtgaaaagaatgaagaaatttttagtactgccacacattttttgaaagttgttttaaggcactctgttagtactaagattgtagaagtgtttggggctggcctgaggcctcctttgcctacattttgttagactgttaggtcagcgctcactaaagtcttttccctcccctcttccaacattacttaggcagttctaccccaaccctgcggttgtggcatgaagcatgcgctgggtaagaaggctggctgggtagtgcattcccagaggagtcaggtgatcactgttggaaggcagctgcttgaggtccaaggcagtcagtgtcccctctcttttgcctcgggacagctggtatttatcagactcctaagaagttttccttgctccctagtagaagagagagattatgcagcgggcttttgattgatccaatgggaattacattgatctggtgtctggcyttggttcttatcaagtggatcacctctaaggtaggccatctttatttttaggatggtgacattcatcattagtttacatatttgataggaattaaatagctcgattttctcctccttttgcctcagtttttattctctgattaaaagagctgtgagtttcatctgtcgaccaaagggcttaaatttactatttgtagtttttgttcttatcccacattatttcttcttaagggctttttataatatctttcctcagtatcaaagcagcattcctcagtatcactgccttaaagaagtttttatgactaaagaagtttaacttttaagattataaaattaagttatacttttggtgtatatattttaaacattctctcggagaaaatgtaataacacttgtgtatttaaagtataatgttgaggatttctaaacaattataaactttttaaaaacgaaaaaccaccgtctatcatgttttctcctaaggtcttgctactgctaaaatacgtgccttagctataatataatgacataaatgtaggattacatatatgttgtttttgaagttgaattctaaatgtcaggcttgagaaattcttgatagaatgctagctagccatttgccatctggagaagggtctaaaactaaagtaaaacatatttaaaattatactctttgaaattatttttttctattcttctataaaaatgattatatctttcatccaccacacagctttttttctttctagattgagaaactgaatttttaaggctatcacttagaaacaaagcttctataaagttaattttctttctcaagcaagattttaatacctgctatgtaattttccacgtttaaacataatgttttaagcataattatctcttggtcttcttttcttagtgaatatgattgaagaaatctcttaaagaaaaataatgtatttaaattttaaaatctttgtgttttaaaagttaagaattaattttgttgcagtgacagctattttcttgtttttaaaggattggcttgccaagttattgaatgaaggtcaagttaatgttaataatgcattagttgtcttgtgggtgttttcagagactttactttttttttttcccccccctgtagagatgaggtcttactatgttgcccaggctggtctcaaactcctgggctcaagcaatcctcctacctcaactttccaaagaactgagatgtgagacaatgcacctggcctctagactttactcttttaattgccaccaaaaaattaaattgtttttaaacaaaaacaatgctaatattttatttttaaaaaaactgttgaaaaaaggaagaagaatgggaaggatactgtttggtagatcagtgcaatatttgaatactttaggcactcaagtacaagcatgtttttctagcatatgtaagatgactactctgaaaaagctcattttgctatgtcagaggaaattgacttcacaactttggctgggcttcatcttttgctatattattattttttcggtaatgttgccaaaaattttgttcagtgctcccgtgtttaagccctttaaccatcagtttatgaatctgcaaaatggaactaataaagcctaccttatagagatcttgtgtgggttgaatgagattttgtgcgaaaacacttggaacatttttttggcacaaggagcacagcaagtgttagttaatatattatcactcttaccgtgtaatggaaatggcacttgcttttgctaataaatcatttagtggaaaacttggaacaaaataaaaacaatgacacttaaaatatctttgctgggttttaaaacatgtctgtctttaaaagttatgtattaactaatattgggaacaacttttacaccttttatcatttaccttcaagtcaaatcttttgtggaagaatgattcaccctaattcaaggtgagtcttaccagggcactcagaactcctgttagtgaggcagtgggtcctttggtgctttacagtttaacttgtttgtgctactgctgacagtttctgattagctcagcctcgcccatgttttgacctatactagttcgctttacaagctgttcccaggatggctaaattagaaaagtcacgagtagaagcctctcagttatttccattcactggtgaagtgaggtgggaatgtgggtgatagctctgagagttttatgactgacagtgtgacacaggattttgatgaaatttgttttactgttattaaaaagaaaattctagtagtatatggtttttaaaatgataatctttaaagaaatcttttttacatttgcagcagtcttatataaaagtagatataattatttttaaaacaacatgattctaacacggaggtcaaatttttattgttagaactcataatttatagtgttttttccaaaatgagttactgtagattattctaccttcctactttagattattctacctagtgagagaacttaatattcattttaattttaattcttaagtgggtaggtgaatgaattatcactcaggatgtatttgttgatgggttcagatatttattttaaagtccattctttaaaaacagttttggtctcatttggatttatttcataaaagctatgtcttgtggttcagtatagcatttaagctaagtatttgtagactagccttacttaaattagtaccttataatgaatagaataacttggatattttgcacagacctatgtaatttgtatctattttaaaattaaactctgccttttttgcttaagaaattaagattaatacagaccctaccattttaatatctaaattagtgcttctataaatgaggctaaaatgattaccttagttaagtttagtatgccatggtgttatctagactatgcgcattacccagtttttgacttaatattattttgtgatatttaacagagagctaatattggtcagtctttcacaatccttaatgtgtgaagtgataaatattttacctttctaaatagcaactgttatagtaaatgcccttcctacattaaaaaaaaatcataataataatgtcaactcccctcctaaagagaactgttagagataacaccttaaaatttattttaacaagttatttatctgagttgttactggacaccatcaaattgataggtcatgacaagttattacatagtatctgcagtttcattaatttgctttagctgataggaatatttattgccacatatgcccttcctaggctactaggtttacccctagattggtggtattgaggagagacctgtaatctagtaagctaaatatgttggggaggggatttgcacagtagctgtgagtggtgcctttttacagtggctgtttgctccagagtaaataccatgaaacactgcaggaggcttccttaggatattctattagtggaagacactttaagcatgatgccagaagtgtagtctatatgatttggtcccttgggatttaagatcatgcttttctttgtagtagatttttattttacttttcaattttaattttatttattttgtgaatatatgataattacacacactgcaagactcaaaaagtgcaaagataaacattgaaaagcccctctcctacctctgtatccctcagcctccttggagacacccagtggtgatagttagaattttatctttgtttgaaatttttgttcctcttatatttcatgaactgtgtttttttaagaacttgtgaaatcatgtaagattttagttgatatttttctcttaaaagataagcattaaggatataataacttaatgttttgggtagttcttttgcacactaaatccaagtgagggctttcagtaaattttcaatataataattgtaaaaaatgtgattttttttttggagatttgtaggtatatgttgaggagttgtaaatcccatgccagagttttgtgagggaagatgatcattaatctgatatgtaaaaatacaatctcattgctttaatatgtatttctttagttaatgaagtcaagcatttttttatattttttttaaccttgtgaatagtatatttatgtcctacctgtttttctacagctttttagtctttttctaattgatttgtaagacagttaaaatttttttttttggtgggaggatagtagaggaaaattagccctttgtcatatcagttgaactcacttttctgggtttgaagtktatcctttactttgtttgtgataacttttaccatcataatttaacttttaagtggccaaatttgtcagtgtttcatgacttagggatttttataggacagttagaaaggccttcctatctaagactttttaaaatacagtcctgttttcttttaatattttcatgctttaatttttaacatatgaatcattgttccatgtgtaatatattttggagcaggaaggtaataatatagctttatgtttttctagatagcaccacttaatctaacattatttattaaaaatcagtatttcctccacagattctaagtcctgtatttatcatatacagaatcactcttggatttgcttctagagtctctattgattattttctctatttctttgcaatgtcacactactttgttaatatcccatggtgctagtccattcccctcgcccctttttttgagacagtctcactttgtctctcaagctgaagtgcagtggtgccatcctagctcactgcagcctccaactcctaggctcaagggatcctcctgcctcagcctcccaagtatctgggattacaggtgtgtgccaccatgcctggcctattactacttaaacttttttttttgcttgttaattcaactgattttactgatcacttttgacatgctaggcactgttctaaatgttgggatctatcctagatctgggaatatagcagtgactgaaaaccctgcctccacagagcttagattttatgtctaagctctggtttgatcaattttatcttcctcatttttaaatctatccttatttatatccattctgttagtgactaatttattcatcaatttatttatcagttattattaatttgcaataagtccatttagtcatttatttaccaaatttttatttagaacttaactaaataataggtcctgttttagagaccagggatgcagtgatgactaagatagacaaagtttctgctcttgtggagcttttagtaacacgcagacaagacaacttcagctgtagctacacagaggactgaggtagggagctgtggaaggggatggcttctaggtggctgtagatttggtagtcagggaatccctttctgaagagatgatgctttgtctagaagctgcatggtaagaagggaacagtgaagcagtgatccaggatgagggaacagcacttggaaaggctgtatatttggtgtagatgaggaaaagccaggagaccggcttggctgtctcctagcagtgggggaggccacagtacaagagggcaggcaggtcacagatgactctcgaaagtaacgtttggggagccccaagtgtgatggagagcctttggaggattttgagcaggagctgaagtgcttacttttgcttttatgtgaagcatggaatggggaccaaagagatgcagcaggaaagccagtggattgtcctttcctttcttttctattaatatttggcaactcctatcgatcccttttgagtcaacacagatgtcaccccaaaaccyttactgacttactcaaacagattaaatttccaaagagaggctgcatgtgtctctctttgtatccatttttatggtagttcttaaccatactgtattacaattatttgtcgtccccgtaccccagagatttcaagaacaggtaccatagctaatttcattttgtgtatccaacttctcttgcacagtgcttcacaaataataaatgatgaatacatgtktgttgagttgaattttgtatcatatttaattgtcatgtattataatgtgtatttttttttctagaggcgtggagctatttcctatgacagttctgatcagastgcattatacattcgtatgctaggtaagcattatttattttataccaatatcagttaattttgttattacctgttgttatttgagtttgaggtatctttcattagatagcttttcatcactgtttgtagtagaaataacctattcatggagtttagagtctggaaaccaatattgaatgtgatgtgaataaagagaggcattttagagttataggtaattgagaaatctttggcctaataactgggacactgtcattagtacacagtttcgaattgcatcttgaacattcttcatagaaaatagtcttagatttgtagagtggctaaataccaaatagatgaatgccagcatggacaaaggtgaggctgtgaaacacctgctcagatagtcctgtcactagatgtattttgttctcagttggctggtaaggaagaccatttgacttcttctagttctggtgcttaaattttttatatattagtcaattccgcaaggtaaaatgaatttagatatgtgcgtatatatgtctaattttctttttctctttttctctgtgccagatttctgtcttcatccatgtctccttcatccttgcactttaactcatattattaaacatgcatattaagattccaacaggcaaatttattcattttttgttagaagtctctcccacgactcctcctcagctcagaattcctccctcaactttatgatactgatccatccttattcttcacctacttttgttttcttctttgccaccttcactaattccttttcatacttttaagctgaagtgttccccagagttctattgtaactcctattcctttttgtcctctttattttatcttgtgtgtcttacctgcctcagttcttttctactccagtacatatttttcccccacaaatgtgcakcctttttctccttgctgtctccatctttctctaacaaacatgttcaggattccgctgtccttaagacagagctttggattcatattttctttaactctgtagaacatctccatgtaaatgttatggatacctcaaacttaacatgtctaaagcaaaacatttgtgttccccatgtctgtgttctgcagtcttttgccatctcagtaaatataactccactcttcctgtcatcaggtcagaaacctcagagtcatttttttacttcctatttcttacacactccatattgaattcatcagcagatcctactggttgatacctttaaatacacccaaatctcaccacaccaatgctgttaccaccacatttattacttactccttaactggaggccctgtgtctacctgtgttccctgactctgttctcatcacacctagagtgaaccttttcagacataatcatctgactcctctattcagaagtctctgatggccacaaaggtccagcatgatctgactccactgcctctccaccccacccccaccagttcccctcactcaccttgctcctgccacgccagcctcttgccttgccattgactgtgccaagcatgcttctgtcttggggagttttacactggctcttcctccctggctcactgcctcacttcctgtaggtccctgcccagatgcctccttttcagtgaggccttctctgactgcactaatgagtcaccctcccctgctcctctctcgccattcctcttacctttagttttctccatgtaactcatcatcttccatagactgaaatttggtatttattatttgtgtcatcacacaaaaagataagcttcatgaggacagtgacagggactttatgtattttgctcactgctttatttccagtgcttgacatgttaacatttgttgcagcatgaaggaatggccacaggacaggtgactagtcattgtgggatggaattatagtcgatgaagtgagccttggaggaagtcatggtcctactcagagaaacagagtaagcaggagtgccctctaggcaagccaaattgcaagagcaaagggatagaggctgaagatttaaaggttatgaacttggaggctgtaaaagtgtagtgagaacagtactgtctttggaacccatggagctgggtttaaatcctgacttaccctttgtactagctttgtggcatggagcatgctatttaacttctcaaagtcaagtttttgaatctgtaaaatgaggattaagattcctatctctgagggtygatgagagaagaaaataaaataatgcctgtaaaacacgaaaaagagtgtctagaacatggttgctatggttatgttgctgtatagaaaaataaatctggaagtaatgtgggcacatgtaggaacgacactgagcttccaaagaccaaagtttaagactcagctaaaggccttggatgtacccactgtcaatgagaaaagagtgattaatcagattgactttaaaacaaagtctttaacattttaagtttttacacatctatgaaattgtaaactgcttaaaaataagtaatgtattttccatttttcatatcccttttagcccatagtatagtgctaggcacagagtcggctcttaataaatatgttgcttctttctgcagctttctaaagttttgtgctgaggattttcaacctcctgtaaaacagatattgcttcccaatggcctttttttaaaaaaaaaaaaatgttgcccatgtgaataatatattaggtcatcttatcatacacttgaatcctctttcagaaggctaacttattaaaatatagattataataattattataggggtagatttaaaaaaaatcctcctcattcagccttacaattaattactgagattttgtgaacccttttgaataaatcagctcttaactacctgttccacatatatgatcagtgggctgttacttatgaatatgataccacacggacctttgttgcatatggaagcttcttcccgaatgacaaccttctaaacttatgttttattcttgattctgtccaggagatgtacgtgtaaggagccgagcagratttgaatcagaaagaagaggttctcacccatatattgattttcgtattttccactgtaagtgttggtagacatgawgtttctcggattttcactacaaattttaataaaattacacagttttccaagggaaaaagaataccagaaaaaaaactctattatgtttggaatgtttttaaaacctaggtcatgtaaatgacactatttctaggtaatcttagtaaatacttagagacaattagaagaggaagatactaaaatatgaaagttgatatagcttttctcttctcctctaatttattacttttttttctttaaaaagatttttttaagttgttttattccaaatggttagtcttcactacttcaactgaaatgtttttgtgcaaatgatattttataaaggtatttcagtagtttaacttatcttttaggtttatttgaaaatgtatatcacctttaaagatgcttggtagaatgcctatttcaaaaacaagcattctttgtggatttggcctatagtggagggaaaggggaaaaaacagaacttctaaacaccttaaatattaaacatattaaatctgtttctggaggagttccactttcagtaatgttagctaaagtaatttggattgatgctctaaaaaatgagaaaactattcaaaatgtaaaagacatgtatgtattcaaatgtatctgaatgctattgaggcagagagataagtccagaacttcaggccacttttcttcttaatagcatgtactgattctgggaaaggtggattagaagatgggcagagctttttatggacacttagggatagagaaacaaaaacaggtgtttagagcccagcaaggctggaaggttggtgctggtaaaccattcaggcttcggttggaatcctaaagtgctatgtcttagaaataaatcccaactttgaaatatctcactcaccgaatacattaatgtgatctgtgactcatgtttcttgccacctgcaggacagagatgttactcatcccttaagtttgctagctgcaaacagagccctgggacatgtcctaggcagagagtagtcagggctttgtattcttgagacatcagtaagaatgtgtagggacactcggggcctcggaggaggattacctctcccagtaacaaatgaccccaaaacttattggcataaaayaaccactatttttaatgctcatgattccgagaatcaggaattcagtcagggtatatatcaagtttggcttgcttgtgctctacagtgtcttggtctttgattggaatggttcagacagcttaaaaatggctgggatggtgacactggagccttatgtccagggccttggtccatctcatgtcatcttccagggctggaacctccaagatggcttctgcactcttaggtgtggtgccaacatttttctctctccataaatggcagtctcagggaagtcttagggtagttggactaattacatggcagctactttctcccagagcaagcatttcaagaaagaggaagtgtgaggactcatagtgtctgaagatctgggcccagaccctggcataacatcgcatttccatattctgttgatgagctgtgtcacacagcttgctcagggtcatggagggaagacacagccctctcccaaccctggttgtcaaagggatgcaaggtcaaaacctttttaatctcccatctgtaatctggcacaaaatgttttgaaaaagtaattaaggtcctagaaggagaggagagggaaaaatgtagcaggagcagtctttaaagaagcaatggctgagaaatctctagaagttggtaaaagacattaagggacagattcaggaagtattataaatctcaagcagagtaacattaaaagaaaatcacacctaagtgtaccagagtataactatgaaaaccaaaatcaaagacaaagaattaaaagtaatgaggggtagtggagtattactttcaaaggagcaattatgagattgccagaaacagatggtttcattttccacagaaactaaaaaggtagaagacaaaggaaaaatagctctgatgtgctagaaaaaaataaactgtcaaactaaaaatatcatccacaaactctgaaaaggatacacttcacaatttgttacgtaaggctagcatgtaatcttgatactacaacatgacaaggttgtggaaagaacaaaaaataacagccaaatcgctcatgaatatagaggaaacatcctaaataacatattatcaaattatatctataacacaaagggagaattaatatattttgacctaattagtatttttccaggaatataagattggtttaacagtgaaaaatcaatcagtgtaattcactatattaataaaataaaggagaaaagttgtggctcacgcttgtaatcccagcactttgggaggctgaggcgggcggatcatctgaggtcgggagttcgagaccagcctgaccaacatagagaaaccccgtctctactaaaaatacaaaattagccaggcgtggtggtgcatgcctgtaatcccagctacttgggaggccgaggcaggagaatcgcttgaacccaggaggcagaggttgcggttagccaggattgcattgcactccagtctgggcaacaagaacaaaactctgtctcaaaaaaaaaaaaaaaaaaaaaagcatttgataaaattgagtatttgttctttcttataattctgagcaagctaggaacagagaaaaacttaaacagtctgaaacattagctacaaaacccatagcaaacatcatatttaatgcgcaatattaaaacattctttctgcgatgagaaatcaagaatatctttcatcatctttcctattcagtattgtttcagaggttctggccagtatagtaatgcaagaaaaagaaatgaaaagtataaggactagaaaagaaaaagtatcatttttatggatgacatagttatgtacttagaaaattgttaggattaataagtgaagttagcagttttcctggatacaaagtcagtacgtagtgggagttctgtaaagtaacagtgacaaaattaacataatatataatttgaatttgtatcaagaaacatcaaatatgtagggataaatctaactaaagatatgtataactctacatagaaaactgtaagtgattacatagaaaaattaaagataacttaaatagaaatatatatactgttatttatggattggaggattcartatttaaagatgccagtttttcttctttcctaaattgatctgtataggtttagtgaaatcacagtgaaaaaatcccagctccaagaatagccaagacaattaggaagaagaatgaaattatggagtttacatctcatagatatcaaacttattataaacaataataattaagtcaaggtgatgttaattcaaggactgacaatagaataaaggcatactatagaatccagaaataacccacacatatatggatatttgatttgtgacaagtgtggtaatgaagtaggtagaagataaataatgcaatgggtagaaatagcaatttcactaaatcaagtgaatcttggaccctgttcacaccatgcattaaaaaaaatcaaattttggttgattaactttgccaaattatgctgataattcaggtaagatgaggaatgctaaatcaataacattgatttagcaatgtggatatggtgtaggggaagcctgaaattaaagtgaatttaagagagaacagaaagatgggaattagatatagcaagtataaacaactcttttagagacttttgctacaaagaaaagggaagaggccgggcatggtggctcacgcccgtaatctagcactttggaaagccgaggcaggtggatcacctgaggtcaggagtttaagaccagcctggccaacatggtgaaactccatctctactaaaaatagtaaaaattagccaggtgcagtggtgcgtgcctgtaatcccagccactcaggaggctgaggcaggagaatcactcgaacctgggaggcggaggttgcagttagccaagatcacaccacttcactcaagccttggctacagagcgagacttcgtctcaaagaaaagggaagaaataagagaggcaactgacagaggacgtaggatcactgatactagaaattaatagcaaagctagaaaacaaaaaggcctggccacctggaaatttttcaaattctgaaataagtacttcttgggtcaaagaggtagaccataaaaacgtgataattaaagactagatgggaaaatctatgaaattcagctaatgcagtgcttgcaggaaaattcatagccttaaaaaatacttatattcataaatgagaaagaatgaaataagtcaactaagtagtccaactcaagaaattagaaaaataatatcaaaatacactaagaaaagataaagtagttgttaaagataaaaaacagcaatcaatgaactagtaaactaaaataaaagtagaactctgtaactaagagctggttgtttgcaataaaagagataagttgctagctaacttaaagattgaatggagctaacgtgcatactcaaaaamtaagaggggaaaacaccacagataaagagaaaatataagaatcraaatggactattttgcttgaccccaaaaatatatttgaacacttgtatgatccagaaaattttcttaaaaattacagtttatcagaactgaatgtagaaaacataaattaatccagcagtacttaaagtgcggtctgtgaggttaaaactattttcatcgtaatactaagatgttatttgccttttttgcttttattctctctcaaggatacagtggagttttccaaggctgcatgatgtgtgatgtctcagtaaattcagtgtattagcagatatgagaaacagccggacgtttctcattaaatttttctttgttttggaaaatatagttatttttaataaaaatgttatttatgttacatgttatgggtttatagtaataaattttttaaataaatttaaacaatatttagccattagatattttcaaataaattttgttttatatatttttaaattaactaaatatttaaatattaaaaatttaatttctatggtaaatacttaatttctgtggtaaatattgatagctataacccatataaagttaaagttatttgggttgtcaataatttttaagagtgcgaaagactcctgagaaccaatatgttagagaaagttgtgtaagagttatctctctaaaagcctgagggccagagaattttataggcaaattatttaagatctttaaaagattgatgattagtttcaaagctctttaaactttctgattataaagagggaaccattcagagtaattttataaagcaaatataactttttataatattctcactataaatgtcagtacaaaaaatcttttaaaaatatttattagcatgaggatttccaacagcacgaaagagtaatacttcagcgatagtggggttgttttagaaaaggaagcaaggatgattcaatacatagtttttctgcaataacgtagcagaaactgataacattggttgcttccaggatagaaactgggtggcttgaggagatgggaggggaaagaaacttagttgtagaccttttgaattttgactcatgtgaacgtattgctcattggaaagtttaagtaaaagtatgttttggtattgcaataaataaggattggctgtgggtaaggaaatcagtaaaagagttaagtctaaatattgatatttgtataaagaaatgtacaattgtatttggagtctccagcctaccccctaacattcactgaatttagtaaaataagagaattcgaaaaatrtaactgttagaagttttaaatagggggcataatgggacgttttagtgggagagggacattaaaaatgattagattgttagaagtatctctaatgaaattaaaataggatatgtactatctaaatcactaggaaaccaggagcaaataaaataaatctaaaagacaagagaaggaagaccaaacatatcaatgttagtaataaagataaatgggttaaatattccttttaagagataaagaaggtcaaattggataataaatgaaacttaatgacaaaaaaatggttcaaattaatatgaagcagaaccgggcttgaggttttggtatctatacttatatcctgatccagtgatgtggaagctttgtagtatggtatttagaacactggaggcagctcagtgttaagagcagcagattatcctctcgatctcatcatgctgttcataaaaggtgacaaatgtgtaagttgtagttgaaaatggactcttgctatagacttggtcctatagttatkacaaaacaagaatatgtctctttaagccaccatggtaatataatttagaggagttttttttaatagagaaaaatgcattattctttgctgcttataataggttctgcttatcacacagcttggaattctttttgaaattgtaatctagtgtgttttgtgaaatgtgatctaatcagagaaatgagcacgtgctcctgctatgactaaaatctgttagtcatcttcaggccttcccttcttccactgactcctctgattgtcctaaacattagcctgaacttgttctctgcaggagttagcttacaaaactttttcttaatttttttttttgagacagagtctcaatctgtcgcccaggctggagtgcagtggcacgatctcagctcactgcagcctccgtctcccaggttcaagtgattctcccacctcagcctcccaagtagctgggattacaggtgtgtgccaccacacctggctaatttttttttgtatttttattaaagatagggtttcaccatattggtcagactggtcttgaactcctgacctcaagtgatctgcctgccttggcctcccaaagtgctgggattacaggcatgaaccaccgcacctggccagtttaaccctaggcttgagtttatgcacagtaaagttgagctgccttggacttaatgaccaggaggattatccttcttttatttccagttatgaatcttaaggtttcttccttgtggggtatttcctttctcccttgcactagttgaagatatcagtagtttatttacctggaggcaaagttgtccttttttacccctcttcttccctgtgaagttccttggattaggaatttgtgatttatgccacaaacccattcacttcctataatctcagacttggcaaagatacaaacactaaagcaaccttgcaggatgtgtttaaaccttcagaggtactgaagctttgaaagactataatgtgccctctaccttgtatagaattaaaaataagactattttccctaatgatacaaaaatttacatgcatgctgaaataaaaatagtttctaggtgttctgattgcaaaattctggatatgtgtattaaattcattaaagctagaatgttctctgcttacagctcctcaacccacttattttctgcacctgtttacttttatcctaaactcactgttaatttccctgttgtaaaattgttgtctctttctgttctttcattgcttaaatccagtctcattaaatcctttgggtttttgtatgcttacatagcctattctattcatctcttttctgcctcgttatctcttattctccttgaaccagtcatttatcaccactgtctgaggttgttctggtattctcctaactaaccgttatccctgctttcaggatatttccttctttcttcttcttctttttttttttttttttttttttgagagatggagtctcggagtctcgatctgttgcccaggctggagtgcagtggctcaatcgtggctcactgcagcctccaccttccaggttcaagcgattctcctgcctcagcctcccaagtagctgggattacaggcacccaccaccacgcctggctaacctttgtatttttagtagagatggggtttcaccatgttggccaggctggtctcgaactcttacctcaggtgatccgcccgccctggcctcccaaagtgctgggattacatgcgtgagccaccgcgtgagccactgcgtgcgcccagccaggattatctgttctttgatccatcctctaccctttacccagggtcaggtctttttaaagagagagagagcttaaaatatagagggagatcgatatcaacaggttaaagacatatgatattagtgttatttattaaaactattcataattttttaatttcttctatgtgctgtatctgtgggtgctgctgaatttttttttagatgttgaaatatttttaacttatttctggagtgtgattttctccatgttgaacatattctgtttactaaatttacctagaaattagacatctatattgcaatattgaacttttcttttaagattttttatatgtacagtttattataagcaacgtttgggtttatattatgaagatacattctcctgtgagccagctgatatctaagatacctgaccagttaaggagcrattataggcctcaaaattaacaaaagaaggacctcaaccattttattatgtagatgccacaatatttcctaccatgaattattgtggtttggattgtttttgtcatagtccttattctcttaaggcttataaatttatcttcagtaggatttgccataggccttcttgtccagcaggttctgactttaacgagtcttttctgaaagggtatgaagaggcaaaagaagaaaatcagttgagcacagaaacacattaaacacaagaaacaatgctaaacctcacatctaaacaaattcctatcaaatttagaaacttaggcaatcagctaaggagctggtggaagaagttcaaattgttacaggctttctggagggcagtttggtaatatgtatcacctttaaactttttttctctttgatttcaccactagaaatgtatgcaaatggagtcatcatatataaatgttaatgtatgtgcaaagacattcactttcaccttgtttataataggaacatgtattaagttatggtgttattcactgaagtgtttagaggttgatatggtttggctgtgtcccctcccaaatctcatcttgaattgtagcttccataattcccatgtgttctgggaggggcccagtgggaggtaattgaatcatcagggcagttctcccccatactgttctcgtggtagtgaataagtctcacgaaatctgatgattttataagaggtttcccttttgcttggctctcattcacccttgcctgctgccaggtaagacgtggcttttgccttctgccctgattatgaggcctccccagccacatggaactgtgagtccatcaaacctctttttctttataaattacccagtctcaggtatgtctttatcagcagcgttgaaaacagactaatacagaggtgaaggactagagtgcttataacctaccctcaaatgttcagaaaaaagaattaggtgtggcacacacacacacacacacacacacacacacacacacacacagaagtatactgcaagtaataagacaaatgttaacaatgcatatctgagaatagagtgttctttatactatttatttttgtaactttttgtatgtgttttgaaattatctctggacaaaaatttttaagagtatggtattatgaaattattcacctaattaaaaatcacgggtttatactcagatcacatatttgtggggtttttctgttttgtttttgtttttttgagacagagtttcactcttgtcacccaggctggagtgcaatggcacaatcttggctcattgcaatctccacttcctgggttcaagcaattctcctgcctcaacctcctgagtagcaaggattacgggcaatcactaccatgcccggctaatatttgtattttcagtagagacggggtttcactatgttggccaggctggtgtcaaactcctgacctcaagtcatctgcctgcgtcagcctcccaaagtgctgggattacaggtatgagctaccgcacccagtctagatcacatatttgttaattaactgaaatttaggccagttctgtagttatttataaagagccgagagagttcaagctttgggaagacattttgaaactaacttgtattcgtggttacacaagatagagggattttgatgattacgaattcttctagccaagaagtagtttctcaaagatctggtacaaatatgctctcagggttagtttggcagctttgttgcaatgattctgatttaatcaataaattctgtaatttttaagttaagtcatttctcagatggccgtatcatgcagactttcataacaattttttaaaaaaaatatgtgcatgcatctgttacttttttttttttttttttttttgagactgagtcttgctctgtcacctaggctggagtgcagtggcgtgatcttagcacactgcaaccaccaactccctggttcaagcaattctcatgcctcagcctcccaagtagctgggattacaggcgcctgccatcacgcccggctaatttttgtatttttagtagagacggggtttcaccatgttggccaggctggtcttgaactcctgacctcaagtgatctgcctacctcagccttccaaagtgctgggattacaggtgtgagccacctcgcctggccatgtctgttacttttagtgggctcttcatgccagaataaaaaaatttcctcagatagcatctgtcactaaagaagttttctgatgcattcttgacctttttgtattatttttgattatatcttttattatctattattctagcacagaaggtaatatttatcatacatatttacatagtttatgagtttgagaaagggattttttacataaagaagtcattgttaacatcactttaggatgaccagaaacattcttggagtattttcttgaaatagtattttcttctctgggaaatgttctattttgtgattaaaagagaatacaagtatcagtaagaatttgtattagtctgtttttacgctgctgataaagacattccaagattgggcaatctacaaaagaaagaggtttattagacttatagctccacctggctggggaggcctcacaattacggccgaaggtgaaaggcacatctcacatggcagcagacaaggcaagagaggttgtgcagggaaactcccctttttaaaaccatgagatctcctgagacttattcactatcatgagaattagcacccccatgattcaactacctcctaccaggtccctcccacaacacatgggaattgtgggagttacaattcaagatgagatttgggtgggggcacagccaaaccatatcagaattatactagtggcttgtgttaagagatttggaatattttagctcattaaagatactgtttaaatttgtggatgctcactgtgtaggaaaaaccctcaaactgtgttttccctctgctctcacaccaccatggcagtcatcaacacagaagacttctgtgaccaaatgtgtggaggggtttctcccaacacaccaagcggtggacaccaactgggtgtcctctaattcagttccaacactgtctacctggagggagtgtcagaccccacaggttaagggctcagttcctaaacctgcctcccagcccccaaaacccagacaccagtcacaagtcctggcctctggaacttctgaccgaccagcttcaggttgcggttcccaggaccctctttttgggttggattaatttgctggagcagctcacagaattcagggaaacacttatatttaccagtttattatcaaggatattgcaaaggatccagatgaagagatgtgtagggtgaggtatgggggaaggggtgcagaacttccatgccttccctgggacgccaccctccaagaaactctacatgttaagctatgtggaagcacccagaacccagtcctcttgggtttttatgaaagcttcttgaggtcagcattccttcccccagattcccccagggtatggggcaagaccctctctggggagagtcttaagactcacagtcagaaaggccagggaagattgaaacaggtgaaaggaggataggagaatattggagagattgtttccttaggcctaacacacccaacgttttaataaaagactgtaacaagggatataggagttagcctgggactgtggatgaaaaccaatatatacatcataatactacactcccattagttaaaaacttttattcaacctgatagaaggactgtggttgcttatacaacagaaagcacagtctctggtcatgcagttggaaatgtatcatgacaactaatccataaacgttcatactatgctggtcattgatgatttatttacgtaacaaaaatctgaggttcatgcttcatgtttaacctctttgccctgtgtctgtcccccaaagctgtgcatgcaatcctgtgttggtgttgagggctacaagattagccacaaataaaggatctaattcttctaagtgtatgacgtatttaatatataccttttttaaaaaacaagattcagttggatgtagtggtccaggcgttgttgttgttgttgttgttgttgttgttgttgttttgaatgagcagacttatttctgacaaatatttaaactgaaaatgttggcattaatacttttccaagacccattgagaaacttcctcaactctcatcccattttaaaaagattcctaatcctcagacctgccctatatctaagtattacacccattaaggtacagatttgtggtcctcctgcatttaattaactgattcttgatgccctttcattcagctaacgttaacctgtttggtctcctgactgatgctgggaaaatttaagtttgaggcacttaataacaatgagcaatgggtagccccaacaaattgggaggaaaagataatggaggaagaggagagagggagaaatagagagagggtgatgcatgggagagaggaagagactgacgtcaatgctgggctgaccatagagtggtttacactgaaaggtgcccagagctttctacgtgttctaacaggctcccttgctcctaagcatcattttttactatggcagcgtctccttactaggcttctcaagttcctgctttcattcaactccataaagataaccaggaggctccttgtttagtttcactcttttgagtaagtaacttcagtcagctaaagtaagagtcgcaaatattcctacagagattttcctctgttcaattagccatatacttggtctcttgaaataagatattttgagtcctaaattaagtgaacacgaaataaattccatattgatttttttgtcaaaaattcatctcggctgggcatggtggctcacgcctgtaatcccagcactttgggaggccaaggcgggtggatcacctgaggtcaggagttcaagaccagcctggccaacatggcgaaaccccatctctactaaaaatacaaaaattagctgggcgtggtggcgggcgcctgtaatcccagctgctcgggaggctgaggcaggagaatggcatgaacccaagaggcggaggttgcagtgagttgagatagtgccactgcactccagcctgggtgacagagtgacactccatctcaaaaaataaataaataaaatttcatctcttttctgctctaaatttgtctctaaacttaataaatcattctttagttacacattatttttaacgtataagagatactaatgtcttaaacattaaagaattattataatcccattatgcatgcccattagaatttctagtctgatgtgttcttttgaacaattctggcatgattattaaatagtaatggaagttgtcagcttgacagttcttttcatggaatttgccaaagctcattgacgtcatccagactggagggcctggtctctctgccaacatccagcaagatgtaatacaaggaatatgttttctttcagtgtttctcatgtcaacacaaatgcagttttttccattttctttttactcttgggacacagtcatgttccagtccatgtaagcatgtttcgcccattatcttttttttttttttttttttttttttttttttgaaacggagtctcgctttgtcgcccaagctggagtgcagtggcgggatctcggctcactgcaagctccgcctcccgggttcacgccattctcctgcctcagcctcccgagtagctgggactacaggcgcccgccactacgcccggctaattttttgtatttttagtagagacggggtttcaccgttttagccgggatggtctcgatctcctgacctcgtgatccgcccgcctcggcctcccaaagtgctgggattacaggcgtgagccaccgcgcccggctcgcccattatcttgagctctgtattcattttaacagttaacttcatcccatgctagggcagcagggggacctttcaggatatttacattgtagcctataagctcttcactttaggcttttagttttattcatctttttatttctggtctctggcagcttctggctcatagtagagactgagtatatttttattgcattgaattgactatggctgtgtatctcctacagttagattttacaggggcctgtttgtagttctctccatataatctgtattaactgttaaccaagttcaggctggttgctgcctttctgttgaatcatgtgtctcatattgtctttattacaatgactgtatgaaagcatacagaattttccctaaatttcgcttagttcctcatgtgtatttgatttggagttgtttcctgtttttctgataagactgtgttagactttgattatttgtttcatacttagttgtattatgacatgaaagaagatgtttcttaaaagctcatatcgtactgattatattgtcttagtttatctcagtctttaatatctagtaactcccatacaagggtagattctgttatatttggaagcttttagtgcttttccccttttctttaggtgtacaaatagtttgctcagcatttccctcagccatgcagctttcttcattatagtatttttctcttatctaactttcatactgtactgcatggtcattagtttcctattcacaagcatacttttttccaaccattatctgtttggtctgcgaaagcagctatccatcatttgtaatttagtctctcattcagactcgagtttgccagcctgtgcttgtagttatggtattgtagactaagatcttatttgtctggagtgtctattaaattttaatttcttcccagtcgttcatttctcttgaagtcatatcaggttgtttcagagcaaacatttctttaatagtttatggcgatatcccaggaaacaataatcccatgtccctttttcctgtcttttctatcacccatgctcctatctcttttctattgtaattccttacaaagtggtgcttgtagagattagcactgctgtactgaattgcattaggacacagagcattctgccccatgtatgtgcagtttttaaaaaaactttcacctagtttccaggtgattcrtaagtgcctacatttaagaaccactaatctttgtttcttgtttgtcctaaagttgaaagaacagaatgttctgtcttctaaatatcttccttaactcgatagcataaattaggaaattgaccgatacgtattggaccttaatcttaatacagtttaatggtagtttaattttacttgtgctttggcaagttggtgacattggaaattcagctttattttgtatgttaagttttgaaggaactgcattaagactttgtgtactttgcttttcatctttctttctcagcttactttaataagggaattaagaatttaatgactgaggagctatgctatgttcagcgtctgagtttcagcataagagggatccagcatatcccacatcccagctctgaagagtaaaaatatgcctaacccataacaataagagtaatcaatctttttttttttgagacggagtttcactcttgttgcccaggttgtagtgcaatggcatgatctcggctcacctcaaccttcgcctcctgggttcaagtgattctcctgcctcagcctcctaagtagctgggattacagacctgcgccaccacgcccagctaattttgtatttttagtagagacagggtttcaccatgttggtcaggctggtctcgaacttctgacctcaggtgatccacccgcctcagcctcccaaagtgctgggattaacaggcgtgagccaccgtatgtaacctttttatagggttttatgtctcccatatccctattttattaaattttttcaaagtgaacattgaattctgcataatctaaaacttagatcaatgttatatgtataacaaatattccctcccttaagcaattcttttgggagggaatattggttgtacacataacattaatctaatttttagattacgagtggctaatttatttctttggttcatactgaagtttaagctgtatattcattttatacacacacacacacacacacacacacacacacacacacacacacattgtttttatataaatataaagagatggaggctcactatgttgcccaggctggtctcgaactcctgggctcaagcaatcctcccacctcagcttcccataatgctgggattataggtttgagccaccatacttggccaatatacttgttttatggtaatgagattgtatgcttattctgaaatattttaaatgtttccaattatttctctagcacattagttttcaggatgaagttatactgtcatgaaaaataaatctggttttgttaaaaaaaatggtatgacatatttaaaaatatttgatattcataataatgaccatgtctattaattttaagtgctttttctttgccaaaaatgtgcaaagacatactgcatatattatctcatttaatctttaacagtcttgtggggcctattttacagatgaagaactgaggattagagaccttaactaacctgtttaatgtcacagaactagtaaaagtggcagaattgggattcaaactcagatgtgtctaattcctaagcccctgtgttctcatgtactttgctgctctgcctctccatgtcagcacgtgctgctctactaatgaccattgctgcagacacctagctgattttcccctattcattcatgcatgctaaatgtaaaatttttttctaagaaaatgtgtcccgtagatgtagggtaagtgtaattacccgatgttaacaataggcttttagataccactcctgttctttttgagggaaatcaagagaaagaaagggaaggttaggatatagaacatcttcaggtttgttttaataccagcgccattcaacatgaccttgccctagattagagttaaaaccttataggactgaattaaaaaaattttaaacaataatctccaagggtaattcatgattagtatcttcatgattgttaaggtggcagatacagtggctgcagggctccctctcgtggactgttaaagcaagtagtggtcgggtctcaagagccagaggcttttctgttaaaggcctcttttgtgacatcggttgtgggaaaacatgcgatttgggtgatagaaaagaatctgtggaagagttagagtaatactgctccagttgtgttggttcttcagcgcttgtttccttgacctggggcttgtatttcctgtctactttctaatatgaggaggggaaagcaacagaaaaacatgtcttttacattcgtctgctatcccactttttgtgatttggcttagagaagctaagaatcattaactggaagtaatacccgtgatcactaagtcacagtgttcatttaggtttggtggaggctggtagtttgttcttggtcacatagtgaagtaatgtgatattttagaaaagagccagcaaagccaactgctctttaatagtaacttgattaattcactgagccctgttggctttctaagctggattggaatgtaggtaaccatgtaaactagcacaagcctgggacttaaaataaatagtccaggcttgatggaagtggagctttaataaaggcaagtttaatctgttgtgcattatgctgtgaaataaataatttgtctcatgtcacagtgagctcatgagaatattggtaagagggccaggcgtggtggctcatgcctgtaatcctagcactttgggaggccaaggcaggtggatcacgaggtcaggagttcaagaccagcctggccaacatggtgaaaccccatctctactaaaaatacaaacwttagctgggcatggtggtgcgtgcctgtaatcccagctactcgggaggctgaggcaggagaattgcttgaatcaggacctgggaggcggaggttgcagtgagctgagattgcgccactgcactctagcctacgccacagggcgagactccgtctaaaaaaaaaaaaaagaaaaaacaatattggtaagaaggtcagatattgtgtaatacagccagagggtgagctttttagtaattgttcggatgaaagtactagttaaattctcatagtcactcttgttcccagttcctcatgtatcytctctcctgtattcctaaatgatgttaattattcagcttgatatcctttcctctctgtagtggcctctatttgcttttttcactcaggtttcgctaacctgctgacagaacacctgggtgtaaccttcccagcactaccctccttcctttccccataataggagtctaggcttttccaaagtaagaattttacatgtcattactccaggaaaacagtgtctgtgtgatgaggggagtgggggtgtggagtaaacatgaagaaactaaaaatttccaacagtcttaaagtgatctcatcatgttttatccttgatttatagttcttgatcccttttcttagatcatattttggaagcaattctaggacagttctggaaatctctctaattttcttttagtacttagtctccagtttggcatgggttttagacactattgaagtgcactcctattccttgttctacttctgaatacttattctaagggaatctattaggttgtgtacaaaaatttagttataaggatctttactgcagaattgtttgtaagcaaaataaaagtttgaaacagttttatagcaaaaatattaagtgatgataatttcatacattagactaatacatggctagtaaaagtgatgttacatatatttattggcatgaaaagataatagatacatttttgttttgttttgttttgaggagtctcactcttgcccaggctggagtgcagtrgcacgatcttagctcactgcaacctctacttcccaggttcaaatgattctcctgtttcagcctctcaagtagctggtattacaggcgaccaccaccacacccagataatttttgcatttttagtagagatggggtttcaccatattagccaggctagtcttgaactcctgacctcaagtgatctgcctgcctcgggctcccaaagtgctaggattataggtgtgagccaccgtgctcagctgataaattctgatgtgaaaaaaatagtattaactttcttagatgaaagaaaaattatacgtatatatacatatagaaaataattcttaaaaaaaaaatctagagtaccagggtggggtgttaacaatggttgtttctggacagttaagctctcacatgcaacctttccccattctcaaacctaggctgagcaaaagagagggtttgggatgtctcattccagaaaggacctttaggaaaaaccccctttaaaagaaaggggtgaatgccattcaaaatgacagagtaagaacctccaggggttgatctctccactgaaacaactacccaagtagaaaaaatgaccagaatcaactatttcagcattctgggccctgattggacacttagagtcaccaagagagtacttgttgaagggagaggccactgttttttggcaggacagcttgggtgaaccagtagccatcccccattcctcagccctgtggcctgtggggatatggcccatatgcctgcagtatctggctgaagccagggtgggaagtggggaccttggtgttctcgtcattctggcggatccctgagggactgatgcagatgttttcacaagatttggccctcttggcctcaggggtttcccccagtggcatctgtcaggagatttaaggagatagtactgtcctgascccctcacccccattttggagccagacacttaaggaaatctgtgccacatcactggctgactgcagagatactggaacagaaacttcagtgattacatacaaggaatagaaaaaggcaaacagacaagcaaagggaaaaatagtttggaaaagacgtaaaatgcaagcaagtatccccgtgtgcctccctgaggtccatggaatgagtggatctgggggtactgcagcagtgtagagatgggctgagtcaagacatgttccttttgccccctctcagacacataatgacggtaagaacagtcctgtttctccgcaagagagacagaggctgcctatggttatgggacagattccatggtaggaacgccctgaacatagctggcaagtgagactgatgctggtagccctggggggctacagatgggatagacctgattctggattgggctttgcttacttgtggaagatgcaaatgcttagagtgccattaaagaactagaacagaaggtactgcatggatttcggtggccaacagttgtcagacaaaggaacatactgtacagcccataatgtccagcactgggcagagagataacctcttcagagtatagtttgaaagataagtagaaatggcaattgaaacactgtccataacagagggagatgaaagcacaaagggctggcttactcaccgtcacaagtgtgtgctcacattcagcatgagtgggactaaaggagtgtccccacaagatttgtgtctttttctggtggatctggtgaataggggttgtggaggatgctgatatgactataaattcttgccaagggagaagtgcactagtataacaactgtagtttttttctttcttccccaaatcacctaaaaacatttttkcccccttacctgatacagtagtcctaggactacaagtgctggaaacaaggattatttctaagcaagaaagtataactgtatttttaagccttatgccagaattcctgagggcctgatgggggtgggttgtgccttcaccccatctggcaaaattggggctgagagtgaatacggctgttattgcctagtggtaaaaatggttcactagttcagaacctttgtaaccctaccctctatgaatgggaatggacacaggaaaaggcacttgctagactagtattacaaccagcaatctggactagcacagagaccaaacttaatgctccttccaaatgtggaaacrtttgagtaaaaataaatgacaagtggagaaaaggaggactaataactgagggtaaataaatgagtaagtgggttataaattgagggaaatcaaatattacattaaaagtcttggagttggctgggtgtggtggctcacacctgtaatcccagcactttgggaggccaaggcggtcggatcacgaggtcaggagatcgagaccagcctggccaatatggtgaaaccccatctctactaaaaatgcaaaagttagccgggcgtggtggcacacgtctgtagtcccagctactcaggaggctgaggcagaagaatcacttggacccgggaagcagaggttgcagtgagcccagatcatgccactgcacttcagcctgggcgacagagcgagactcagtcttaaaaaacaaacaaaacaaaacaaaacaaaacraaaacaaagtcttggagcaagagacaacattatctcttagcycaattattccagatgccggaaagaataacactgtatgtttgccaaactactgccacttttggaacctgacaagatctaaaaaaaccctacaaacctgagtagcctcaccctgggagacagtcatgcactatgatggactggactagttattaataattatgtatattcttttgatttaaaggatccatgtatgaaaaccaggggatgacctgtggtattatgtttttgcccacaattcctggcttgtaacttccatagcccttgttacagtcttttgttgtaatgttgagtgtgtcaggcctcaggagcaggcctcaagaaaaacaatttctctgaccttctcctgccctcctttcacctgccccaaggcaggactctaatgtctgcccayttttctgattgtgggtcctaagaccttccccagagagagtcttgccctataccttgggggaaggaatgctgacattatgaagcttccataaaaacccaagaggaccgcattcagggagcctccacatagctgaacacctgcaggttcctggagagtggtgcacctacggagggcatggaagctctgcaccccttcccccataccttgccctatacatccctttatctgtttccttgaaataccctttatcataagccagcaaaattttaaaaataaacaatcctggaggagtaaaataattcagtttccagagcttccccagtgtaaaacttggaatgttcagtttccaacaaaaaaatacaaaacatacaggaaaatatagcccacaggaaaaaaaaagaatttgatataaaccaccccggaggaagcccacacattggaattactagtcaaagatgttaaatgaactatcttaaatgtttactgaactaaaagaaaacatggacaaataactaaaaacaaataaggaaaacaatgtacaaacaaaatgagaatctcagtaaagagaaagaaattgtaaaaaggaaccaaacagaaattctagaattgaaaagtagaataactgaaatgaaaaatctgctgttgaaacctttgagcagggggaagtaaggatcagcaaacttgaaggcaagataattcaaactgtccattctgaggagtagaaagagagagagaaaaaaaagagaaatgaacagagcctgagagactggtggcaccatcaagtgtaccaatacatgaatcactggagtcccagaaagaaaaaggggcagaaaaaaatatttgaaaaaataaacttcccaaatctgatgaagacatgaatatgcacatccaagaagctcggtaaattccaatcaggacaaactcagaaatccacactgagacacactatagtcaaattgttgaaacccaaagagtaagaattttgaaatcagcaagagagaagcaacttgtcttgtacaagggattctcaataagattaatagctgatttctcattaagaaccttggtggccagaagggaataaactaacatattgtcagtcctgaaaacaaaaacaaaaaactgtcaaccacgaattccatatttggcaaaactatccttgaagaatgaaggggagtttaacatatttccagacaaacaaaagttgagggagttcattaccagtagacctgtcctacaagaaatggtagattcaacacagtggcacatgcctgtaatcctagctactcaggaggctagggcaagaagatctcttgagctcaggagttcaaggccagcctaggcgacatagtgagatctccatttcaaagagaataagaaagaaatgctaaagggagttctttatgatgacataaaagggtattaacagttacctaaagccataagaggaaataaagaacactggtaaaggttactacacaagtaaatatataaaccagtgttatatttttggtttataacacctcttttacttatatgatttaaaaggcaaatgcrtgtaacaataattatgtctgtggtaatgggcacacacatataaagrtgtaacttgtgataataacaataggaaggaggaggattggagatgcatacgagcagtgtttgtatactattgaaattaaattggtattattcaaactaggtctttataagtttaaggtgttaattgtaaaccccaaagtaaccactaagtaaatttaaaaatacacaaaacaggaaaggagggaatcaaaatgatgcacaaacaaaacaaaacaaaacaaaaacctaaattttaaaaaggcaataatgggccgggcatgatggctcatgcctgtaatcccagcactttgggaggctgaggcgggtggatcccctgagttcaggagttcaagaccagctgggccaacttgaggaaaacccatctctactaaagatataaaaattagccgggcgtggtggcatgcacctatagtcccagctacttgggaggctgaggcaggagaatcacttgnnnnnnnnnnnnnnnnnnnnaaaaaggggaagggagggggtgagctccacataagggagagtgggggggaatggtggaggcgacatttatgatgacggaaagagggttagcgggaacactgggccatagaaggaaggaagatccacgtaggggggtcttggcgccgatagagatgtaacgggcggtatatttttggggaataacgcctgtatggggggatgaaatgggggaaaaatgcgggtagcggggaatggggtctatggaactgggcgcacacatatgttcgacgcaacttgtgataaccgcaatacaacgaagaagcatgggaaaggcataccacccgcgtgtgcagacgagtgaaataatagtgggagtatgcaaacagcgcctttatagcctgacggtgctcgttgtgcccccccaagtgtccccccgccgcatcctccctacgcgctgggattacaggcgtgagccactgtgcccagcctaatggaagaattaaagaacaaaaaacaaggcatatagaagacaaataacggctgggcatggtggctcagcctgtaatcccagcactttgggaggccgaggcgggcggatcacaaggtcaggagttcgagaccagcctggccaacatggtgaaaccccatctctactaaaaatacaaaaattagttgggcatggtggtgggcacctgtaatcccagctactcgggagcctgaggcaggagaatggtttgaacaaagaggttgaaagtaaaagaatgggaaaggaggtatatgatggttaatagtgagtgtcaacttgattggattgaaggatgcaaagtattgatcctgggtgtgtctgtgagggtgttaccaaaagagattaacatttgagcgagtgggctgggaaaggcagacgcaccctcaatcttggggcgggggggcaccatctaatcagctgccagcgtggctagactataaagcaagcagaaaaacatggaaagactagactggcctagcttcctagcccacatctttctcctgtgctggatccctcaaacatcagactcccaagttcttcagttctgggactcagacttgctttccttgctcctcagcttgcagatgccctattgtgggaccttgtgatcgtgtgagttaatamttaactcccctttagagggacagaactaatctagagaaccctaatataacataccatgcagataataaccaaaagagatctggggtgactatattattattggcagacagtatacactttaagttttgaaaaaaaaggttatgagataaaaggcattgtatgttgataaaagtttcaatccagcaggaagatataataatgataaacacatacgtatatctaacaatggatttccacaatatatgaagcaaaatttgacagaatttaagagagagacaattctacaataatgaagacttgaataccccactttcaataatggataggacaatcagaagagtaataaggaaatcgagcacctgagcaacactataatccagttagaggtaacagacacagagtactcaacagcagaacacaaattcttctcgagtgcacattgaatagaccatatgttaggacacaaagaagtcttaatttttcttttttaaagcttaggggtgggtgagggtggggagctcaccctgaagtacaaagctaattatttcactttccacatctggtctaggatctgggttaagcagggtccagtgcagtctctctgggcccagtatggtttagagaaatagcagaggcatgatcctaagaagcagtttatttctttggcagagaaggagagagccatttgggtagtagagctcagagggatttcctctgctctctcccaagacctcccttttatccccattaagaacttggtacaaagagttggtccaggaaaattcagctcattcaataatgacttttaaaaaaggaaactggcacagcagataatttaagtaaaacagtggaagacagcagcagaatttaatgactggagagcacttaatggaatagtgctgccatagaactgatgaaaattgtgactaaatttcctaccactcaaaaaattaaattaaacaatagctttaccataaagcacaaatttaagaactcagtgaagagataagacaacaaaaggagttcagttgcattagacatgtacattcagaatcagaaaatagtagaagtaaaatttaaatatatcatggaaaggaagacagatttggaaggcgacaagatagaatttatactgaacacagtaatggttatagtggatagaaatgagaaaagcaaacaaatagttaaaaagaattggagagaaagtgagatagaaaacacataaaggtgtttcaacatagacagtttagagtgtctgattttaaaaagctaaaatagtggagcaaagtagatatttagagatataattcaagaaaactttccaggaataacagaagatttaaatttgtatattgaaagaacataccaggcaaaaatgacccagaatggttaacaatgagatatatcttagtaaagtaattggcctttaaagagaaagaaagaattctgtgggcggccatacaaaaatacctagtcacttacaagggcaaaaataacaggtttgcctcagattttgcaagtttcaatgccagagataatgaaccagtaccttcaaagaaattcaagaaaggaaaaggagaaccaagaaagacaaaagactactgaaaaaaaatttgaacattcaataatatattatgagtgaaatatattgctgtgagataattttgttttcatgagcacttaaggatactactagagtatgaacacaagcaaatagataactggggaaattaagataaaaggtcttgcgttattgagtatattcagtttctacagctaagcctaaaatgaaagtagagataagagtgaaaggaaaaaaatatgctctggtaactaacaatactggaagaggaaaggggaaagaagatggcatatagagtgacttcctcgtgcaataactgaaaattagaggatgatatctcaagctgacaaatcaagtagtagaaatataagcatatttaacaaaacaaaggtattcttgcaaactgtaaaactgtagcagtgcccttcagtagaggactggctaaatagattatgattcatctgtatgatagaatactttacagccttataaaagaacagggaaggtgtctatgcactgacagggagagtgatccacaataaattaaaaagcaagatgcagaacaggttgtaaaatatgctaccatttatgtaaaataagtagaaaaataatatgtttctatatatttaattttttaaaactcaggaagggctgggcgcagtggctcacgcctgtaatcccagcattttgggaggccgcggcaggcagatcacctgaggtcgggagttcgagaccagcctgaccaacatggagaaaccccgtctctactaaaaatacaaaattagctgggtgtggtggcccatgcctgtaatcctagctacttgagaggctgaggcaggagaattgcttgaaccccggaggcggaggttgcggtgagccgatatcgcaccattgcactctagcaacaagaatgaacaacaagaatgggcaacaagagatgaaactcgagaaaagaaaaaaaaaaacctcaggaaggatacaatagaaactttaagataaaagttaccattttggggtagggcttgagagtggttgtataaggggacacatagagggttgaatcattcactgttattttctttcttccctcccttcttgtttttgaaacgtgaatgcattacatattcaaagattagattaatgaaaaaaatcaaaccagacatcccccgaaagttctggtcctctattaaatcttagacaaaactttgaggtagttttagttggcatctctgcaaagtctcgtgggattttcattctttaccagaatataatcttgttacgtgtaggcttcctgtatgaggccctcagaccctgtaggtgaagaaaacacttttccttgaatgatcttccatttcatctagacaggctccatgtcctttcttaatttgtctgtgacataatcagtaattgataagggtggtcctatatcattaagtgaaggtccatttcttatcctgttatgtaggtttctttatgagattaatcttagaaggcattgggcttccatgatgagtgatcatttccttgtgagtcaatatctaatactcatttgcagcttaacttggtcaaaatagaactcttgataatgaatcttaacttcagggctctgtgaaacaggaaacatgattttttttttacagttaaggaaaatgagatatcagaaggttatgacttgtcagaagttgcccagaaaataagagttaggcaggggaggatacaaccatgatttcatggttggggccttggctcccagacagtaccaattgacttaaccattgacagtatgtatcctaccatggtgacagagcacagtggattgaattgttggagtttccctctcaaatgaggctaattcatgttttggaccttatgcagttgtccttgcaaagagattctcaaattctctctctgtctcacacacacacagacacacacacacacacacacacacacacacacacacacacagtgattctaatttacatatatacatacagtgtgatcctaatacacacacacagcaatcctaattgccagtaataaaattgttaccttttgtgtgtaatttaaggtaaatcagagggaatgctcatgaagtggcactcatgaccttgaactctgctttaggttattttttcataataaatacagtacaagtattctgcaacattttctaaaagttttctaagtgtgtcggctctaatgcattcattgtattgcatttttaccttggtttctaaggatatatttgtaaaatggagatgataatctttgccttcttcacaggatggtaatgattactaaatgggatagtggatgtgaacatactctggtaaaactgtaaagtgctttacaaatacagagatggtggtgctagtgttacattaattagatcttatctcctccccacatattcatgccatgctattatgtcccttgcagatccacttttttctagtaataaagttagaagagtccgttatatacttaacattcctttgcattagctattttccttctgtttctttttctgtccatatcttcatctgaaataaagactattttgaataaggatgtacacagaattttgtaatggacagtaaataaacaatactgtagaaatataatttaaaaacccttgtgagtaaacaggctttataaacagatctgtgttttttaatccaggtgtcaccctatattgggtatgtgaccttaggaaagttatttaatttcttgtaggcacagtgttctcatgtgtaaagtggggcatactatttatcttttgaagctgttgatggctaaatgagattctttttacaaagcacttggaacattgctttcatagaatttaatctacccaaatttcttcaaacagaccaattctagtttaaacataatcatcacttgatattaatagtttttactattttggttctagtcctttttttaaagtaagttacattggtaaagatcagaaatttaagattcataattgttttagatacttgcattttactcactggaatgaaaaatgggagaagtaaatcacataacagtgtgcattattttacttctgtttatttgtgtgtatgggaacctcagagttcatcagatattttaaaaatagtatgcatttatttaatatattttacaattacttactatatgctttgcattactattaggctttggaatacagaggtagaaaagatagttcatgcctgttctgaaagtcatcatttgttcaaggagacaaaaaactaattataatatcagaagtactattatagatgaatgcacagggagctttgggaagccagagcgggtgcttcccgcctcttcaagataggggcagtgtactgaatgtgcttcccagggaaggtgacagctgagtcaagtctacaaagagccagacttggagcgtgaagccttctcttccaggctaaggaaatgaagttcatattaagatgatgaagagccatgaaatgcttttatttagagcaagatgagcagattcagaatttctgataattactagtagcatacctgcaagcagtgggagcagcatcaattttaccaccctcgacatggctactatttaatacctgctgtgtctctgacttgtatatatattatctcatttaatccagcaccccttaaattagatattattgccattatacacataaggaaacacagggctagaggttaatagaggagtgagtgactggatatgcaagagagaatatgtttgattaccttccatttcacctggtgattctaaattaagagatgatttattgatcctcagtcttgattttcctgttttatattgtgaacattttactgaatttggtttgattttagaatctaaagataacgtatgttccctgcaagacagattttaccccagatctgtcatttcatctggtgcccaatccagggaactctggtttattctaacactagagggaaaaaatggctatgttagactcactgaaagagaacattccagtctccactgtagaactgcatcttttctagagcatatcaccttaataatttttatccctatcctttagaacacttacaggatataaaccactttgctcccccttctacctccttttcttcttaattatcttaagtaaatatttgaaatgatacctcattgggatatgaaatgttttacttgtgtaattgttaaaatctcatatgtaacttaggacctggcttttctagtagtttgaaactaggttttttccatgtttctgctccatgtttatgtggtatattgaagcaaaagagtaagaggttatagtattttaaagttaaaaaaaaaaacaaaccgtgattattaatcccaccagtcttcgttagctttctaaatgctgtcaaaattggccattgaccttcatccttagttctttcattgaaaatagaaatgtaatagagtgagaactcacttaaaaaaataaaataaaatagaaataaagtatcacttctttcatggaaatgtggtataattatttaaatgaatttttaaaaatacttgtacataactaaaagtggtattgcaaagatagcatgtgtataattttaacttgctatacttaccttttattctttttatttcagctcaatctgaaattgaagtgtctgtctctgcaaggaatatcagaaggctactaagtttccagcgatatcttagatcttcacgcttttttcgtggtactgcggtttcaaattccctaaacattttagatgatgattataatggacaagccaaggtgtgtatagtttttttaagaaaacattaattttttgataagtttactgaaggcctttattccccatacagtaatgatttatagagtctttttctctgtctatgaaaagcagttgagcctattttccaggtttttttctttagagcagctgtttgttttataattagccattacagagcaagggaaatttctgaaataactaaagtagtgacaatgttttcatttattattataacattacgtaacaaggagatcaataaaacattaaactataagatctcacagaattgtaatgctgggaagacttagagattacctgatctaatcatgtccgtattccatcaataaagaaactgagtccaagagagcacgagggacttgtttgcgcccacccagctggttagaggtaaacccagcacagaaagttaggtctctctctcttttttgtgtgtgtgtgtgtattaataacatcttttcacaaaggtctcgtgactttcagtcaaatgagtcttgatagtctcttgcattgagagagatttttgagggtttagatgtatcatagttaaacttgttgattgtgagcattatttacttcctctttatataatttaaaagaaatgtcttactgaacatcagggttaaatgagcttgtttttaaccaaatgaggattttaaataatattaaatttccaatgtattttaagttatatttgacttaatatttacagaccagattcttgagtttgtgtagataagtttttaagttgtgtaggtaaagctggggtgtcttctttacaattacatgaaagtgaagaaaattacttccctgtttagtaaaagaaatcagtggaaagcgttcatgcctgctttaaatgttaaaatgtttacaagttctgccttttagaatgagaatattgatctctatgtcatttgttgttattagtactgttataattaatgatttctactagtagtatcttagtgttgctcatgtcagtgtattcataaatgtatacaacagtgaacttttggatataaaatataagtttttttctagaaaaagtccacaaaaggttcaggttaagaatgtatggtataaaaatatttggtttttagggcctttgtgggatttatttgcttggctgaagtacacattatcctaaaagttaatgtagtaaattgtgttattttataagcatatttagataatataaatacatatccataagttagaagtgtttttttaaaaactgaataacaaataatttaagcatggtgtggtatcagtgtcagatgcctaggttctagaaacagactacctaatttaagatcccagctctatcactttatagctgagcaagttagttattttttgcttgtttctacgtccctaaaatgagaattgaaaacaatgcctgggctgggtgcagtggctcatgcctgtaatcctagcacgttcggaggccaaggtgggagaatcacttgagtccaggagtttgaaaccagccctgggcagcatggtgagaccttgtctctacaaaaaaaaaaaaaaaattagccaggtatggtaacacatgcttgtagtcccagcttctcgggaggctgagacaggaggattgctcgagcccaggaggtcatggctgcagtgagccgtcttgtttgtgccactgcattccagccttggtgacagtgagtgtgagaccctgtctcaaagaaaaaagaaaacaacatctgatagtgttgttcttagtaataaaagagtgagtaacttataacagtmcctggaatacagtaaatactcagtagtgtcacttatttttattagattgtttgcaatttagtttctaaaccatacaacatttgaaccacacttctgtgatgttaagtgatactagaattcttaaaggtttgcaagactgtagcaataagctgggaaacataaccttcctgtgcattcattaattgaaaaacaaaataatgtttcatttttcaaatggagtttatccctttggcatttttttggagccagttgaaaaagtcatgattaaaagaaaaatgatacttgtattttttaaagtaaatcaatcactttacattttctttaacttctctatggaatatmtccaaaagacaatgttattgaaattaaattacagtagaaatgtttggttttcatttcagtgtatgctggaaaaagttggaaattggaattttgatatctttctatttgatagactaacaaatggtaagtgaagaatttgacttgctcaagttaatgtagtctagattactgcattgatggtgcagccgctggtgcgttgctttcatttactgtactaaggttgttagccctctgctggaagagagtgtattagtccattttcacactgctgataaagacatacccgagactgggtaattgagaaaaagaggtttaatggactcatagttccatgtggctggggaggcctcacaatcatggtggaaggtgaaaggcacatcttacatgttggcaggcaagagagaaatgagagccaagcaaaaggggaaaccccttatgaaatcatcagatctcgttagacttatccactaccacaagaacagtgtgggggaaagcacctccatgattcaattgtctcccaccgggtccctcccacaacacatgggaattatgggaactacaattcaaggtgagatttggctggggacacagccaaaccatatcagggagcatcatttttttctctttttaagtgacttttctaaaagcctacagaatcaatctcataattttatgttttgattattgtccttaaaagtaatcaaatcatcattagtatcatcatcatcatgacttggcagattggttggcaattgccgctgctattattaataacccaaagtaaacattattatctcatgttttttatttttattttttggtttcttttagattgtggccatttataatcacatctgatgttgtatgcctgtttcctgaccaaagcagtggttccttgctttcagatagggaatggggaagagctgtagcttctttaagagcgcttatcagaatctacagagtatgggtggtttgggggaaaatgcccacaggtgattctaatcactcctgagtttagtttggttctggatggaggggtcatgttttcttattctctttgcggacagaaacatgttctgtaggaaaaggaacagggaatcactcttatttaggataaaattgtgggcataattattggtggtacaattgaggaccactaaaccttaggcagttctaccttttagtatatttttatttgggtagcttttctagaaatacaatttcctttatcaagaaagtgttcatttccatttccatttttaaaaaagttccttcatgcctgtttttttttgttgttttgttttgttttgttttgttttgtaacacaactaagcatctcttatttgaaatattttgttgatttgtgttcttattcactggtaaaagcagttcagctaggctgggcgtggtggctcatgcctgtaatccccgcactttggcaggccaaggctggtggatcacatgaggtcaggagtttaagaccagcctggccaacatggcaaaaccccatctctactaaaaatacaaacattggctgggtgtggtggttcatgtctctaatcctagctacatgggaggctgaggcaggagaattgcttgaatctgggaagcaaaggttgcagtgagctgagatcgcgccattgcactccagcctgggcaatagagcgagactgtctcaaaaaaaaaaaaagcaattcagctaatgttttgccccagagctgaaagtacactgagaggaagtcagtgctgactttagaataatgaaatcactgctgtactttgaaatcacctgctttttcttattgctttggaatgaagctcctttgataaggatgccaaatatgtaaaatgaacaaataaattacctttatttttcttgagaatcaatgtgggtcttttagtatcactccattattctctgtaagctgtatggcaatgcctagtggaaatacctttgtctataccttctgtttgcttatgcagtgttgacagaaaataaactggactgatcctaggcaaaattgtgaagacagtgaagtttgtctttatcagcagagccaccctcctgcctccctgcctttttattcctccccttcgctatctctcttctacttttcctttgcccttggtgattaagtgttctgttcttctccctgcccccaccttggcccgtacacacaggaaaggctctgatatcatttacacagttagccttcccttggcccttctcctttttgaaaatacaggtagtgaaatatcaagtggcccaccttcttcttgctcagggaaattcccctttcctaacttaacacaaatattattttaggtattatctcaaggcaaatatagatgaaacaatgccactcttaacattttcaaggtttagccttacataaactctcacagctcatagcctattattagtctactgggacacttgtcactcattgaaatagttgattgttcttctccaaattttatttttaaaaagtacatactctgctagttgggggcatggtgatgaaagcggcgtgagctcagcagtgcactggatgggcagaagaaatagccagcagtccacagtagttaactaagcacttcgctttccttttgatcacctcactctttgaatgggatttgtggacagggtggctaactagtttccccttagggttcattccagatcattagggtttagtagaaaccactcatggttagctacccacctttgattttagaggtggagatttatacattcagttaactacagctattcaaaagctcaggaattttctacttaaagagatgttattggggaacaaatgggcagaaaaaaattcctttagcttatattatataatgagaatggctttccttttaaaactgcttcacctgaagtgaattctggataacatacattcatggtatccaagtgtatagttttcccttcttgcttattgatccagtgctttcttgtgtttcttatgctggtaatttcccagttgatattgggggaagaacagcaaggcagaggaggaagcaaaatgcagtgattcgtgccaagacaaatcgttcccagcttgtctgctacaaggagggaagtagttattgtctggtaggatgcatttggagttccttttgtaggattgagggagttaagtgatgcgacatagcaaaagcttgtcactcctaaagccacctggttcatgaggacactagctgccaggcctgcgttgtcagggtggcctactccttccaaccagatcccatctgggatcaccttctaaaaatgattgaggaccactctttcataggcagttctatcttttgatatatttttatgtgggtagcttttctaaaaatacaattttctttttcaagaaagtgtttccatttccattttttaaaaagttcttctgtgcctggtttttgtttaacacaactgagcatctcttgttttgaaatattttgttgacttgtgttcttactcactggtattataatcctcagttggtatcttgcatgcagcttttcaattacatatgggtagtacactttaagagactgattcttgtcagattcctttggtggggacattacatgtgtttcttcactgcactttgcctgaattccaaaagagggtattttcccattagattgtagctttcttaaaacttattctacatcctagaaatgggtaatttgttttgttacatttgaaaaacaatttggagaaccttatgataatctaaatatacagagaatgaataaacattctaaaatatttatatactcgaagatggttgttacagcaatagcaacagacacgttgttcacttcttcagaaatggctccacaccacatggactcgtgtttgtaccaatagagcatatcaggacctgaacacattttaacatttaatttatttaaaatgtaagatttgaaatgcttttttctttccacatgaaggtgatacgtcaggtagtttttaaaaatagtctcttttggcctgccacatcttttctgtcattgcttatgcaaataatgctccaattaatgtactttttcatcagctgtggtcttttgttggcagttggttaggcagttttagataacaaggttaaccaaacagtcctttattatccttcataaatattattattataaattttcaatttgggactagtatgtcttttatacatttttgtaagagtcatcatagacgagagaatactagaatcgtgtattttattgcattatctgaatgttggcagtaatttatgagtctatgtgaaggatgtagtctacttaaaatagactttttaatatgtagcctatttaaaacgtggtctatttaattgttaaaataatatagtatatgtgtcctatggaagtttacaaaactgagaagtataataggaggtataaaaaatggagagttacaccatggaagggaaaacgaaacatcataaaaatggtagtttttccaaatttaatttctattcttggtgtgactccacttgttagtgacaaaggagtggacgttgaggacgaaaacagtccccattgcgtgtagcagctctttccaaaaactcggctctgtagggggatggagcaggtgaaactggagggggccaggagaggctgtgattctttattgtttcagagatgagagaatctagagcatgtctgaatgctgatgcttgttgagacaatatagaaaagagagagagattggtggggtggggtggggatagttgtacctgatagaacaaggaatatctctgaggaggtgtggatggattggcttttgaaagaaagggaaacttggccaggcgtggtagctcacgcctgtaaatcccagcactttgggaggccgaggcgggcggatcacaaggtcaggagttcgagaccagcctggccaacaaagtgaaaccctgtctctactaaaaatacaaaaaattagccgggcttggtggcgggtgcctgtactccctgctactcgggaggctgaggcaggagaatcgcttgaactcaggaggtggaggttgcagtgagccaagatcgcaccattgtactccagcccaggtgacagtgctggactccatctcaaaaaagaaagaaaaggaaacttgagggcttgtattatttctgtgacatatgaggctgtggagaatgagggggtggatgggaactaagtatgttgaaagtttaagaagagcataaaaggcttgaaaataggcattttaaaacgtgaaagagccatttcactggaaagacaatatgattgctgggcagtgttgactacgagtttgtagcgatattctgcctagttttgtgattccccctccccacccccccaagcaactctcagattttctgcagctactctggaaaagcaagtggctgagttcagagtttttaatcctgatgatcttgaggtcattgatgcctcctcctaaccctgtatggatgagaatagacacattctccacctaacaaggctgcagccaaggaagtgtgctctggggcagtcagtttcagtgaaagcaagatggcagaggcaatgtcaggagggaggtcaggtgcagccacactgagttaggttactatgtgggacaatttttaaagttttctattgtctattctcattattttggtgtctttaaaaaattaatctatttgaaaatgtctagttttcagttctttggttgtggaaaagtaaaacaacaaaaattaaatttttcttataatgaaacaagatgtgacatataaagttcataactggtaagaagatgcatatttttgatagacaaaaagtgggaattattactctttccatgttttatattcaaaatctgtatttcaaagcataatataattgtgttgacttgtatttcctactaatgtaatgtctcttctttctttttaggaaatagtctagtaagcttaacctttcatttatttagtcttcatggattaattgagtacttccatttagatatgatgaaacttcgtagatttttaggtaagtgattctaacccattaacagtaacaagatttacatttatacaagaacctgtttaagttttatctcagttatatcggttagctattgctctataacaaaccagccaaaattagtggcttaaaacaacacacagttatttagctcttgcatctgtggggctgttaaatgcttcttttggtctggtctgggtgagctcatttgtgcacctgcagacagcaacaggtgggctgcatgttggttttgtagagacctcagctaggataccaggcctgacccatctcggctctacatagtcttctgttaaatttaaaagaagcagaggagtttggcaccataatagatttacattaaaaacaaaaaagaattatttattttacaattagccgagctggttcaaacagtagtggcaggtttccgagagagctgatatccccaggccgctggagccctgggctcagaatcggcccaccttcacttctgcatgcagcaagtggccacagcaagtcagaccagggatgcactacacctgttggtgcaaaggctgcaaagtcacagagccacagatacaggaaattgtggatacttgatttcattttgcaatgttccttacattggccacagattgctgacaaagatgacacaatttctgtacttttctaaatttttgaaggctaaaactttaaaagagcaggtatattgcagttaggtttcttctttttctgacccctagaatctctttgacggtaggctttaaagattatttggggccaggtgtggtggctcacacctgtaatcccagcactttgggaggctgaggcgggtggatcacgtgaggccacgagttggagaccagcttggccaacatggcaaataccccatctctactaaaaatacaaaaaaattacccaggcatggtggcgcacgcctgtaatcccagctgctcgggaggctgaggcacaagatatcaactctagtcttccttcttgtaataggcaccagtttctcctagttggttctacctgaggaaggaattcatgattcctggtaaagtctttgtccgtcctttaggtggataggagaacttctgagaaagtcctctcctgcatttgctgctctgagtttgaagtccaaagcagcatattttggggtctcattttctgaccctcattgtgatatttcatatagtgcccagatcaagagatagcttaatttgtaatttatttggttatatacaattttgcttatatacagcaaaaagattacaacttaatgaaggttcacataatgattagcattttatagcaataaagtcttttaaattaaggtgtatacatcgtttttttttaaagacataatgctattgtacacttaatagactatagtgtaaacatagcttttgtatgcactgggaaacccaaaattttgacttgctatattgcaatattcactttattttagtagtctggaacttaacactaaatatctcactggtatgtctatacttaatagtgagagaccatcacattgatttgatatcctttttaaaatctttcaattttaagtagagagaaattacaaattattcaggaagtaatttattactgtaggaaaatggtaaaactgtggaactataaaataagttaagatgttgctggtggggacatttaatatttcatacatgctgggcatggtggctcacgcctgtaatcccagcactttgggaggctgaggcaggtggatcacttgaggccaggagttcaaaaccatcctggccaacatggtgaaaccccgtctctactaaaaatacaaaaattagtcgggtgtggaggcatgtgcctgtaatcctacctactcgggaggctgaggcaggagaattacttgaacccaggaggcagaggtgagattgagagagagagagtgagccgagatcgcgccactgtactccagcctgggcaacagaatgagactctgtctcaaaaataataataataattaatataaccatttttgctaatctgcaactgctttatctaggtaaacagaagcctgtgtgactctacagatacaattttgcagtaaattctcaagtttataattaatatagtgtgagtagccccagtagctatactggcaattataaagatgcatatccccactttgcacattgttcatatgaatacttggctgtttatcccttcatcctgttgccgctaatgtggaagccactagaacaggtttatgagagaattaagccttaaagccataaggaatccattggcttcaatggattatcttttgtgcagcatatctggaatggctttggctctatactgtccttgggagaattgagaaaataataactcaggtgtttttagttagtttgtttgtttgagacagggtctcactatattgctaaggctggaatgcagtggcatgatcatggctcactgcaacctcaacttcccaagctccagccagcctcccacctcatccaggctgaggcaggagaatcacttgaacctgggaggtggaggttgcagtgagccaagatcacgctactgcactccagcctgggcagcagggcgagactccatctcaaaaaaaaaaaagcctcaataccaagaatgtacagccaaatgaagagctagaaatattaactcagacttcagacttctacttagaactctggcaaaaaaaaaaaaaaaaaacagataaatttattacatagggcttttgagaagctttttcttttggagagtcttgctctgtcacctaggcttgagtgcagtggcgtgatcatggctcactgcaccctcaacctctcggctcatgcgatcctcccacctcagcctcccgagtagctaggaatataggtgtgcaccaccacaccagactacatttttatttttagtagggacaaggtcttgctaatggcctaggctggtctcaaactcctggcctcaagcaatcctccagcctcagcctcccaaagtgctggaattacaggtgtgaggcagtgcacctggccttgagaaactttttaatgtgtattaattataagtagtatgcctgaaatactgtacagtagtccgcctttatctctggttttgctttctgtggtttcagttacccatggtcaactgtagtctgaaaatattaaatggaaaattccagaagtaaacaattcataagttttgaattgcacaccattgtgagcagcgtgatgaaatctcattgcatcctgaaccgtgttggttatcagatcagccatgttggtatcacagtgcttgtgttcgtcacccttattttacttcataatggccccaaagcacaagagttgtgatgctggcttattgttataatcgttctattttattttaattattgttaatttcttactgtgactaacttataaattgcgcattatcgtaggtgtgtttgtataggaaaaacatagtataaatagggtttggtactatctgtggtttcaggcatccactgggggtcttggaacatatcccccaagaatatgaggggactactatactaaaaatataaattataaaacacatacggccgggcatggtggctcatacctgtaatcccagcattttgggaggccgaggtgggtggatcacctgaggtcaggagttaaagaccagcctggccaacatggtgaaaccccattgtgacaaaaatacaaaaattagccgagcatgatggcaggtgcctgtaatcccagctactcgggtggctgaggcgggaggatcacttgaactcaggaggtgggcgttgcacagttagctgagatcatgctgttgcactccagcctgagtgacagagcgagactccatctcaaaaataaccacatacaaaaatagcttattaggtggggcatagtggctcacacctgtaatgctagcactttgggaggccaaggcaggtggactccttgagcccaggggtttgaaaccagcctgggcaacatggcaagatcctgtctttataaaaaatacaaaaaaatgagccagacatggtggcatgcacctgtggttccaactacttgggaggctgaggtggcaggattacttgagcccaggaggtcagggctgcaatgagccatgatcatgtcactgcactccagcctgggcaacgaagtgagatcctgtctcaaaaaaacactattaaccaagggtactgaaaggctattttaaaggatgggacggaagcaagtgcagaattctgatggtctgtcccgctcactcggcgattgtgtttccccatcacaggtaggctcgctttcctttgagaccactggatttgtgtgttatgctgctagggctgtcaagtaggttgatggcagggggcacagctccaccccgaagcctagtctgttcgtccatgatagcatagagagtcaaattgatattgattcttttggtatacatgtgagttgtgaggtgattatcatctgcccgaatcggcacgattttagccgatagctacatgaaaagtatgagtgggtaactcataattatcacaatttttgtccttgtatatgttgctcatatacaataaaatcgggatctctttctttgatgcagttatgattcaagaagattaccacagtcaaaatccttaccataacgcagtccacgctgcggatgttactcaggccatgcactgttacttaaaggaacctaaggtaagaggttgacattgatttcaggtgaaaatcataagaaaattccttttgatttactttcacatacttctcctgaagttactgctttgactgaaaatcacagacttccttcacaagaatgagatctagctgratcaagtttctgaatctggctgtgtttcagagtgcaacagctagagaattgggtggttgttgagagagaggctggagaagcccaagcaagggccaggtcacttgaaacctcgactgctggcatttacactgagctccacatgggctccatgtgggcagggacagccttggtctgactcagtgaatgaatgaggagctacagagaggaggcaggagactttagaaaattatcctggctgtgatgtgaagataaatcgtatcaagaccaaaagcctgaacacctgccaggagttacttcagtgctccatggaagagagcagagtggccttggtgaagtagggatgtggatagtttgcaagttctcttgggaattagaatgaacaggatgtggtggtgaatgcatttcggggaaagaaacagaagtcagtgaagactggtttgggcagttgagtagaaggtggaagtcttccatgagaggaggaatgtagagcagaacaagttttgggggtaaggcttgtagagacagtgagcaccattttggatccgtggtattaaatgtatttgacatcctaatatagaggtctagtatagagttacataaaagagtctgaagtatagaagagaaatcagacttaatgtatggatttgggaatcattgtctgcaggtgttaatgaaagccatgtttgcccctggacatttcctatccctggcagttctgcaattatgtctgcctatcccatctctacttcaaaactgctctctccctagatcttagttctggctaaggtgttaggcgggaaacaggatgaccaaactggcttgtgcccattgatgccaacttaagaacacagctagtcttctgattatttaagagatcatagaatatgtgaaaatgcccgttttttagtatatatatcatgacttttaaaaaatcaactttattgtggtagaacttacatgcagtaatacagtgcatacattttatgtgtacggttttgacaaatgtatactcccaaccacccaactgtttttttttctctaagagacagggtttcacagtgttgccaggctggagtgcagtggcgtgatcatggctcactgcagcctcgacatcctgggctcaagctggaggccagctaattttttaaattttttgtagagacagggtctcactctattgcccaccccaatttttaaattaaacttcaaaaaaatctctgggccaagactgcatcctctgtttgagaatgttgtgggagagattgatgagtaatcaccatacaatctggtaagtggaaagatggtaataagttctctgcagcacacaaaagggttaacctggtcagcgaaggcttctgcactcccatctccctctgggcacacccaacccaagccaggggcagggaaatctgggtgatgccaggtgagcagggtggggatgcatgtggacaaaaattaataaaaacatgattttgaacactttttgcctgtggagttctgataatacttaaacacttttcatccttaacatactcagtgaacactttacccaaggcttcaattaaggatatagataaaatcacaaagccctacaatgcaggcatttcccttctcccttatcatagtgaacattttaaaatggagtcacccaggactgggcacggtgactcatgcctgtagttctgcactttgggaggctgaggcggatggcttgcttgagcccaggagtttgagaccagcctggtcaacatagcaagacctcatctcttttattcaaaaaaagatagaaagaaaaaaaaacagagtcactcaaagttttaaaaatgacttctgaaaaatttgaagtaggtccaagtgcggtggctcatgcctgtaatctcaatactttgggaggccagggcaagaggatcacttgaagccaggagtttgagaacaacctgggcaatatagcaagatcccatctctacaaaaaataaaaagttagatgggcatggtggtgtgtacctgtggtcccagctacttaggaggctgactcaaaaggatcacttgagcctgggaggtccagcagagagtagtgatagtgccactgcactgcagcctgggtgacaacctatctttagatagatagatagattagatagatgcctgaagattgtatctcttttactcctgagcctttgcacagcatcacgttttatactctttgagcatctgccacatgccaggctctatcctggtgcaaggaatgtggtggtgagcagggcaggaatgatccctgtcttcatgaagtgtacatcctagtgggggaggcagtcattaaacaaatagataaatagaattttgatcaaaataatatgttagtggctgggcatggtggctcacgcctgtaatcccagcattttgggaggccgaggctggtgaatcacctgaggtcaggagtttgtgaccagcctggccaacatggtgaaaccccgtctctactaaaaatacaaaaattagctgggcatggtggcgggtgcctgtaatcccagctacctgggaggctgagacatgagaatcccttgaacctgggaggcagaggttccagtgaaccgagatcatgccactgcgttccagcctgggcgacagagtgaaactcagtctaaaataacaacaacaacaacaacaacaacaataataataataataataatatagagaatgaccaggtggatggcaagagttttacaactttagatagggtgatcacaagtcacttaagtggacagtacataactaaggagtcagccataagaaagtccaagtacagagggaatagtaaatagacttaagtatatatattttgtgagaaatttgttttcagtttttataccttataatttatatggaagagctaattcttggactcttgtctatgtggaaaaaaaaatatttcaagccaaagaaattactggaaattttggagacaaactcatctctctatatatgcattgtcactaacttgagtatttattttttatgtcctcaaggctgaactcatgtggattataaagcattttgttcaagttgagcccaaagtctccttgattgattgacactggtaacattcatagttgtcagctgaagagattgtgattttccctttgtttcctattttaatgtttagtttcatgtttctataatgagtttaaattagctattttacttaataactatacttaaactaagtctggataagaattacgcttacatgtcccagagataaacccactctagcactgaacctttaaaccttgctctacttgtccctggcagttgacaaaagagcctggccctgcacgtccctccctggcccccgcatccttccctttgatgtcagcaagactgatggttgagttgcctttcttgcagatgtacacttattcatgctctgagtagatgctaattgctagtgacaaaaatatgagtaagataggaattttggcccccagaatcttacttgtaaaacatatgggaacctgacatggaaaccacaggaatgtcaggcctccagggcaggaatttttgtctgtctattccctaatatttacctgtcccctaaaacagcaccagcacatggtaggtacttggtcaatatgagctgttaatgaatgatattgtatatgggctttatcattggctgggtttactctaactgttctctgtttttatgtttttattttgttctgttttgtttttcagatggagtctcactctgtcgcccaggctggagtgcagtggcacaatcttagctcactgcaacctccacctcctgggttcaagcgattctcttgtctcagcctcccaagtagctgataggcatgtgccaccatgcccaactaatttttgtgtttttagtagagatggggttttgccatgatggccaggctagtctcgaactcctgacttcaagtgatctgcctgccttggccctgcaaagtgctggaattacaggcatgagccaccatgcccagcctagttctctgtttttagacctctagagcagtggccgccaacctttttggcatcagggaccagtttcacggaagacaatatttccttggatggggagggggatggtttcaggatgaaactgttacacttcagatcatcaggcattagattcttataagaagtgtgctggctgggcttggtggctcacacctgtaatcccagcactttgggaggctgaggcaggtggatcacctgaggttgggagttcgagaccagcctgaccaacatggagaaaccctgtctctactaaaaatacaaaattagctggttgtggtggcgcatgcctgtaataccagctacttgggaggctgaggcagaagaatcacttaaacccgggaggtggaggtttcggtgagccgtgattgcgccattactctgcagcctgggcaacaagagcgaaactccatctcaaaaaaaaaaaaaaaaaaaaaaaaaagaagtgcgcaacctggatccctcacatgcacagtttacaatagggtttgtgctcctatgagaagctactgcttccaaggcagagctcaggcaataatgctcactggctggcagctcacctcctgctgtgcacctggttcctctcaggttcctaacaggccatggaccagtaccggtccatggcctggggattgaggagccctgcgaggaccgccttgtccttttgccttctgtgtgtgggaggttcatttctttcagtaatttctcaggatggacataatgtgtcaagaatctgtcttcactaggcagggcatggtggcttatgcctgtgattccagcactttgggaggccaaggcaggcggatcacctgagattaggaattcgagaccagcctggccaacatggtgaaaccccatctctataaaagtaccaaaaaaaaaaaaaagtcaggcatggtggtaggcgcctataatcccagctgctcaggagcctgagtaagagaatcgattgaacctgggaggcagaggctgcagtgagccgagatcgcaccactgcactccaggctgggcatcagcaagactctgtcacaaaaaaatagaatctgttttcagaggtagcatcattaggaaaaataaaaatacaatactgattcaggacattttatgtcactaaactgctctcctccatgatagtgccacctcctctttaccctcagcaagccaccagtatctcaggtaccttctttctgctatttctactatatttttgatttgccaatttagccaaaaaaaaaaaaaaaaaaaaaagctaccaccaacgaaactcactgtgataaccattacaatgggaaatgataagggctggcaggcagtgaaaacagtaagcttttcactgaacacagcaaaactcaccacttaatagttttctattttattgaaaaagaaccctaatgatggctttgcagatacaagtaaaagctgaccttcacatatgttaaataatctgtagtttcttttttgacatttctttgttgtcagctcttaacagatgtaatcacagaatggaaataacatctgtcttttaatccaccttaaaaagttaagttattgaagtccttgtctttgttataatattgaaaattttgtttctgatgaaaggtttttttttacaagcagaaatgttacatttttatatcaaatatttttttgcatgtgtgatttgtttttaaagttactttctcttcacagaatttttgagaattcagttgcttattgtcatgttcctatttttaatggttaactctttaatatacctgagaatgttttgatgtcatgtgcagtcatacattaattttttaaatcagtctaattttggattattgtattctcccaggatgtctattcttctgccaataagaatgtaacccctttgcatactgcctaataaattacatgttcataagacatagacacccatgcccattcatgtatatgtcaaggaggggagattgctttatatgcagtatgctttatatcctatgcattctgttcatcttgattagtaagcagcgctttagaatgctttattttttcaatgcttttgtatatcctaaagaggaaataattttcttcatcttctcctattcattgaccttctccgtgtactaattatatgcgatacaaaaataaataatatgcatctctgcttccaggtagcttacagttttccaggagattcaagccctcagacagtgatttctctgactgagatgaacttaacacagggagtagaaagagatgattgattcgttctagcagagaaagaaaacaatagaatttgaatctaaaattatttttatctcatttttaaaattttcagtttttatctttgttgtataacatataaatgttagttcagtataataatccataagtacatatacttaatataagtggtgtatgctcaaaaattttcactgttagagcacaggatcattacagtttagtcagcactgtcctaacgtaaacctaaataataccatgctctgatgagtggtattgtggcaggtcatgaggtgctgtgggaacacaaatctggccaagtttgccagaaaatgagaggcatttcatgaaaagcagatgatatagtcaaggtgatcttttttatcattgaacatttgtcagctaatcataaacttttatttattgtgattattaaataagtttggtaatgattattgagagtaaagttacaatttctggtgtgcaagattgctttccctgacatgaatacattgtatcattgttatgaatgtagccatccgttaggggaggattttatcacagacttgacatagacttccacttaacatgattactcagtagcctccttaaacatcaggactaaaggaataaccttacatcttagattacattattgaaatccaataaccaatttgttgataaataaacacccttaaaattttagatcttttgttcagtaatggctacagtaataaaaatgtgccaaactatgtttgtcattttaaagccattatttctcaaaaagaacggtttatgttttagctgccattttaattaagcttgttaaaaatgaaatggcctaaggatgaactctgtaaactccacatgggcagggccactgttgtatcatggctttgccagtgtggtgatgagatcaggacctggcagatgtgcttggtgaacctaatgaacaaccacctgaggaatgacgtgaagggggaggagattaccaccactaccattggctgctaattcaaaactactgtgatggcgtagagcttattttagatatatctgtgattcattattcttttgtcacacttcagcttgccaattctgtaactccttgggatatcttgctgagcttaattgcagctgccactcatgatctggatcatccaggtgttaatcaacctttccttattaaaactaaccattacttggcaactttatacaaggttagtgcaattttatcatcaagatttattatttttgcattctagaaaatctttcatattttgaagaaaygaaagtaatgaaaataaattctcaatgaatgttagaattttaaccagattaatattgctaacagtattgttagtaatgatatgtccagaaagagacgtatcattaagtaactcagaaacgtcctttgttgtagaatacctcagtactggaaaatcaccactggagatctgcagtgggcttattgagagaatcaggcttattctcacatctgccattagaaagcaggtaggttggattaagacaaatttaatttgttactggttatagaagttaagttggcaaagtaattttataaagttttaaaaattgttatgttcaggtgttccacagttttcagtgtttgtcaaatttaataaattatatacaattttagtaatttagagctatcctactatatagtcggtaacattttaatggatagttatttttatcaaagactattccatgggtttgaatactataaaatttactcaaatacacaattgctcagccatagtttactacttatttacataaatagatattacacatttccatactcagctgaataaaaccttaaggtctaggtataaaggtaaattggatggaatgtaaacattctattacattaaayagattcattaaaatctgttcccagaagttttcaaaactgacaagaaagtaaagagagtgccttatgtcctcaatagcataatcctggagtcacacttctagagctataggatataataatgaatggaaaaaaccctaatattttaggaaaaaaaaataaatgggctattttagaacctaataaaaaacattaatgtgaataaggctaacacgatggtgatggtttataaaatctcacgtcattgccatagtgtggtccacacacaagctttttagtaatgttgcactgagggaaaatgcacgtcagcaaaccatgaaagtggattgaaaccatccacttcaagaaaagtggtgaggtataaaaatatgtttgagtattaaaatttaagttccacttgctgttctctggtttccctttcataatttaaaacaactgtataaaaaactgttttgtgtaatgaccatgagaaaaaagctggactttattttttatttttttaaatctttattcacggataccatttggagtatgacaatacttctggtaagtaaaatcattttttgctgtagtacaaatacgaaaattgcttaaacacactgtatatgtaaattatgggttcttaaaattaagacagattaaaatgtttgcttcattattccctttttaaaaatcatgtttttcatttgatgattaaccctgttgagttctcagatttaataaaaatggaaataaggaatactacctaatagcattatttaatgttttcttcatttagggtttgttttaacattcaatattgtgagtctttttatctatttgacagctctttactgatcattatacagagatagtatttgctatggcccattaaaacaaaaggcaagaattttttttaagtatgtttatcttgttaattgatctgaggcagttttataaatgatgtatgtatttgctgtttatattaacatgttacctttttcctttcagaaaagttggatattcatttacagataactgattggttcttgagtttaaccttgaaaacacagttattaagttgctcaggggaattgcaacaggcatcttagtcagaatgtctgtaggagtcagctgttgaatgggccattattctttctatttgaatcttccttctgccttcagatctcaggcactaaaaagcaaaccaaagttgtttaccctcagcatgagaattttccagcaaaagaatcccagcaaggaactttctcaaaaaacaaccaatgttacattgattttttttttaaagcaaataataccaccttggctggcaaaataaaggctctccttttggaatgtttgcatattggtattttcctacaaactcttggttttagttttggttattttaatggctttttttgaagcattctataaaactcattttttgtgtgataaattttaaattgaatgatagttggatattttagggttctataaagccttccgattattatggttaagaaaaaaaatcaataaatagttaattgaaagtcttatattttctctttatatttctctatttccaggcaacaaatggagacacagataggtgctctgatactagccacagacatcagtcgccagaatgagtatctgtctttgtttaggtcccatttggatagaggtgatttatgcctagaagacaccagacacagacatttggttttacaggtaaaatggggcttggaaacattctatttctaggataaattatgtgactgtcaaactaaaaaatgaatattctagtgtagtttttcagaatggttaaatcttgagggcaagctaaagaatttccttcaattagcgcacactccttccaaaaggagatcactggtgaatctgctacctaggaaggcatcattgcttacgtgtttttcatactcaagatttctgatgaaaacaatttttacaagattagggtaccaattaagaaatagcattttattctcataaattcttacatctaaaaataggagaattatatttctggcttatttatttatatttatggttaatccagtccttgcacttggttctttggtattattgtcargtgtgtatatatcttaaaacaatattaatgttttgtttgctagatggctttgaaatgtgctgatatttgtaacccatgtcggacgtgggaattaagcaagcagtggagtgaaaaagtaacggaggaattcttccatcaaggcaagttacagtattgagtgataattaatctatccagttcatttttttttaacatcgtaagaataaaataactcaataatttatatgggtctagcagtagagtcttgacatttttagtaacaattcacaatagatatacatctaatcaatacaaattgagcatctgttttgaaaattagaagtcctcttttggaatgatcagatgtatttatgcatttatgagtatagatagattaggtttggaattttgctgtacagaaagatttccctgaacttgctttatccttgtcgtgtgtggagggccatatgaacatgtaaaacttttgtgtgtgtaatttaaaacccggatccaggaatctttatttcatgaaccttcctttcaggttgtatattaatgtgttataaattacagtcttggggtaacaccttgcatttaaataaaaatatcagcttggcaatctcttctatgtgtaaataacttaaaattttaaaaagaactaattgcgaagctgtcctctcatgaggattaagtatgtttttcctaagaaatgcacaggtatgttcaagcctttaattatatatttaaccaatagatattcttcatattaatacttctctttttttaatttataggagatatagaaaaaaaatatcatttgggtgtgagtccactttgcgatcgtcacactgaatctattgccaacatccagattggtaactatacatatttagatatagctggttagaaaaatgccactgtttttatcaagaagggaaatatatttgaaatataaaatattaaaattatgctcatttctatttttaaaaataatttaagaaattttacccttgttttcccttgktatggctcttctaattctcatttaattttaggatgtaaaaagtatatttttgcagaacaggcagcagcaataacttgtttctgttcttatgtaaataagaatccattattcgctcatgtggaagcttcttttgcatcatttgggactgccatttaaaaaaggataggtaaacaaagaaatgacaaaaataaaataaataaaataaaaatggataggtggtgacccactgagcctgatcataatacgaagaccagcttctgccactgcctttccagactcttaccactgcctgttgattaaatctaactcttcaacatcctagacaggcccttataatcttgcttcaaatgctgtgcagccatcttgcctcaacttccctctcatttgcctacagcatctcgggacgcttctgtgtttcccaagtatacgctgttctttcgctctttgtgcctcgccagtgctttccatgtgcctcgtagagttatttttcttgaagaggcagctcaaatgtcaccttctccagaagctgctctccacttgctttaggcagagtcagtcacttttcttctagattccaaagtgcctgatccacttggttgtggattcctggagcctagcaccacaccagaagcacgaggcccttgagaactgtgtgttgagtgaactaataactgtattatagaaagcataatgaaaatgtcctgtgactgaagtatgtgtagcttgttgcaggagttcacaggaaagttgactaggattgagtgtgttgggctttgggtataaaggagggggattctacgggggcagtagctcaacaaggaatagagggaggagtgtaattttggtagctggtgttgaatagggcctttgagaatcagactgaacacagtgaaatatgtgcccaaagttcagaaagatgaagtttccagaaactaagaaggtagcacaatatgtggcatcatactcagaaaggaagaccatgccatggggccagaaattcagaaacgtaattcttacattgtgattgcaatggatactcatggaagaaagtgggtagtggccgatttgacttcagagtgacaggtagagaagggaagagcgtgtagaactgtggccagactttaggagtgtgagggatgctgaatctcccagagagctcacactggccaggaatgctgagagtagcagatgcttttcttttgggaggatagtaaaacaatttagaaccagatatgctttgtcttgattctcaagtagaataatcttcaaatgcaaaagaatacattagaaatggacaaaagtggccaggagcggtagctcatacttgtaacccagcactttgggaagccgaggcgggctgatcgcttgaggtcaggagttcgagaccagcctggccaaaatagtgaaactcacgtttctactaaaaatacaaaaattagctgggtgtgatggccacttgggaggctgagataggagaatcgcttgaacctgggaggcagaggttgcagtgagccaatatcgtgccactgcattccagcctgggtgacagaatgaaactccatcactccatctcaaaaaaaaaaaaaaaaaaaaatggacaaaagagaattgaatcgaagacaggtgaatcggtagtcaactcagttacttttaatattaaatgtctttttatcctagtaaactactcccttgcttaatgggagaacttgcaaatgagatttaaaacattgtaatttttataaggtaacagaagctagatccctttcactgttcatctcaagctattgatcttgtcagtgttgtacagatctagaatgggttgtcagggataaggtcactgatctgatggtgattgttgacatctgctgactccacacaacaaccctaggggaccggtgctttgagcatccttattttcagatggtttgcccacttcatgcagttaacagctgttggtgttgggcttcaaatccaggtctttcggacatcaaatcccagcctcttaacaactcaccaagcagtgattactactccccaacataggggcagtatgtacaagtcatgttgaactaatacagtttctttctttgataggaatactaattttgttgaacaagaaaatatgtactggataagagtaaggcatttgacaaggcgtcctgtgaaatctgtgaagataaagtagaggcttgtggggctagtacaattaaatggagtcacaaatggttgaacagctgtgttcgaggtactaattaacagagtcctgccctccaagagagaggctggtccatggctctggtctgttcatttttatcaggtatttaaaacctaaaagaaattttaggttaacgtagagccagaagtgatagctaatttgttggctgttggaggtaagatccccaaggatctcaaccagttggaacagtgagagggatgaaataagatgaatggtatgaaacctataataataagggccatgtgggtagataactccagtggcttatgactttatggcacgtaggaaagacagggctttgggtggctggctcaacataacactgtagtgtgaagatggctgccagaaagccgctgtgtgctttgactataatgacacttttctatgtttgttatctctttctcctcaccagaacataagctccttgagggcagggatcttgtctgtcttattcactgctgtatacccagccaccgtggcatagtgccggggacatagtaggttctcagtaaatacgtgtggagggaatggatcaatgaaagaaagaaagccttattgcacatattgtacataattaatatttcagataccataattatatacacttaaaaaattcagccatcagaccatatataactttcctgattaaaagtagtggatgctggttgctttaattctggtgagattcttatgttggataaatggaacctatgttgtctgtggtccacatggtcttttgctgcaacgagagtcttggatatgaagaaaattttaaagcgtgatagaatcagaatgtatattttccccattcttaacagatcaaaatgtgataaagatgttatttgttcccaatatataatatgatttgattgatagctattttctagagggcttcttttgaccttgtttaagatactacttagtattaagtcagatctaatgtgcagtggagtgctatataacctaaagatgcaacaatcctgaaatcactcattttccttttctgactgaattaagggagattatatgaattgtttataaaataggtctctggtacacatttgttgttcactttaatgattttttcactaaccccacctgttatttttagactgactcttatcataagttttgcctttataaattctgagttaaataaaatgaccaattgtagtcatgaccaggcatgaagattccatccctgaggggtaaagcagtagactactgccagctccacttcagttcaggccacatcaccctcagtcctgaaggagaccccttcttagcctccagttgttgcactgcaactctgcctcgaattgggctatgcccgagtatcctcagagtttagatgggcagtgtatttttgcttaagtagaagaatgtagttgtgccactgagaaggataaccagaaaagrttagatatatttgtcagttcacttttactcaaatttccattgagttacttaagaaatcagttcttcaaagtggatatgtacattacagactctgtcacctacacatacacaggaatcttttgaagaataagatctgggtaatactggagtaggatgtaggaaggttaatgttgtatagatgatgttttaaagatagagtttcagcatatatgttaataactttttctcctattttctcaaggttttatgacttacctagtggagcctttatttacagaatgggccaggttttccaatacaaggctatcccagacaatgcttggacacgtggggctgaataaagccagytggaagggactgcagagagaacagtcgagcagtgaggacactgatgctgcatttgagttgaactcacagttattacctcaggaaaatcggttatcataacccccagaaccagtgggacaaactgcctcctggaggtttttagaaatgtgaaatggggtcttgaggtgagagaacttaactcttgactgccaaggtttccaagtgagtgatgccagccagcattatttatttccaagatttcctctgttggatcatttgaacccacttgttaattgcaagacccgaacatacagcaatatgaatttggctttcatgtgaaaccttgaatatgcaaagcccagcaggagagaatccgaaaggagtaacaaaggaagttttgatatgtgccacgactttttcaaagcatctaatcttcaaaacgtgaaacttgaattgttcagcaacaatctcttggaatttaaccagtctgatgcaacaatgtgtatcttgtaccttccactaagttctctctgagaaaatggaaatgtgaagtgcccagcctctgctgcctctggcaagacaatgtttacaaatcaactctgaaaatattggttctaaattgccttggagcatgattgtgaaggaaccactcaaacaaatttaaagatcaaactttagactgcagctctttccccctggtttgcctttttcttctttggatgccaccaaagcctcccatttgctatagttttatttcatgcactggaaactgagcatttatcgtagagtaccgccaagctttcactccagtgccgtttggcaatgcaattttttttagcaattagtttttaatttggggtgggaggggaagaacaccaatgtcctagctgtattatgattctgcagtgaagacattgcatgttgttttcactactgtacacttgacctgcacatgcgagaaaaaggtggaatgtttaaaacaccataatcagctcagggtatttgccaatctgaaataaaagtgggatgggagagtgtgtccttcagatcaagggtactaaagtccctttcgctgcagtgagtgagaggtatgttgtgtgtgaatgtacggatgtgtgtttgcgtgcatgtttgtgcatgtgtgactgtgcatgttatgtttctccatgtgggcaaagatttgaaatgtaagcttttatttattattttagaatgtgacataatgagcagccacactcgggggaggggaaggttggtaggtaagctgtaacagattgctccagttgccttaaactatgcacatagctaagtgaccaaacttcttgttttgatttgaaaaaagtgcattgttttcttgtccctccctttgatgaaacgttaccctttgacgggccttttgatgtgaacagatgttttctaggacaaactataaggactaattttaaacttcaaacattccacttttgtaatttgttttaaattgttttatgtatagtaagcacaactgtaatctagttttaagagaaaccggtgctttcttttagttcatttgtatttcccttgttactgtaaaagactgtttattaattgtttacagtttgttgcaacagccattttcttgggagaaagcttgagtgtaaagccatttgtaaaaggctttgccatactcattttaatatgtgcctgttgctgttaacttttgatgaataaaaacctatcttttcatatttttatctttgacatttaccttataactcaatcttttggaaaacacaatgctaaattacaaggaaatcaaagttagcttcttggctcttgtaattcatccctcagatgtttactcagtccgagcttatctactaatgactcaccttgcaagtgagtaagcagaagcccagttagggctgttggagtcctgactaacacaggggagaggtcagctttgagccaggccttttgttcctacagtggtgaactgcataagacatcagcaagtcttgcaagtactaaaatactagttgtatttatttctatcaatcattggcctttttaaagtgataagaaaaggccactccactctacttgattgatatcagttgtaaacaaggtaccactgtgccattccctatatcttcccaggtccaactcattagaagggatatggtgcaaacttctaaatcaaacacattaacatattatttgtacagaagagtgttgatgtccaatagaaacagaatccaagccacataattttcggttttctagtagccacatttagaaaacatggaattaattttagtaacatctattccaatacgtccaaaatattgtatcactttaaaatgtcaatataaaaacaattagatgtttttacattcttttggggggtactaagtctttgaaatccagtgtatattgtgtacttacagcacatctcaatttggactagtcatatctcaggcacccaatatccacatgtggctagtggctaccatattggacagtgtgggtatagaggtctgagggtagtagaggaatatggtcagctggtcactctcgtgagatggccataccttggcctatatttaatgtgtacagaaagtctgataactcagatccttaaaaattcaggcccactgtttcagtacatagagagtggaactatcatggcaaacccacattaaccaagctcacagtaactatttttttaaaacactatcaatattttaatttacagtgagaaatgtaactatcaattattctctccctttaggcaaatcttcctgggaagctaaattatgagcagctggtgagcatggattctgagcaagggaagcaagttgcctcgtgcacccatgtccctttgggtgcacagaagacccatgtcttctgtgatattcatgtttgtggaccagggtaccctcttcccctggaaggtgctagagattctctgccagtagttgcttctctacatcagcttctgattggcacatgcattaaataacgtcattacctcaagccttgtttcagttgagcttacctgggctccattctgcctgtatacatgattgcttctgctctgatccattgtttctcttatagtttgaaactgaaaagatcatcctatttccacattctcaggggaactgtgggtgtggctcccatttcctgcctacacatataataaacccattgaaaagttgttttattatgtatatgtgggaatcaccttctatagcccttttgtttttttttttttttgagacagggtctcgctgctaactaggctggagtgcagtggcatgatcactgcagcctccacctcctaggctcaagcaatcctcccacctcagcctcctgagtgccaccacaccacccagctaatttttttttttttttttttttttttttttgagacagagccttgctctgtcgcccaggctggagtgcagtgccgcgatattggctcactgcaagttccgcctcccgggttcacgccattctcctcattctcctgcctcagtctcccaggtcgctgggactacaggcgcccgccaccaggccctgctaatttttttgtactttattagtagagttagggtttgcagccatgttagccaggaagggctcaatctcctgacctcgtgatccgcccccctcggcctcccatagggctgggattacaggcgtgagccaccgtgcccgggcagctaattttttaccaacatttttttggagcgcgccggcgggccgcgcgcgccttcccgaacttcgggggaccgcggtggccgcccttcgggttccggcctccctctcgccccggcccctcgtgtcgccctggcgggcggcggagggccaaaacgtcccgaagaaaaaaggccacacattannnnnnnnnnnnnnnnnnnnccaacatggtgaaaccccatctctactaaaaatgcaaaaattagctgggcgtggtggcgcattcctgtaatcccagctactcgggaggctgaggcggaagaattgcttgaacccaggtggcggaggttgcaaggagcagagattgtgctactgcactccagcctaggtgacagagcaagactctgtctcaaaaaaaaaaaaaaaaacttttttatagagacagggtctctctttgttggcttggctggtcttgaactcttgggctcaagcagtcctgccaccgtggcctctcaaagtgctgggattacaggtgtgagacactgcatcaggcctatagctccacttaaatacgacctatattactggaatatttttttctaaaaaattttaggaaacagttaaatatttaaaagattacttttttaaaaagcaagtaaatattacagaacagaatgcaaaatttattttacatgggagactaaaaattttcacacacatggccaccctttgggcctcttggctcaacatttcaggggctgagggagtctctgctctaggagtaaaaggtccttggagagaaaattttgacaagtcctaactttaaaaaagaaaaattggttcctggtcaatatttgtactcactgtaaatgtgatggttggtaatgatactctgtataaaagtaaaaatcatattttatgtcctttgcaaacaaatatatttgtacctgaggtacagattagaggtgctagtaattccttgaagattctgaaaatgatctttttttccaaaatgctttcttggtttttattaaactttctattttcttaaaactctcacatcaggtatttccagtgttttcaagcatgtataaatattttaatgtataaatgttgtttaaaatcccctcaatcggtatctcctgattgagaaaatacacagtgaccaatagctaataggaattcagtattgctttcaaagaaatgtgcatattaatcactgtagcatctgcatacatttgaaacacggagtaatacaggtctgtgcaagaattagcagcttgttccttgctaataatgacttgtgtcatctggaaggcccccaagagcccatggtctacaggtggaatgaccaccacttgggagtgagctgatggagagcacccagcaggtctcctccatcttcctggttcctgtgctcagcatagggctggtgtacattgggccattaataaacgtttgttgaacaaattaatttggaattaatgtgttccctttttagctatcgatttattactaagagattatattgaaactcttccgtctatactggagtcatgtggtaagcagtatccaagtttctgttgtgtgcagaagatggcactagatatataataaaggggggcattaaaaattacaaaccttggtttctgttctcaacatgtctggttgacagaataataagtgcaacatgttatataatatggcgggtttctgtatggtatcagtagtgttgggttgtttaggagaatgtagggttttgttcgggtaatgataaaaatgacaccatatctagtaattcttgtatttttaaaattgttggctgggtgtggtggctcacatccataatcccagctctttgggaggctgaggcggacagatcacctcacgtcaggagttcgagaccaacctggccaacatggcgaaaccccatctctactaaaaaaaaatacaaaaattagccaggcatagtggtgtgcgcctgtaatcccagctactggagaggcagaggcaggagaatcacttgaacccaagaggcagaggttacaatgagctgacattgtgccactgcactccagcctgggcaacagagtaagactgtttcaaaaaatagttaacatctatgaccgataaagttacttagccttcaaatttgattctaaaatagttttaaatgttcaatatgctactttaggtaaaatactttcatcaattacatattttagtcttatacctacatgtcctaacttgtcctgaaacccaccttaaagtctgataggatggtgggggaaagagagaaacacatttttgtttttgttttgtttgtgtgtgtgtgtgtgtgtgtgtgtgtgtgtgtgtgtgtgtgtgtttgagatgggagtctccgttgcccaggctagagtggagcggtgtgatcttggctcactgcaacctccaccttccaggttcaagcagttctcctgtctcagcctcccgagtagttgggattacaggtgtgcaccaccacgcctggctaatttttgtatttttagtagagacagggtttcaccatgttggccaggctggtcttgaactcctgacctcaggtgatccacccgcctcagcctcccaaagtgctgggattataggcgtgagccacggcactcggccactcctgtttttaatattagatttcttgttggctataatttaaaattgaagcacagtgatgtaattggtttactgaagctttccactggtcccatcaataagtctttgccaagacattccatcttgtattacaacacctatctttaagctgtacatttatttacatgacatttcggaacacagatttgaagtatttattgttgagccatgtcctgtaaagcagcaggagactgtaatgatttcccaagttcccttaacttagttgaaatcagtaaaagaagttacagatctaaagatgaattttttgaaggaaatactagaaaggatagtgcttcccttagtccactcaggctgttagaacaaagaaccagaaactaggtgacttataaacaacagttatttctcacagttcttgaggctagaaatctgagatccaggtgctggaatggtcagttctggtgagcactgtctttacagcttgtcagacctaggtttgggtccttaggcaggttacctaatcttctgagtggctccctaacctataacatgtctgttccttaaagtaaaattaactattgatatatggtaagtgctaaatcaaaggttactatggctattctttttagttcatttcttgataatttctacttatataaacacatggatacaattgtacctcataacatctttatttgagctcctggcactgattcactctagaggcttcctactcaaattcatgagggagaacctgattggaaaagctcatcagggctgtgtcctgggttacagagcagtctctacattaccaggcgtgccccttgcagaagggaaggcaggggttggggggatctggacagctcagcccccgcggtcagtgccttatgcacttccctccccttgtactcaatgctagtatttcagaatgatttccaaccatgctctagctgtatcctttttcacccttaaaatgatacctagtttccacaacatagtacctggggaatacgctttctttcacctttcgataaaaagtgtatctggctaatgaagaggggtgaccattaggcaacattaacagaatgtttttatacctttggttaaaatcttgttatgaagagtctggcctttctccccaaattaaggcttttccaattgggttatggaggactgccctgggataaccatttggtatgatcaggaggcactgtttgagctgtcttaacatttaccctcctgaaaatgtctaaaggacacttgtgttctactctgcccttatcgaaggagccctctgtgaccttaacaaggggctggagaatgtatcagagaagttccagctttaggaacattaaggcttctagaccatatgaactagactaaggataataatagtcttggaaggaagaagtgtgcaaaagttatagatccttacttggttatgctatttttattatcccatcctcaaaggatggctaccaagaccaaggaagagctagattgtttataaggtttacaaggcaagtctaagaagaatcctaacaaataggatcaatagggtagcagagaagaatgctaaatctctaggatgagaaagggaaagaggacacagaaacaggaacctactgcaattgaaaccaagtgcctcattctatctatctggcaatcccagcgctgactttgttgggcgaactcctgaaagtttaaacttctgtctgccagattctatcccacagagagaacttctatttatttctggggaagttatcagaactatggttttttcaaagtatttgtttctgctagttattaccacgtgtattcctcttcaccagagagacagacacataggcattcctaatacagaaagaagacacaagtcttatgtagaagggcctgggactggggaaacaaccagaactaaagactgcaagtcctacccctcctatgccaagcctgcacaagcaagtgcataggatgatgccttttacaggtgccagggaccactggagaaatcattttattggaaactacagagaccctgtgtaaaataatgcaaaagtaaagataaattatttaacaggggatcatgtaaagctccaagtccagtgttctctgactcagatcttcccattctgtcttgtattctctctctctctctctctctatatatatatatatatgagagtccctcaatcagaactcagacaaaacataggaaagttagttacctttctttctcatacctagctgaggtataactattcttaaggtcttttacttcaggtgttgtgttgggtgaaagaactagaaactgaatgacgtgggtgtgggagaagctgggaagacaaatttcaccaatctcagaagtagattatgggtttgagaaccctgagtcaactgtgatacctcatgactgtcctgttttaatgctgagatctctttatatgagaaaaagtgaatgagaggtgattttaagagcttattttaaggaata

SEQ ID NO: 95996 - DNA, 343684 bp, Homo sapiens
  misc_feature (1)...(343684): n = A,T,C or G
taggtatttcttttggcctagggtgctattaaatattaccgagaaaacctgaaaaccaagaaaatctgggaattttcttctctgagatagatgtccaaagaattttttggagattgagcagagatgattccagcttatgtctgcatgttgtggagggaaacacagtcacctggggggtcctgaaggagaggactgaaacaggctcactttgggatgattgtgaatacatattgcttatctggaaacaaggattactctgcttctgtggtgctaatgagaccccatgtgaaacagagaaatggaacatttgattttagttcacagtcgtggtacagatggctgttcatttttgtatacaaaaagaattaatgctcgttttacttactataaggagaactgccggaagtgagtaaacgtaagttttattctaaaagtttcactacttttggtggagaaatgttttagaattattttaagattaacatgggtttttaggcatgaactaatctattcataactgaggacctcatttcaatgtccaacttgaaaagttttccagaaatgatcataacattgggtatccactgtcatttgtttctcaagtttttaaacagaaaattgtacctatggattatcttaagggatccattacatttccgcttaatcattattagtaacatttttctaatgttttcttatctagtgacaaaagcacacttcatacttaatgttaatacttctaagaattctagtcatcatattaaaattggattttaaaagatttattatttaaaataatgattaaataacagactgcatatttactataaattggacatatttaagtaagtgtctattaacattaacaaagttatattgaggcattcttattgataattcatacttattattgttagctgtcaagcttaataagctgcagacaggaagatataattcctttatataatacaataaagcagacagaagaattaggttatgaaaagacagagagatagtgagcatctaaccaaataggattcagttgaaaaatttttttttatccatttaattccatggaccatgttcatggcagttttgtatcaggagaggatcttgggtggtttaaggagggatctgtataagaattgaattctcagaaaggatatgacagggaagaaaaagagaatctaaccttatgatgatgtatgtgggtacattttttaggcacaagatatatctggaaaggaaatgaacagttcaacaaatagaaaaattacagaattttgaggattgatgataacctaaggattttatccaacacttttgatttagaggtgaagggtttgagtcccagagcagttaacaacttgattttggtcacagagctagttatcagcagagaactgtagaacttctgcacatgtcagtgcttttccacattatgttccaggacataattcatacaagttaattgtgtatttaatatttattttaatgcaataacccactcacattgtgattttaattcagcatattttaaaatctgtttttaggacatttgaggacaagagacaggcaggaaaagtgtttcagtggaaatagcatgggcttagtagtcaggattggaattctgactttaatatttatcagctccatgacattggaagatattttaaatctctgtgccagaatttccataactttataattggaaaaatatgtcctattatgttgggattaagaatcccaatttaaataaagtgtatagagacctgggattgttgagtatgcagacaaaaaggctgagagttgtaggagactgtggtgctgatattagtattcaaactgttgactaatagggtctcttcttaagaggaggatggattcctgtggtgcatggttgaatgtaaagccacttaaggagagagtagtgtctgccagaggcaccaacatacactgatcacctgcctctttcttgctgtcatggatttgatgcatcaaaaaaaagtcagttattacacccttaagtatctttctgggtcacaaattctactaagtgtagcattgactttgttgcttgtctttctttctttcctcctttcccccagccttctcctcctctatccttttttgagcagcaagaatcctacccctttgggatggttttatgataaaatataactataggacaatggattacattgtcttctatgtgtccctttatatgtgaacacagcagatggttcttctcactttgatattatccttaatatttagttttacttacaaaattgtgcaacaatatgaagtacagtatctcttatttgctgccagtctttctcagagaaagcacatttgccctccttaatatttagttttacttacaaaattgtgcaacaatatgaagtacagtatctcttatttgctgccagtatttctcagagaaagcacatttgccctcttgtaaaagagggggtatgttaagtgtgagagagtagacagatctcattcacgaacacaaacatagggttaaactagcaggtgaacagtgtgaagtgtgtgtgtgtgtatgtgtgtgtgattttccaggttagggatccagaaaaacttgccctagttaaggattcaccagctactrtatttctttagaaaacttgctttaatattacatgtacaattcctgtgaattgccagatttatgtaaagawtgacagggagaaattcttcagtcttctatcaggatagagctctgctccagggaacgcttatgcaaatcttgcagattttcttgctggagtgttagatgaaaagaaactagtaaagagtttgaacctgggaaacgcaaagaattttgggaaggaggactgattgtggttttgatttgaatttgacacacgtgacttttcttcaacaacttctctgagaaggatgaaaatcaggttaaatgaggctatataagtgaaagggtttataaataggattgatttatgtgaagggaaggcacgcacaaacaatagttactttatgtttcaatgtaaaatagtcatcgtcttgactaaagtgaagaatctgtttttttaggaagtctttcccaatgcttgatcaatctgagttgtcaggtgcctacgccaacttcacaaataaaccaagaatatttctgcatttttcttttccagttggagagtggcctttaaatactttattgaaatacaatatatccagcagggctggatttgtgggtatgagcttgggcaagcttcttttcctaaaatcagagcacagactattcattctcagcagactactcttcctaaagtatttagattgcttttgctaactgtaagccttcttcttcttctttttttttaatggagaatagctatgcttcattttaaaaatgtcaattctagtataaacacagcactcttcatattgagagcttttgaacccygctcctgaacagaaatacaaaggaaacccttgaaagcaaagcagatgttgtactggctatatctaggccttgatttgtttatagtttaaaaatccatgggaaaataatgatcaaaggcagggtgtaattcatagagaaaattgtaagacgacttcatctggctagattctgtaaagagtctttgattcaaatggttcacacaaagaaaaaatgtcccataggttcagagttctttctggcaataaacttccagtgtaaacaggaaggctcttgggcctcttacaaattttagaaacaaatgatactcattgccttgcactcaataattttgactttgagacaagagttggaatggttaataaaaagttccaattctaagttcaatatgaagtttatttgccgttaccataatatttatttgtgtgcgcagcagtttattgaaagaatgtgaaggacacatgctatttagtatatttaatactaactaaaatcctataattckaaagaacttgactattatataatcagtaccaaagaagagaactaggaactccaatcctttatgctgattgatactgtgtagcagaaatattaaacaattaccccaaagttagaataatgtaattttcattataatttagaaaaaggggctagtgaaacttttttagcaaaactgatgattttttatgattaaaagtgtaatttgagtctaattttcaatggacacaaatgcacatagaattaattgaagtaatggggaaatcaatagtagatgcacaacagtttaaataataattgtaacaattattattttaaaagaaacttcctcaggatgagaaagaatacatatatataagaatatatattatatatattctttctcatatgtatatgtatatacatatacatatatatacacacacatatatatatatatatatatataatttgaagggggagtgtctgagtgatagtacacacttttctatctttaaagcccatttaagatctggggaaaaaggtatgtctctgaaccagtttgagtggatttttccaaatgaaacctcaaatagcatttatatttaagccctaacaaacacttgggaagatttgaagttaaaagcaaattgtggtgggggtacagcacaggttttgtggtttggttttgttttgctttttaaataaacacagtccacaaaaacccatctgccttcacctggaaggaccagttctttaattaaaaaaacgctttggcttcggtttcactgggaaactaaagccagagcccctaaacttttctctccgcagatcgggtgagctggggagggtgctcatccacttcattgcagggggaagtacagcctggaacccctttcgggatactgtcatttgccccttcttcccatctcttactctatcctcagaaccagtatgagagttttctggggctaaggcaaggggcagtggggtcaggcgctggaaggactggtttgcaaagagataagctttggaatgaagccgcacagctgaaaactcgcggcaagacatgctcgcgctgtggcgagtcagttcgagaagcatttatccctactccccttagctttctgagcagcatttgcagtcaggtgcaaacagatcgcatatttggcgcaaagagccctgaggatgagggacgtgggatcattccccggtttcccccgggccaggtgctaggtcgtttgaggaggaactgttctccagttctcaacgcctgcaaaggcggctataggtggcaagcggagctgtccagcactagtgaggagccagcggagccgggagccccgcgcaccccgcccggctgaggctcagcaacagtgctgtcttgtcagagcagacgctgtcctcactgccgcccctttctgggctcgctccgcgcccacacggcctcgcacgaggcggggaacacaagtccccaggagctgctccagcaggatgggcgccaaaatgttgcccctgtccttcccttcccctgaaagcgtctcctctggagtgggctggctggacgcttggcctttcccttttgcctcggaacttcctaaataaactcggagaaaggacaacatggaccctaacccccacttcacactgtcaggtttccccaaggtggctccagggggaggcctctcgccccccagccccgagcccttctccccaccagcgccaccgggacccatctgctcccgagggccgaggataaggcgtttggggttggggccctcagtccgacccgagctcctgtgtgcacctcctcggagcagggagggcgcgcagaggacagcaacgaagtgtcctcgttgctcctgaaacgtggcgacaggcgaggcagagactcccaatgagtatgatggcgacacgtgattcccgcggagggagagcatgggggggggcggggggataaagggagaaggagggaggcgggcagcaagtggagagaggcgggagcagagagggaaagggggcgagataggcgcgcaggcggcagaagcctctgcctctgcctccccttctgcttgggccgcagccctccccgccccgccgaccgcggtcacacactctcggagcctccccgtgagcgggagcgcggcgcacggcgatgcgccgaggcgggcgctgaggcggcgccgcgcgagcagcagcagaggcggcggcggcccccagcccagcccggcgccgccgccgagcccgggccccaaggtgcggcggcgccccaagttcccgccatgagcagccggctcggggggctccgcggccccggggactcccgccccgccgggcgcgaccgcagcgccccgcggccccgacgcgcttaacgttgtcgcttgccggtcccgccaccgccgcctccgccgccgctcgcgtcctcgccgccaccgcctcggccgctgcagctccgccggcagcatgtctcgaaggaagatttcgtccgagtccttcagctccctgggctccgactacctggagaccagcccggaggaggagggggagtgccccctgtctaggctctgctggaatggcagccggagcccgcccgggccgctggagcccagcccggccgcagctgccgctgccgccgcyccggccccgaccccggctgcttctgccgccgccgccgctgccactgccggggccaggagggtgcagcgccggaggcgggtcaacctggactcgctgggcgagagcatcagccgcctgacggcgccctcggtgagcggggggcggaaggggggaccgccttcgggggagagaacgcggatctgtaaagttggcgctgggcgagccggggcgcgagcgcagagcccgaccgctggggggcggcccggcctyaccctgcacggcctagggttccagtggctccggcgacagaggatcccctaggctagggcggaagaggggactacagcactgggaaggaataagattccactcctttggggtatcctgattcgggggcctgtctgcccacctctagccttgaaccctacttcaccactgttccccctggacagccccagtgctgcttcacacccacctgttttctttcccctaaactttcccaggcactgtgttctgcagttcagcttccctgtctttcatcctgttctccagcatcccaaaggagccccaaccccttccaggaaacccttcctctccttatttcccacactctcttggtcttagcgtgaccttctctgacatctttgaattccacaggctatctgcattctatgttgcatcctttttctcacatcttcagatactttttgccagatacttttctgagttgccttctgttcaagtaatctctaatctcgagttgtcctcaccccgtagctttttttctttttctttcttatccactaggcatttattcttctctgggtaaacctggtgtctggatttctttttttttaaattaaatttaatttaaagtcccgggttacatgtgcaggatgtgcagatttgttacataggtaccaaacgtgtgccatggtggtttgctgcacctactaactcatcacctaggtattaagcttcgcatgcattagctatttaaaccgctctgtacttcttgcacctgtacctcatcctttactctctcctcaatggattctctagtgctttctctctcacattagctatttaaacctctctgtacttcttgcacctgtacctcatcctttactctctcctcaatggattctctagtgctttctctctcacattagctatttaaaccgctctgtacttcttgcacctgcacctcatcctttactctctcttcaattgattctctagtgctttctctctcattttttgrtggcttctttatattaggcccttcctaaatatttgtggaatgaataaatgcctctccaaacttgtggtcatcttgggatgtctgtatcagcagtttcaggtgtacaacaaactccccctggttgtaggcatccttccagaggagtactgccttattcctgcccaggcatttcagctacccttggcttttacctcttgcaggaatgccagacctctgatccaatcttaccgtgtctgggagagctctgttttaaagaaatccactctgttgcagacagaatttgaaaaagattcagcgtcaaacctccacccatcttttatgctcaccctgaccttggatacaagagctttagctcctcctgacagcactttcacctgcccacccctaggacttttacttttttaaagtttccgaaatgaatctgaacactgatcttgtttgattactgttgagtctctcttttgagattactactgcaaatgatggtaggggggacctaagaaggagtggaaccctgaggggactgagtacgggtaccagacaggtctacaaatattcttgtggcacttgtattaatggagaatgatttttttcttttacgagacctgattgaagatgtataaatcacttattacattatttattttgaactaatttaattcttaggaacacatattgagaaacagtcatcttcctattcttgtgtattttcgtatttgatatatctttctgccactttttctttcatcattaacctagaaaacaatcctcagaatagattggctactctttgctgttcttccctgccaatatttcccaggcagcgtaattttataaactatttgatgttgcaaattgttgaaaatatttatttacaacaggagtccaatgaccccgagcgtctgtaggcttgtgtcagtacttaaagcaacatttgtgcaataaaatagttatttagtacaacagattcttatttaatgaaatgattttgctaaagataatgattagtttggggagaattgttgatataaccttggagggttttttttttttttttttttttttttttttttgcctaagagaatttacagatttctaaaaagtaatgtcaatgcctctgataatgctaatttaagctaagactattttcaacaacttacatgaggagtagataaaagaaactgagaaatgcagtattttctgcyagaataagaggaaggaaatagtctctgatggttacttttataagttaaatttgaatgactggctttttgctggatgaaaagaatgtatccagagaatkgttttcagaataagcaatttaaaaataattgtgatgatcaaataaatgcaacagctctatatactttccatgccatagttgttttctattatgaaaagggtctgtcaggtggacgctgagaacatacaggtgaatatactgtaaacattttcaacataacacatgtatagaaaaattctccttggttaaccatatcatcaatagacttagtgacacaaataaaagagagagattatatttcaaagcagtgactcatttctgggcagtccttaccttattttatttggcaagttagaacactagctcaaaaagttccagtagattcattttttgacattgtcaggatttgaaacttctttgaatactcttcaggagatggattatgtcctctctattctctcatgaaagctggacatttttttgtttttgaaccactgagagtagccattaccagagcctttttagatgggaatttctagttgttttgaatgttgtgagctttcttgcatgccatcacaatatacttcaggagaaactgtacttgccatggaagctcctgttttgtcagttgtctcatcgtggcatgtctcagtcacttgggatttcttctttattcagaatgatttgcaaatagaaaaatgaaaatttatttattaaactagttatttgacccatgggatatccacactcaggtttttgatgcttaatagtcactttaagatgcaccgatgttgagtataaaggttataataatttctaatactatttaataagagtaagttgtattggtgaaattgaaaaaaaattccagaattcgggagacctgattctaattttgccttgaacaatgagaaacttacatatctctggacacattactttaaatatctgggatttcccaggctttggacaaactgtcatattggcatatgaaagggaaacatgggccaggcgtggtggctcatgcctgtaatcccagcactttgggaggccgaggcaggcagatcactaggtcaagagattgagaccatcctggtcaacatggtgaaaccccgtctctactaaaaatacaaaaattagctgggcatggtggcgtgcacctgtagtcccagctacttgaaaggctgaggcaggagaattgcttgaacccgggaggcagaggttgtagtgagccgagattgcgccactgcattccagcctggcgacagagcgagactccgtctcaaaaaaaaaaaaaaaaaaaaaaaaaaaggaaaacatggcatatattataagttttaaaacttttgaggaaagtagtttactttttaagataggggcaccaaaatgctatttaatccacccaattatttaaaaaatattgtagtatctatgtggcaggtattgtgcagagcatttggaaagacaaatgctgaacaaaacatatctagtctttgatttcatggaacttctttaatcattatctttattttaatgaaactatataaagggaaaacataagaactccaattgtcttggcgaaatctaggggaagttttatttgtcattcactttgggtagttttgttcattgtgaatctctggggtgcagccataataataaaaataaccctccaattagcaggtcatgatgatgcacgcctgtaatcccagctacttgggaggctgaggctcgagaatcgcttgaacccgggaggcggaagttgtgatgagctgagatcacaccactgcactccagaccctgggtgacagcgagactctgtctccaaaacaaaacaaacaaaaaccctcaagaccttaagacctgattgaagatgtataaatcatttattacattctttattttaaaataatataatagttgggaatacatattaagcaacagctggggatttcacatcaagggtgaacttagcgacttatttatttggattttattcttaaatgagagttgcttagttaccctatcactgcgacatcaattttgggtttgctggtgtcagcctgtcagtgaagatacaccactagagtcatataagggcaaggcttctctaggtttcttgacagagaacattgcaagtggctttgaagacctcagaagctttagagagcagaatgtcaggaaaaaaaagtaacagaattggaggagtggcaaataaggagaggagagctactgacctgtggagttgttcaagaaacagagactagtgaagaggaaaaaatgaaggtggaagcttagattcaagtgacaaaaaagcataaattattattttggggaaggaaattatcttaatacatgtcaaggaaagaatgaaaaggcataaaatactttatttagcttctgttgatattaaataaaatgagctctctgacatgtataaaccttgaaaaaaaaccttagaaagtatgtgtgtaactaacatgtagacaatgaaaaatgtaaaaaatatattcgtaaggtaggctattggacaaatttaggtagtttaattaaagctttttaaatttggggcttaatttggctaacaaagttatagaaacagattcattaccattataaaattatataaagtatatttcagttgtttaatgttttcacatttgttgaaaatagatactataatctgaaatcagaatttaatggcaatctattgcctttctttaccttatccccaatcatttagaaacaacatgacagagttgaaagcacaaagttttggagtctgacaaatttcggtttgagtaatcctctgctgagccccttactaagtatgagtccctgggaaagctaactcttatcttctctgagccttagtttcctcttttgtgaattaggaataacaactaccttgtaggtttgttgtgtataaggaggaatattcttcttaaagcttcctaaactcaatagatgatagtttcagggtgagatctattaattttaactgaatttgaatgcctcaaagtgatctaaatttttcattttctttttttctcaataattcacttgctagtcacctaattggaaaagtttatagaataggttaacagatgtcaagtacgaaaaaaaaaaaaaaaagtaataagaagcactktattttgtcggcatagcccagacaatccattaaaaaaattaaaactggagtccctttttggcccctgggtatgactcatgtgtgtacacagacatataaaaattgcagatccaaacatttccatcagattactgactgctgtgtggcaatatgaaaactactttataaattctataaaaatacaaggacatatatatttggtagaatgtagatatttcatgacaagttaattttaaattagaaaaattgtaggtgaaagagaagttatttatttcagttgcctaagaattccaagcattcttcatctactgcattcaaactaatctgtatgtgtgttcaaaggccttgatagtgagatgcaacaattacatagctaatgctgtttatattttatggtgctgccttcttgtttggctattggttcaattgctaggctttcttttgtctttttctttttctttttttttttgaaatagggtcttgctcctgcctcagccttctgaagagtagaactttcactttaaagttacattttgtcaatgagaaatgacatcagtgattattaggtttgtaagtagaagtcagacactctgactatatattatagtattatatattatatactcctttttatatatattaaatatatatatttatatattataaatatatatgtgtatatattataaatatatttatatatttaatatattaaaaatatattttatatatattatatagtcctgattatatattcctttttagtgtatagtttatttacctttaaggactctaagatgcataggtgaagtacttgagtgctattatatatttttcccatctatgtcatcattagtctttttgttcacctttttgtcctgttgccgttaattatacagagctctaagtaaaataaaacataaatattttattgaatatgataggaaaataaatgcactgtcatttgacacatacattgttgatcatgagttactaggaaggtataattttcttttttgagatttcacacacatgtaggyacataggccgggagaatatttgcaagggctatctattgagcaggctttcttcacaggccctttgttcgatgcatgaggcagtgggttaatttaacatttaaagcctctgtccttgatattcttatgtttaacttgtgtttagcatagtatggttgttcaataaaatgcttaggagggccaggcgcagtggttgacgcctgtaatcccagcactttgggaggctgaggcagatggattgcctgaggtcaggagttcaagacgagcctggccaacatggtgaaaccctgtctctaccaaaaatacaaaaattagccaggcgtggtggtgggcgcctgtaatcccgctacttgggaggctgaggcaggagaatagcctgaaagtgggagggggaggttgcagtgagccgagatcatgccactgcactccagcctgggtgacagaggaatactccatctcaaaaaaagtaaaaaaaaagtgctcaggagaagtaaatacatgtttttgtttaattgttcaattttattaatgtttcttttgtgtttaatttttttttggtggtatatttagttccatcaaccaaaatatttagatttttcatccagcctgtgatagacatattcaagtatgcgaacctgtttgaattttgcttacacctgctatttaaagcaaaacttcggaaggaagtcgttttacaaaaagagcagatggaacagtatcctcctccttggactctttgagtcgtccatttatataatattttaagaagttaggtaaatgtaatgactcttctacagtctggattgcttatattttctgcccaattctctgtcaaatgagaagaaatgtttgtcaacaagtaggctactgttgccaaaaatgcactactaggagatggaaatgacataattatggcccttaaacatcacttcaggacaggatctgaagatctagaattatgtgctgttagctcagagtacctcataacattgagggctagagtcatttaggaggtagggcagtgggaaatatcttggaaggcgggaaatttgctggggctgttgtagggaaatgagaaagagtaaacattcttataaatagtgagaaatcacttccagagcaggctttatttgaggcttattaaacagttcttcatttaatctagtagctctcaagcttcattgaacacaagacatacctgaggaaaattgttagaatgcagattcctgggtctcatcctcagaggatctggttggatagttccagggaggggcccaaactacattttgaacaaaactccaggtaattgctcagcaygctgaaggtatgtctagaggtgactgaattccagaccttgaggactactgagcagtgagctctatgggctgatttttgggaagaatgatcctgaaagtcgcttcctttgggattaatgtatcccagacaactattacctttactgggttagggataaaggtggtgaattggtgctgttatccccacatcctatggctgtatcttttgtggtcgaaataatcttactggttgtatggtagaaggtatttgaggtttcaccatttgtagctttaattatctgtggactctgcccgtttttcccgaggatgttttgttaactgcttatgtttatgttcagtagttcgcatgtcattactataagtatcttgtgacccctttttccaaaacagagaaacagatatttgaaaaggttggggattgtagaaaaaaagaagggtggttgtgagggtgaatttgacattatcaccagcatttgtgtttttcagagtgagattgacacaacatttctcaaatgctccatctactggttcattttggaggagtgatttgtttacatgccaatgaaaaattaaaaaggtaaagggagaaaaaacagatctgaatgccagaattttttttttctagaaagaaaacaataggaggttcagatatcagatatatagggccacctctcaaaccttaccaaaatatgacactaacattaatgcttcctaatctctgcatccttagccgttcattcagtggtgaagttgggtgggggtctctcatttagttctccaagtaaataaatggtgatccaacatttgaagaatttgtatttgcagacaactctaataatctatcatgaaaggaagttatctgtgtggaggtcctgatgttaccttaattgtaagtccataaagtccacttgactcattttcctttcactgtataatatttgttatgcgtgagtctactgtggccaatggcaaaaatcagaatgttctaaaacatccttccattccttgttgctttatgtctatgcttcttcatacatgaaccctccaacttaatactgggagaggatggtttttctgactgtttttatgtacacacgcacacgtgtatatatatcgtgatttctgtcactccattttttcccctatggaatcctaacttatcactcacatctccattatgggacttattgtattgtaccttgattttggtttattctgcctctttgagatggaaatcctgtcttatttatctatgtatgcgcatgcctagcagagtatctgaattataaaggcactcaataaatgtttgttaaaagaatgaataaatgattgaataagtccttgtgtagtttatgatgtatttggtactgctcttttggctataatgattttgtgatttttaattgattattttatctgactgttctgtttgcagctttttctcagacataaacgggaatatagttataacattattttttagaatgcgttaagattttctaaacattctcctacctgacattttattgggacttcataataatctgtaggttttatgcaaattgcctctcactttgggtagtatgattatctttttttttttttttttttttgagatggagtcttgctctgtcgcccaagctggagtacagtggcacaatcttggctcaccacagcctctgcccaccgggttccagcgattctcctgcctcagcctcctgggtagttggaattacaggcgcatgccaccatgcctggctaatttttgtatgtttattaggggtttcgccatattggctgggcctggtgtcgaactcctgaccccaggtgatctgcctgccttggcctcccaaagtactgggattacaggcgtgagccaccrcaccaggccggatagtatgattatcttaaaatgcctgtagacacaacagttatttggggttgctgatgtgctgccacttacaagggtgtctatattatctcctaaagaaatgtgtatctgtaagctagagggacagtaaatctatcatgctgtgttgttcattattattttagtatgtaagaaatcctgtattaccaaacattctattaaatacaattctacaaaccagcatatccatatatctatcttacaataatcattagtggacacaatagtggcacagggagggatagtgtccttgaaaaaagtgtagagttagaaattgcttgtttaaagattggggaagagaactgcctaggaataggaagaagtgttattgggtgttttttgagggcccacttgaggttggagataatgagtatgtagatcaaattgggaagatgagtatgacatgcagaggtataaagcaatgatagtattgtttatgcattagaaggcctatatgtcagattgagcttgaggtgtttggggacaatccgctggagtggagggttatgtcttcaggaataatgagtgaatgtccaaacggggaaagctgcaataatccaaagacatttctagcctttctgtttgaacaccgatctgaaattaagactatttagaatatatctagagcattctttcactattcatttcactctctcggagtagctgatttgtttacccctcttctaaaccagaatcaggtaacctggtaactagttagtctttgagaaactcagttctaattaattgcttgattagtatttacatcatgctttcaaagttaggactaatccttgaaaagcccaaggatatttagctacatcattcatgcatttttttttatggttccaatgagtagttggtatactgtatggttttcttggctcagacttgatacatcactccttgaatataagacagtctacgggttttagagtagcagtgaccaccaaaacatttcaggttgtgttggagagtgcagtggatattttccttcttaaaaaggtagaaattcgttctggtgaatcaaacattctaagtgagctatcacatatgcagtactgatttgtaagagagcagatgaaattctatgaaatgcacttaagagtgaaaggattttaaatttgttagtcagtccttcataatcccaaaggttcacctgtgtgtttcagtgcctcagtgttgtccttatgagtattaactatcactctgctgtagattgtgtgaacatcctggtgtgggcagtgttttagataatcaagtgcttgataatagcaaacttgctctatgtagaagcactgaggaagtaaatggtrcttgtggtctgaccaagttaatgtgcataccatttctcatattccaccagggagtctcttaggcaagggaaagatattgtgagtagattttaacaaaccgttttcctatcttttagacttctgtataatttggtgaatgtgcttgtcttgttttccttgaaaaatgcctatcagcccatttgtatatatacatgcacagaatggttggaggctgatcctgcaactcaatagatgctgcattctgatttttgttctaatttgactttggggaaataacttttgtctccacttcccatctctgaaatcacatctatctcactaatctctcactcaagagtaaatatgtaataaaatgtgaacagtgaatggaagacattgtgtttactattactcatgacttccttgttctgcttcacttctttcttgtaaaacaaaatattccttcaggttctttaactctctgcattctgggaaaagaggagatttgcagtctggcaaactcttcttgttatcttgggcatcactggataaattcgcctctctgaggatcagtttgttctgtataaaatgaggtttacaattcataggattatgaagattaaaagtatagtaatgcctagcacagtatttggactatagcatacgatcaatagattttggtgcctttagctaacaccttcttaccagttatcctgatactttcaattacctctagccacaatctttggcaaagtctctagataataccttttgtcatggttcgtgtttagtgctcttatgctttttatgggaaatatttccaacatttttgggcatatgacatttcrgggttatactgtaggggtaatatacttataaaagatgttctctttcagaaatcttaaaaacaaatgcgatcttaccaggttcttgtttattcactcattcagttacctctcacattcattcattaattcagacagcatttattatcaaatgagcacttactaatttattcagcatatattccatatactttaaacacatgaatgaagtaggggctctcagaaaaaacattttacattgtcatttttgtatttaaaaatgtaaaatcacgcctgtaatctcagcactttgggaggttgagatgggaggatcgcttgagcccgggagtttgagaccagcttgggcaacatagtgagatcttgtctctacaaaaatactgaagaattagctgggcacagtggcatgcacctgtggtcctggatattcaggaggctgggtgagaggatcacttgagcccatgtggtcaaggctgcaatgagctatgatcacactactgaatggcagcttgggtgacagtgagaagttgtctccaaaaaaatttaaaaaatgtaaaatcacatttaaaaaattaccaaattatgtccacagcagctattgtctgcccctctgtctgtctctgccccttattctatgctgaccttttctagttttgtgtgatgtgtgggacatagggtcaaagtacagtgtgtatctaaaaagatcagttgaagctatagtaatgatgataataatatttatttgttgagtgcttaccattatcgggcagtgtgcttagtgttccatgaattttattccattaaatactcacaatattaatgcaggggtgatgccttaccatggtcataggactttaacagagaacatcaagaacctatgtctctaacctcatcttgtactctatatactcatggttctrtgatgcactccttgaatatgctaagcaagcatcattttgccttaggactattgttcggttcctcatgtcagaaatgtcctctacccacatcctttgcttggttctcccaagattggctcttccttagttttcagctttcagctcagtgtcacctcatcagacagtagtcctcctacaccaaccattctgtttcacatcactgtttgtttattcttttcatcatagcttcactatcataaattatcttatttactagtttacctatttattacctgtcttccctcttataatttaagttacacaaaggaggaaccttgtcagcgttgctctctgtgggctttgcagcacctagaatagtcctagctagaggtagggtctttatataactttattgatgtatagtgtcacttcagaggaagccttagggcttggaaaagaaagagaatatttaaaaataactcatgggggaggggagaaggagaattaacatgtattaagcaactgctatggagccagaattgatcaaatgcttttataatatgtatcactaaattttcaaaatctcataggaaaatttcgattcagagaagttgagtaacttgcctatgatgacagttaattactgacggaaataaggttggaatcttgttctgtttaactccaaacctcatatgcctttcagtattttatatatttcaagctttggtgaatgtggtggacgtcatgattcactgcctagatgcccctttagtaatgaaggactcattcctctagatgctaggggttctgttgacagtcagccctcaatcattagtcctctctatatattgcctggcctgaggagaggggccttgctcaaagtcatgccccattcccatgattaatcaccatgtgataagaaagctaggccttcttgctctaatttaggcaactctgagatcagagctctatgtagggtcagctgagacttccattgagtcttcatcatagtccaacttctccttgtgcccaattctgctttcttctctaccctttcatggttgttgatcccaagaacactccctaataagtttcctgcatgctaatctccttcttagagtctgcttcctggagaacccaactcgtgatggtgagtttgagaattgtcatggcattaacaaaagtgcaagattcagtaatgggaaggtggcatttgggagaaatataatgatagctttggatttggatattttgaatttagtaaaaatgattagctctggactgtgagatctttaagggtttgtttactgaatgaccaagctcagttaagtgcctgccagttgatttaataaatagaggattgaagatatgggattggaatctggctaagagcttgtgattgaagatagttactttagaggtgatagctagtatcttgaaaattgacaaacactctgagagagaaaaaaataagaacaacggagaattagggggaaatatacagaaagaataaaaagaatataggtgacaggatttttttgtgtgtttgtaggatgggaggtgactgggagcagctgggagcaaggacccagtggttgatatttgcaaaataatgaaatttaaggatggtcttttcaaatccagtatgattgaggttgctagtggccttagaaaagcgatgccaatcctgcaactgagataaagacctatataacaaagtttaaaaagggaatatatggtgagtaaacaaaggatattgtcggcatacatctctgactcaagacatttgataaaaatagagacagcagcacctgtgaggccaaatctaagtttattagagttggaaattcatgtttgaaggtaaaagataagtaaaaaaaaactggagatggatgagataagacttgatcaaggatagggtctctttagaggcattctctaacctatttcctaagaatgaggacacttctttctttatactcaaggggaatgtaggaatatggcagagtaggagtacagtgcaaaggctactgtcatattttggttttattcatacctaatttattattacattcttgtctagattttgtcattttaacttagtcattggccagtaattttgtatatctagcaattatcacatttaaattgccatgcaatttgcagttctctagatatatattaatgatggcagctgcactgactatgggatgtcaaatcaggtatgaaatgtcactaattcatccttcagtaattttactcaagtcatggagagtacattatttcatttgtataatccactgcttacataacttttggattgtcttatcaatagctttagacttcgggttttctcctatcctcctaaaaataagcatttataaattgaacaccatatggagggaactgtttttttatttgtgtttgtattagcttgttttgttttacttataaaagtgttttatatatatatgtagttataaaagtttatatatttatgcgagttgtgtatggacacacacacacacacacacacacamacctgttcttattctctccatgtctgatatgactttgttcagtgttagagctctttttgacacttttttgatactggtagaaaggtcactaatggagggaactctcgaggtattaggagccaagtgaataggactctattttgtcggtatattaaatatattttatactgttgaaaggtagtgtggaaggtgaaataaggccaaataggacatatgtcatcaaatgtagcttcttggctctctttccttttctgggtgaattttaatcaatttcatcaagcaaggatttatatctattttatgtactgcaaaattttatgactacaatatgcctggcacattgtggttgggcaacaatttttttttttttttgagacagagtctcactctgtcgcccaggctgctgtgtagtgttgcgatctcagctcattgcaacctctgcctcccaggttcaagcgattctcctgcctcagcctcccgagtagctgggattacaggtgtccgccaccatgcccggctaatttttgtatttttggtagagatggggttttgccatgttggccaggctggtcttgaactcctgacctcaggtgatccgcctgcctttgcctcccaaagttctgggattacaggcgagagtcactgtgcctgggcaataaatattttttaaatgagtaaatttagagtgaatgtaaagattttttttttaagtataccacacaaatgttgtaagaaccaaaaaagggaatacaaatccacttaagaaaaataaaatcaacaacagcaaaaacaaagtagaaaaacagagaatatgcaaatgtaaataattattatgtcctgttattttaatttttattatttcatatatttactgtatgccccctatgcatgcttaattttactgtgtcatgagccagaaccctaaatctgtggagcaaaaaatggttccagtcattagcccaattaaaaaaaatgtattttccttgaatgcttgatcttctacaccagtcaacttacattatatactaggaagaaaaaataagttctgtctacatgatctaattatattttaaagaaattcaatagtattttattaagcagatatttgttgtttctgtgccagggatttgagatgtctcagttatttggggaaaatacttataattctatatccccacctactgctctgctacctattttcttgtgattctgtttcaaacatttcaggaatgaaatttcagaaagattttatctttcttccaacttctttcttgtataaagtcttcccaagagaaatccagaacttgtggaagaaaaattcatattaccccttcagcaaatttaagaaaaacctgtcattgtactagttagaagcttattatcttaattcagtaggtttatgtagaccttaacaaaaggaaataaatatcttgtaatgagtattgaccaaattctctcagtgcatggtcactctgagtctgtttgccttcttccaatttcatttctttcccttgtgtgattggtttaatttgtgtatgaatcatgtcttgattttaaatgttgtcttaccaattatttgctttttggcttaaggagtttgttattttctaaaaaggaaaggatasagagagtcttacaaattgtgtttttatcatagtatttacacatgtaaacccaaatttattttaataggatatttgaaggatctgtatttatctatttatatctatgtatttatctaccaatctactattgatttcatagggcaggagagagggagagagatgaccctgtcattagattctgaatttaaaagtatcacataatagaaatctggagtaggtataattacccttattgtatctttttaaaatttgccacaactaatgaaaatgtcttttacttccttaacaaaagaatatgcctccaaaggcattgttgtagggagtgataatgatgagatgattgggttgtaatggaacagagatggagggaaagagtaaaccttagatacagactattgtaattccatttgaagcttcagacagatatgagggagtttctagtgtggaagttggagaagagagatttattgtttccacctgacataaagatcagtaaatgctttgtggacctgacagtgtttgcaagctataaagtctttctctctttttctgtgttaacttattgccattgtaaacacatttcaaagaaaaccaatcttcccctttgttctgaattaaatttttttctccaaaagtatacctgcaatttataaacctaactttcctgctgaaggagaatggatgggattctccagcagcttattgcaggtggctaactatatgaattgtggtggaggaggctgctgcctrctgattttctaaggacttaggcactttatctccttattcagctgcattcttgggttgcgggtgagggaaaaatggaaggaataaaatattaaattaagttgtaaatgtaattttctaccatcaatctagctttcttgactgtttagaaaaatctagataatctaggtctcaaacacctagtgaacacaaatatccaattgttttgattatacaggtggaatatatcaccttaatggtgctaatggcaactatagtgatagaaattaacaattccattggacatgtaattggaaaaagtattgtactacaagttaccccaagaaacatactttttcaaagaatatatactagtaagtcactttcaagtatgagtcaacgaaatattaccaattgtataactataaaatatgaatccgctaataaggatctacaaataagatcaaaccaacacattttggccattagataaggtattcagctactttgtgtgattataaatccacaaatcttataaaccatgtaaagatgttacataacatcaagaaaacatcttaaaaacctaaaataacaaagtttattatggttttgctcttccagagtgactaatagaaatgaatcatgggcatattaaagtcaagcctatcagtttctgccttggtattttatactagttcaacctctgatatattatggattaaggttacgaaaatgttaagtgggggcatttacttttagtaatccttattctctctctctgtctttattcctrtatcagaacctcatgccacaaaaatctgctgtaagactctcccagataaattgtactatgtacattttaaatacctaatgtaaaattattaattcaaaagaacctctcttgattgtaaggacctgcataggagtggaaagtaacctttttggaggaacatggggttgtgggtgggatggagatagctctcctggtgctcctaaaatcaaatctagtgtctggccccacaagactctgccacgtagtgatgactatatagcagtgatgcttctgggatctctcagtcagccatctggagatctcctttgcgacggtaaattatttaaygttcttggtctgtagtgataasatggatacattgggaagtaaaaacmaaataataatatatagcatttttgatgatgtggcattatacttttaaattttggattataaactgttttttttttaatgaactattactgctactttagggctcattttaaataaggttcaggaccaaatggggctgatgttgtccttatgttttataatgcttagagattccagagattttgctatttataggaataatttatggattaatatgtgttgtggtaataatgcatgccccatactgggtttgccttggaaattccagttaagagtcgttatgcatgcaaggaagttaaaatgtttttagaagctggaaaatagtaagtgatatccartcagtaccttcttttcaagcatcataacattaaaattccggtgtgaatatatgcacatgcttacttatataacttgtgcaggacaacgtttgacagatatttgtaaagctgaatggtagagcaagatatttaaactgatgtaatatctaggaagaatttgaaaaaacatgatgccatgtcagaaacatttcctctcctctgtaagcagctgttcccaatatccctttcttattcacatcctttcaccctctctctctccttttccaagttactaattttccattaggtaatgagacaaacagatggccagaaatactacatagtttacagtttggttctcaagtgagcaagttttgatgtcttttgctggaggtcttcgaaaatgtcccccacaacaattcacatcatgatggccattttgtgataaacagcttattttgattagtttttagagtaagcagatttgaagagaattttgaaaagccaggactttgcccaactatactgttttttttaacacctaaaratacaaggcattagtgacatcactttatttttttcttttcagttttccccacctcaggactgtgagagattgatgtgcggatacatactttccctacagaaaagacagtagcaataagtgacatctctttagcgtttctaaaacatgtttttcacatacattatcccacttagattcacccaggaagtatatgaggtaggcaggacatggattcttgataggcccaatgtaagggtgaaggaaccaaggcccaaagttggtaaccaccgacattttagtgcccggttctcctattgcaaaccctaagctctttctaccatgctattatttctcagcatagccacgaagaggtctaaccttaatatatagtcttgytcgggtggggggggggttccctatcttgcttcccctatggctcctactttgttgacttgttaaggagtggtggtagcgatttttgtgggccttgtacctcttaccagttgtttagttccagactgtgtgatgagtttacacaacataggcctgtgttagaaatgataaagggctctttcttcctcaggattctgcctctaggctgacctagtttgcctgtccgctgtcatgtttgtatgctctgggcttctgtgggtgaggcagctaggagcaaagtgacaaaagccactgatactgccaacagcttagtttatgctatagagtgcgggaagaagaatgacattacctgacatttgatttctgaatatgaaggaagtcttgattatcagataaatagttacatgcataagggtatatatttctctacctatattgtatataaactatgcatacccatacatccatgtatcttggcataaataatttattagaaggaatgaggaaataatataatatgtaatagagtgatagctagtttaaaaaatgtgctcagatagtttagagttaaactaaaaaagactttttatgttatgcagtattaatcttctgcctgcatgaattttttttccagaaaaagtgattattctgtatctctaacttaggaatctagtgcatcatagacactgatgatgtggcagtcattatctgccaaacatctgcctagtaagcacgttttatatccgtttggatcatcagattatagtcaacactagatccaattatattcagacccttactgagttttttctttcaagagaagtggaagcaatggagctaggcaggacccaccctgagtagtatgttgatgatttctacatgtctcagcatctgagacttttaaagtccaaggacgtgttcttgtcagtgtcctgaaataatcagtctcttagccactgactggctaaacaaaatgcccatggcactttggttgacatgtaaatgatgatttacttatttacaaggagaagtaactgtgaaatgtgtcttattactcaaaatcttaatgctcagcacatttcttacctgatcagactatctgaggaaccaagtcataattagaagtttgctttaatccatttagagtcaaagcaaaattaatttcatgctaagttctttaatccagtttatagagctttccagctgtagggaaggccttgccagtgagaactgatgttcaagggcattcataagactcatttttagttaagatggttgaatcatttttcttactttagggataatctttctcactgtgacagagggcccatatgctcctaaacagtattagatataatgtttcataaacaattcccctccccttctttttcctatgggttgccatctctaattttaccacttcctccatatcctccctttgttggtcacctttagatatgttgcttctattgctcaatggcctactttgcctggagtgaaacccaggcatgcgactggagcaaattctctgccactggtttacaaattactgttcgagttagtgcatttagggttgacagcatatctctttgttttatgtgttaattttataatttaactgtcaggcagaaatattacttcctttattctcagactcttcttgggaaataccccactgaaactcccaagtactgggcacaatagagaattctttggaaatactcaaattgaagccacaaaggtgtctgaaagactagaaatgattttctcatgagatccattcctatccagtagggtacctatgagctgaaatgtcactaattagctttgcagcatttactaattggcatctttgggctgtaaggcatggctggcaacagtcctagatgttagacatggtcagtttagttcaatttagcaattttttgactacttcataatcaagagatttatacattgagtttaatcatcacataacacatatttgtgtaatactttatagttttatttcattttgatctttcaacagccctgagaaaaggttattcaggaattttcccattttatgaaaattaaattgaggttcagaaaaataaatcctgtatcccaaatcacacaggctagccaggagttaatccctttcaactataatcttttctgctgttggtgaagatagaacaatgtatttcagcttagaagggcaggttaaggggttggagattttggagggagtcagacctagattggattgtgactcagacacttactacctaagtgactttgggcaagttttttaaacttctctgggtttcattttttcacattcataaaaccggggtaatacttctgactctcktgtargattattttgaacatcaaattacttgatgcatgtgacacgtagggtccagtgttgcactcagcacaaagctggttgctattacagtgaataacccagaaagcttccccattttacactttgaagactgaatcagccctatgccatctgtgaagttttgtttggttttgggctttaagatggaagccacgtctaccaaaaggcttttgctataccatgatccattttcctgagaaaatgtctaggagcagtgccatcttgtcttatcatcggtattttcattcacactgaaccaaattggccgtgatggtgaccagtgaagcaagtattaatatctcctaaaatctcactattaagaagttaatgagcatactggacctatttaagtaatagtgacactgtttacaattttgggaaaacaacaatctcattttcattccattaaagacaaaaggaaataaggaatttcagttagatacatggtaagtatttcctaatggtcaccaaagtgaaataaattaccaatggaggatgcagcttgtgacagaaagagcacaggagacccacgacctggtcttgatggtgttcctttccagttctgtagctgaggcaaaacactttaacctctctgatgctcagttttttcattcgtgaaatgtggataattaaatctgagactcgtgagattgttgtgagtatctaataggatggaaaaaaaagtgatttgtaaaaaccataatgtgttatgcaaaccgaaggtggtggtgttactctctggagttctttgaaaacatcagacatccttggatgacttaagtgtgttcttgcctgaaggcagaagaaagactaaataactcatacttcagggagtgtatgttttcagctcaaattagtattgatggtattaggttttgtatcaaattgaaattcaatggctatttttggaaaggcattaaagtgatgtaacaaaggggaaaatactgggaaagcaaacatgcattttgtataggaagacttaattacaatattgattatatgttaagtataatcaattataaccaataatagtgatgataaccactgtggtttgctattagagcatacttctaataaggcaaaggttattagtttgaatccccagatgggtcaattagcataatgtcaacatttaccccaagctctaatgaggtcatgcaaatatatacctgtgttcacaaggagaataaaatgaagactggaaaaaatggcccagatgttaaaccagtatggatagaaaaaccctaattttagtgcatctctagctttttattttttcctttagcacccctaggatttttgcattttgtaactaattatctgaacttctagttttgcttagcaaattagtgttgtaggtcacttgaaatggtattcctaccttcctataaagctgctatccttctaaaaagtgtggttatgattacccagagaaggttgtttaaccgccagtatgttccaactctgtatttacgagtgcttaaactttgcagtgctgtacttgaagatgaccctgagaactacatacttcttacatatgtttttcggatgggaaaattgaggcttttttttcccccgaggactttcaggtgaagagatattggctaattttattttttttaaaaaaaggtcagtagcacagctggatttgtaatatagaggtcctgactcaaagttctatatttaatttgcagtcttttttttattttttattttttggcttatatgtagtaagtttagtcagaggctgggaaagtaaacattatgtctggatatctagcaagattgatgactacacaattacctctccttcagaagtaaactggttgtttgaaatgacattatttggattagttttagtgataaagtcagttatataatttgatccattggtgtctacaggcctacctacaaagaaagcatatctaagattataattctgattaagttgtggaatttgacatagggtatcctaagaaacaatgtgttctcatgttatggagaaggtggtgatctccactttgtgacctggaggatgatgagaagggttccttgtccccacaatttatctttctctgacaagcctgtttactaaaattaaactcttaaagattccaaccatcttctatattgtagagaagctcattcacaccatcatttaccttagcaaggattcargcttgaggttttgagggaatggagttaggattyctcttgagcatcatcttagaacaaggtagtaaggggatttggaattttgatgagggaaagaaagggaatatgcaaagaatggcttttggaaagtttagattatggtggtgaggatctggcctaacagaaaggaacacaaagacgccgggtgctcagagggtggggaaaggtgagctagaggatgacagaaagctaagaaaggggaagtggaattatttaaaataaaatttaattcctgattttgcttataggttttcttgttgatayggctttgatttaaagaatgttgtgtgttctcaagaaaaaaatcaattrtttgaatacacgtgattttgtaattttatgtaacattaaaaaactacttacttattgaagacagtttcctaagaratgacatgttctggccgggcgtggtggctcatgcctgtaatcccagcactttgggaggctgaggtgggcagatcacgaggtcaggagatcgagaccatcctggccaacatggtgaaaccccgtctgtactaaaaatacaaaaaaattagccgggcatggaggcgggtgcctgtagtcccagctacttgggagactgaggcaggagaatcgcttgaacccgggaggtggaggttgcagtgagctgagatctcaccactgcactccagcctgggggacagagcgagactcggtatcaaaaaaaaaaaaaaaaaaaaaagacatattctttttgtacaagagggtttctttacttttcgtcacgtgagggtgaacagattacctaatctctctaaattttgttcttttttagtgataataacaccagtctgattatttcacttgattggtgcaaggatcaattaggataatatatattaaaaatacaaactgtaaagtgctcaaccaaataaaaaacattaaatattgtgtgcagtaaaggttgaaggttacatgcttagrtttgggagccatattacctacctgggtttcaatcctggctttgtccctttttatctgtgtgacacagggcaacttaaagtttgtgtctcagtattctccttcataaactgtgaaaaataataacacctacctcatgtggtgatgtgaaaatcaaagaagttcatatacatagagggcttaaagcagtgcctggcgtaaaacacggtagtcattctagctgttgtatttttatgtgcatgttagcacaaaactaaatgctgaattatttgcatgggagtgggttactgtgagattaaagaaaaaaatctcgtatttatgcttcaagcagcatagctctttgcttatctaacaaattcatatttgattataagccattagtgacagttaatgaaagggactctgtttgaattaagcggttatgagtatccatctcagaagcttacttctcttgatacttgaattaagagcctattctcattaatgccgacttattcagataaagttcacagtgtttttgtcttkttcatcatatttatatcttaagtgaaaggtttcaaccgtaacgacacattggaagcaactgggtccccccgcaccaattcaactggaaaatctgggggtggcacgtagaccttggtattttttataaagatccccaagtgattttaatgtgaggcagaatttaaaaccattggcttagagcagtagtgattaaatatatacctacattgtttagtttctgaccttgatagatatattttgtcatatttaaataaacaaaataatggccaggcacagtggctcacgcctgtaatcccagcgcattgagaagctgaggtgggtggatcacttaaggtcaggagtttgagacctgggcaacatagtgaaatccccatctctactagaaatacaaaaaaagaaaaaaaaaaagccgggcatggtggcacgcacctgtaatcccagctcctcagtaggctgaggtattagaactgcttgatcctgggaggcagaggttgcagtgagctgagattgcaccattgcactccagcttgggcgacagagcaagagtccatctcaaaaaaataaaataatatggctctttatggatgtttctttaaaggcagacctattgtttctattaagtttgtgtcttgtgagtatatgtcactaagcagaaatgagaagtttgattgtttttaaattatgtgtgtggctttttttggcatgatgaagtgctgtgtgtatcaaataagaatayagactttcagaatgtgaaaggtaagagggagcctcaaaggcatctagtgcaaaaggatacactttgaagtcagtwctgttttggagtgatttatttacttactgggtgtgtaatcttgtgacacttgcttaacctccctgagctgcagcttcttcatctctgtaaaattgagacatacatgtattttgtgcgatgacaactgtgtttcacgctgcgcgtgcgcgcacacacacacacacagagagagagagacacatctttactctctgcctcctgcctgatccccgcaccatctggtgcagatatccagagcagggactgtgtgggagcctcagcgggactgtctgagcctgcagggccagctgctggggactgcttcctcccactcttcagggatcatttctctggctctgttgggactatttcgtggttggctgttcggatctcatgacctttcwtgagcataacatttagtctgtggggttcagtcactgttggtcaagtatagtgaagctgttagtgagactagagatgaagatggctttttgccgccatatgatggaggcttttgggtaccctctcttggtacccactgtttgaaccacagaaaatatgtgtgcaggacactgatggctgcttcctctttccagctggcttcctctccattgctagtttgtgttgatttgggacactaggaggccactatctatgtcttagtttgggggaaggagagaaaaattacagacctcttgactttctttttatgatagtaggaacagtagattttctcctttcccaccctcgtctctttgatcctccagcatagggctataaaattagtaggccactcagcaatcctgttgcacattctttgtatacaaggaaggaagttcatggttgtttcttattagctgtaaagtaaatgcctggggtcttgaccttagctatgatgtttcagtgtcgttcctactcactggcaggcctggctttagtactatcctcagccttaatattgagaattctgcttgtatcactgtctctctcaactgatcttaatgtttcattggaaatatttataaatctggctgccatttttctgaattttcctctgttcactggaattggtgtcaacttctcataatgagaagtatcggtagctttattgattttttttcgatgatgaagatcttgaaacattacacctgtgggatgagttttctaattgaagtctgtgttcctacattagattatgagactcctgagggtaggaaccatgtttttcagcttagcatagccatatctctcatttattacacaccgactgtgtgtcagagatgttgctctaattatttcagtgcattcccataaaaataaggtacacatatgtaacaaacctgcacattctgtacttgtatcccagaacttaaagtataataataaaaaaattaaaaagatcatttaactaaaaaaaaaataaggtacgcataaggaatcttgtttcagaagagcttaagtaaattgcccaaggtcatctagctagtgagtcatagaacttgcttttgaattcagtttgactttaaaacctcttttctaaatcatctttccaaactccttgcagaaaaggacagatgcacataagaggactgggatcttggcctgtagaatgttggatggttctcttaagtaggagccagttatggagctgcattcttaaagaagaggatagacagtctgcatgttttcaaagcccttgttgttcccactgatctacattgacttgcatcactggcatacatggacacttaataaaagtttgttgagagctggaccctaccaccccagaggcagaaatcatctgatggaaggctttggcccgtttgtgggtcttcacttcatgctttttactcaggtcagagaggctgagattatgtgaatttgtctctcactgatcaggccatgggttgaggccttcagacacactctgaaaactggaatgaatccatggtgataagatattcggaggggccagggctgtgttgaagtcagtcttggattgctgaagttaggagatgctgtgcagtcagcctctatgcttgtggtttaggctattagaatgtgcctgcccactttggcaagaaataggaagtgcataaatgctttatcaacctgaagctttgttggatgtgctcagagaacatttctttttaatgtatgtggaaactataaatttaactcctgctgggagtggaagtaattgcttcacacaagaaaaaagctagatctttaaaaggcttaactcctttcacaaatatgtgctttttaatgactgggaaattcctggtacagaaaaaaaaatgtccttttgtacaaatgaggtcattctggtcttaactggccctgtacactctagttcctgctttctgttccatgttttatgaccagaggttattggaaggatcatccctctgtggatatccactgccttttcagtttgttgccaaggggaaagttatcttagctcaggaactgccaagccagtgcaagaggcccagatccaaggggtactgagctagtgactgatgatgattggatttagattggtcatggaytaggttgttaaagcatgctttctgtgtgcactaggatcactatgtctgattcattctctttagatttcttaaccattccattgcctcttcgttcaggaatgatttttctttcctaggtgcataccatttactctgctttgagtctgtttggatgagtagaaacatttgtgccagtctgaggcctggtataagtgaaaagcagctgctgaaagaagttgctctgtacctctcctttgaacacttggaagctgattcctcctaaaattaatttgtgaattggtttggctaatgtgcagtaggtatctgaggccttagatttgtgtggtgaaagggttctcctacgtggtaatgtagagtagatctcagtagatgcccttgattcaatttaagctcactttcctctaactttaaccattgcctaccaaggaggatgttaaagattcgaagagtgttaggtagggagagtgttacatctgtcttggatgtttttatgaagaggtggacatggagtgggtctaagtgagatttgacatagacctctggtgtctttttttttttttttttgaggcagagtctcactcagtcacccagaatggagtgcagtgggggtgatcttggctcactgcaacctctgcctcctgggttcaagcaattcttatgcctcagcctcccaggcagctgggactacaggcatgtaccaccatgctcgcctaatttttggtacttttagtagagacagggtttcaccaatttggcaaggatggtcttgaactcctgacctcaagtgatccacgtgcctcggcctcccaaagtgctgggattacaggcgtgagccagagtgcccagctcctggggtctcctttagacgatatatttttaagacagccactttgaaggattagcaattggaaattgatacttattaactgcttcttaggtatcagcactatgctagaccctttctgcagattgcctttttagaggtagaaggctaccatgctgcctcacatcttgaagggtttgtattacattcgtattccccaagaattcatccttggctgtaatggatcaatgctttgatgaggccttgagtgctttttttctgcttaattgactacaggtttttgttatttaaaacattctctctcttgctactgagaacttggttcttcttatcataacttcctaataacatctaggttctaggatcttggtgtcccattcatggctctctaagtctgaaactccaagttcagtctctgttgcttaatttcttgatctrggattaagaacctctgtcttaagccatcgtggagaagagattatgaaatgtggtcatgagctgcttagatatttgttgcagactccatattttgcctgaagcacttgtggcccatccagtatgctccagaaagaacctttgcttgaattctcttgggacatggaggaagtcaggctgactgctgtgacagtcatggctgtggggccctggatcacctgcttcccrtcctactctgcctttttgttagtctcctcaaagaacggggaaaaaaakatcatttaagtttaaaaatatcttttattataaagttgactcttttaactcaatttatcactgcttgctagaccatccttgaaaaccttgttaaaatgtagaagaaaatatgaagacgtgccatttgatttcagttgctcattacctcatgcagattacatatgctggaaaggaaaaaccgtgactcatgtttctgcagggcaccctccctgctatccccagggcctgggtttattgtaggcagccaatgtgtattttattgaacttaatagctgttacaaaagaattgaagaaaacattcctaggaaatactatcataattgaaattgggaagttctgggtaattgccgagtgcctcatattagtttctgtggggaaaatacayggcatgatgcaaaatgggttaatactgtagaaggaaaactctcaagagataaatcagaagcttcacctgtctgcctacgatactcacagtgggaatggtactgatttgctgataatatgtttttattattattattattctgtagcctcagacgatacagcagactctcaagaggacactgcagtattatgaacatcaagttattgggtaagtaaaaattgatttcggttattattggggacaaattaaaggtaattactcaaacatagctgttgagtatgtgattttctgctacccaggtcaacctgattttatagtggctatgttttcatagtgtggggcgtgaaggcttattgggggagtcccttggagtgatttcttttggcttatttgtgcttaattcttttaaatgaaattactttctggtattgcttttcttttttttctcagtcttctcatgttcttactcttttattccgatgttgaatcatataattatgccttactaatgtggtgagctttattggtaccaacccagatgctttgaatgggattttagaatccttaagtagagtttgataagaatcactacagccttaacacagttcagtgagaggaattagtttacttagagtcacgtgctacatatttttctttattatcatctatttcttgaagtggttgtgatgtggtgtaaagtaagaagacttgatgtcaaaagacaggacttcaaggcctcactagcaaatagatcttttactaagtaactttatctcttttttaaactgtgatgataataataactaaatcaaggattagatgtaatgattaaatgaggtaatttcaatgaaagcattttgtaaacagagagctccaaatgagtatgaggtacacctctaattggctgtggcagaaagcagctggcaagtatgaaagcctaaatttacctactcatgcaatctagcttttagattaaatttattgayattagaggcaatgtatatattttaatttaccttgttagtattctttatatggtacagtgatttatctttgtaagattttaagaacttttgagaagtcaagattcaaactgtggtacttcttgaactgctctcaggatcatttaacatttatggctaatagccattgccatagggatcaataacataattttgattattacggtatagtgtgatttttttttcacagaacagaagggaagaaatcttaatggaaaaataatctcggtacctagtacaatgccgtatactttaagtgcttgatgattatgttaattgtcatttaaaagggaattgctttgaaactttgtcatacttatcctcaagagtgtagttctaggaaaaacatattatttaaactcatgagatggcttttagtttgaggccattagtgatttaaaatggtttatcctaatggagataaagaatgtcaaattaatctttctccacatatcctgaaataaaacttaatcactctcattgaatttgccgctttccaagtatggtgtttggattaaattagttagtatacttaaaatagttcctcgtatgtggtgagcactacatacctgtttgcttttatgtttatcgttattattaatatttttatgacaatatccatcatcaaagtctaattttctgggattatgaatgctctttcgctttcgaaataaaataactgatgaaatattctcatttttgaactaaagtataccttcaaggcaaattggagtgggactcttataatgtgatcaaaatagataaccaaactatattgctataatcagaaaagttttttctccattgatagaatggagggagttcccttttatccagctggctgcctcagccctccccttctacctatgtagacatggtctgtggtgcttctttgtctattgcatgaatggtcttttcctagttctgtttattgcatacacagtataaagaaaacagagagtttgactccagtataaagaggggtcttgatgtctggcatgattcaaataggcctattaacatatttttgcttgggtgttggctgatttcttggacttgaagtacctttgctcactgactttatttgcattyaygctgatgcagacaaagggggcctgttggcagcaattttgtcacgtttgcctttcttgactgtattcccctttcttgccttttttctcattgatgactttcctgtccaacttcctcttttgccttttattctccatctttctactttctatttctcttttcacaatcaagaaagcagagcagctaatatcactcaccctcgaactaaaaagtgtttacagctgtatgttgttcctcttaagaaaatacaatttaaggcttcctatctctaattgtgaaaaagaatgtgtttcttacagttaaagggattttgaaatccctgtattgagaattgagagtaagtgccgacaagcataattttagttattttttggcaggtgagggtgggaaggagatgcttttcctaatctctgaaatggggcttgcttaaagctgtcttgaaataactcagcatttaaataccttgtgttgaggtgttgaagcagaacaggtaacagagtatgagctagcccttctctttttaatttcttaattatccttcaaccactaaccttcttttcctttccttgaaaactctgcccttaatctgttttatttatcagagctctaggattgtacggttctgctccttggattcttatactggttgcccatagaaactctctgaggctttttgtgtctgccaagactgagacttcaacgcggagagcagctgtttcgaagggtcacagacagaaggactgggagggagtagctgatggggcttcctgttagggagtaagatagcctctctgtactttatccactttatctttaaacattattctgttccttaatttatccattcacttgttcatttatttattcatagagatcattcaagttggggaaatgagtgctaaaataatttattcatgcaatgtgataaatcttctcttcatctccactatcgtcatcatctctcaccaagacattctggtctaattttctggtttctacttttgtccgccaatatgtattttcaccacagcaaagcaattaaaaaattacatcatgccaccttcttatgtgaaaccaatggttctcaaatgttaatgtgcatcagaatcacctgccagccttgttaaaacacgtattactgggccctgctcccagaggttctgatttcctaggttcagatagggctcaagaaactggcatttctgtcaagttcccaagtaatgctgatgctgcttgtccagggatcacactttgaaccccctgctttaaactatatgatggcttattatggtagaataaagtctaaattctttctgtgatctggcctctgcctacctctgtaatttcatccctttccactttcctttttttcactccatttcaaccttctgttggtttctcaacttaccaaccttagcttcagggcctttgtatgtatcgtttcattcttatgcaatgctctttccccagatgtttgcacggcttattctttatatacatataggtctctgttcaaatgtcttctctacaggaaagcctgccctgatcaccccgtctaaagtatctctccatcacctacctcaaactccaatcgtgtcaggttgactttgtggaaaattttgattactatataaactctacatattcatgctcacttggagagcttcttgttcccatagcactgtctttcctccacctagaatgagcaagggggcattgaatgtgcatctttatgttagttgctctttaactcaaacttctagggaatggactaactttctgggtggtgtggggtggaaagattagtgaggagcagaagaagtcagtagcagacaggcaggattcactttagaaattaaaagcaactgaggatagaggaatgtctgtttataatggtactttttttctgatataattcttgccatagtgccctttcttctctttgtatgttgtggaaagattgtgttttgtaagtagacatatgaaacttactagacatatagtcaggttttgctatgaataatcttgggaaggttacttaaaatmcctgagcctcagttttctcattttaaaaatgggaataataacagggttgtggtgaagtttaaatgaaatcttaatgataataatgtatgaagtcatataatcacataaagtagttagcatagtacctggtacacaaagataatcaataaatgaattgaattattattactactgttagtaaatgactcttttgcaattcaacttttgtkgattgtcttcagtttatcctcctgctgcaaccttttcctgtcttccttgggccttttaaagtttagaatctgttgtttagcatctggtggtgaacatgcccagttcgtgttctaactgcagttttcttctcacagagaacatctttttcgttgatttttttttttttgactgaaatttctgtctctagagggcttgacccaactgctctcactcatatttctactacatgattcctactggtctatggctcacaaaaatggattgccatggcagggtagacgaagcacagatttcttcagtraactactatgagagatgtgataatctttctgagatatagtgttcactcactatatattttaaacaataaagaataaagaaatatgtattcagaaccatgccagtaattttatctttttttttttttttgccagaataagcattgctgtgttaatatcatggataggactgttgccaaactcatattagtctgggacaccaattcttatagtcatctaaaattaaattgtattgctccaattattaatgtgggccctatgtttgttttatacagccaaccttctgttctctttttcttttgacaattgaggagaaattaagccagaataatttcagtagaacactagagtgaaattaagaatgggtgaattctgattactctgagaaacaaacttcaaggatattacttaagctttcatgatcagattttgtggcttattttaatctaaaaatgatctagcttcttttttatatatttacatagaaaaaaactgtatctttttgaacataaacaaattagacaaaagctaatatctcttgattgcttactatgtttgaggagatatgctgggcactttccatcttttatttaatcctaaaaatattgcataagagtactgtattaagcacattttacagatgaggaaattgaggttgagagaaaaaagtacttttttaaggtcattctgataaaaatggtggaggttgaattaaaaataaccctgtggttgcctgtgtttaacatctgtgctccctgttccacctcttgagtgactcctgcattctggaaactgtagtaagcattttgyctaactggtttattggagtctgatctcaatgaggtgtacaaacatgaaacctttttatttttccctccactcacatcaagcatgctaggatacatccccttcgatattagcttagacagattgctctgttttccaagtatttccaagaattatgaagttcactctagaccaatttaaatttttactctcatrtctagtctgactctaatgttgctttctctgtctgggtcaggacttggcctaagagacttggaatacaggacagagtgtatgatgtgggttttcactcctcttctccaggccattcttttctgtgtccctttctcttcggatgtattgggtgaggcatgaatgaaatggaaaatggaaaatttcattggggttgtagcagtcctctcttggctgtcatgccctcactagggtgcatgtatgagttccgccctgacacttttggatgccccagmtcctgcacctaaggacttcactctcgtggtcttgctagtgggagccctgtccctggctggcagcctctagattggaagagcaccatgacaaccagacaactcaagcttgcctctctcttccctaacccatgggaaattcacatatttgccctgccaaacggtgggcctttaggttgctcccaattttgctctatttcttttccttgtcgataactttctccagagtcttcttcctcttatcagtcagacaggggagtatgatcaggaaatccactgcctctgcagatgttcactggggaatgagatgggtaatccccaatctctaccagctgtggacccccctcaccaactggacttctgcagggaacactccccttttctccttttctaggaggggagggggaaaagtaccatagcactctcttcctaggccaactcctcactcttctgaagattttattttgaagtctttctgttcttttgcttctgtaagctggtggtagagtgacaggggcagtggctgtttagtctcctcttaagtcctgaagaagagctctggtcttcttggctacccctttggaatgtgggaggatttggcctttaatgtcctcagcttttttgtcttagctctcattcagaggcaactcaaaaagtcccagccaatatccagttacaggcattgtgttatttagtcctcacaagaactctagaaggtacctccattttatgagagaggaaatttagactaacagagattaggttacttgctcargatctcacagatagaaaatggtaagaccatgactcaaattctgccaggtgtatgttatttatacaccatactgctatcttcttctttttttttttttttttttttgagacggagtctcactctgtcacccaggctggagtgcagtggcgcagtctcggctcactgcaagctccgcctcctgggttcacrccattcttctgcctcagcctccagagtagctgggactacaggcgcctgccaccacttccggctaattttttgtatttttagtagagacggggtttcaccgtgttagccaggatggtcttgatctcctgaactcgtgatctgcccgcctgggcctcccaaagtgctaggattacaggcgtgagccaccgcacccggcctatactgctatcttcttgactgtgacaaaagttatggtgtgtttactttcaacaccattgaatgccaggacaccaaattaacattgttaacttttccttttctaggcagcttccttatagaaacagatcactagccttgatgaagtgctctcagagtgatacattagctgtacaaagctgatatattttttgttctcttcaatttttttcacacatagctttcttgttaacagttgcctccagttccaggtctacactgcaaatgctgatgtgaatggtgggttatgccagaattatgtctcaaagcttcacttattttaaaatgtgactatgatgaaagcatagactgcgtgtgcttgtgcgtgtgtatatgagttgcrttcgcagatgctttcaaaaatttctccttatgctaattttgttttcttcttagttacagggatgcagaaaagaatttccacaatatctctaacagatgctcctatgcagaccactccaayaargaagaaattgaagatgtctcaggaattcttcagtgtactgctaatatactcggtatattaactatatatatttatatggatgagagagaatgaaagagagggaaagtcgaggtggaagtgtttcatgttctaccaaagagagatgtggagaatatggcaagttgagacccagaccttgtgaagtgatgggtgttaactctcctgaagatgtttgagtggaaattgcttgcatgccacttacttagagatggaaaaacatcaaaacaaaaatacttaaattccagggaaacaatttcagatattcacatgtgaatagtattagctctgtataatccatatttctttggcccttattctcagctaaagttgtaggatctttttttcctctcagtcatactctattacttctgggaggtcctggttggggcagaagggtggcccacaggtactgttaacactctacaatccaatgttcctttctgtggccttgtcagtgaagcaggtcatctcctgaggtgtctgtgccctacttggggttaggggagtgtccatcttaaagatatttgtacttatgacagaggggctgtttttggatgctccaacatggctaaaaggtactgttgtaaattgcagccaattatacagccgtaagctaccataactgagctgtactaccatactacctgacgttcttggtgtgtgagagctacattgtattccatgcaatgtattctaaaagaaatattttttttcctaatgtcttacagatgtttctagtgagaaatttctctttaagttctttttggaattcttttttctttatgacccagataggaatccatggggtgctggagggtgctagtggggaataataaatcttagtgagcgactccacacagaatgcagaatctcttttggggtcaggtgatggacaatagggcaaaccagtttgcatgttctttcttttcctttatagtattttccctggaggcatctgagtttctcctacaaacagtttccaggttaccccaacccaagggtctatcagattttctaaacatgtcagacttctagaggtagacttcttttacattcaagctgggaatccagctgccggttggctacattttcatcctaggtaacttttgtaaacacaaaattgtataataagaaaatgtataccttttgtgaggggatgcatatagatgttagtggtttgtctataacagcatgcaggacagtgatgggtagtgaaaaggaggccaaagattcatcaccttaatcttagaacaactgcagggatgtcacaatacccaagtaaatcttatgactggagaaaataagggatgggattaaaagagacattacccaagagttgtttaaagttttctgattttatattttcaaggactctcctttcagtaacatacatttctcttaatgcattgtgatttcaaggggtggggtgatgatgccacactaaaagggatgtatcagaatctcagtgaagggatgtttaatattttgagaagttgcttcttatccagtttctaaacactttcctgaccctcacgtctttcttctttatgctccctatttttagaatcactgagttagagggaataggaggtgttcaaagataatgattatattggggtgctaaaggcagttggactgtggcttgtaaatgagtgtgcacaattyccacggagagaaaccctgggtcaaacaatttgaaatggttttcaggggacactgttggcccagcacagcttagttgcccttcgaaggttgccctaagatgttggataagtagtgagtgagaagaacagcaggcagtgtgctgcctgatgacattagggtgagtgcagtgtttataacttagaaggtgatcatgtaacagggtttagatttccatgaatagtaactttttctacaaaagagatactaggtctgattattttcttcctctaagtaatgataggttgttttcaagatttaaagcacaatcttgtaaagtttaaatttctgaagattaacattaacattaacatttaatgcctgccacctgtcaaccagatgctggcacagaggtagctgttctccttgaataatgtctttttagaactcttgatatattgactctctgaggacagcgttagcggtcatattcaataaaagctttgtttttaagaagtcactgagctatgrttaatcttggcttgtttagatttttatctttttttaaagttgtgtttaaattctcttctgtaatcatatatgagaatgaaagaattggtcagcttactggacagaaaagcatgacataaattgttttttgggaggttgttggggggtggcacaggaaaacaacatttcaaccaagataagaaaaattttgatgcctgggaacctttttttttggatggcagaaggcagtgttccaactccatggtttatatttatcacctttggggagtgtgattagaatattggtggactgagattggcaaacatatatttctcttaccttcttaacctattacagggttgtattagagtctggaaatgtgttcgtttattcacttatttgtatattatttatacttcatcatcaaaaaagacttgaagtcatagatcacaagatatgatcatagtagcaatttttctccttccaaaatgagcatttctacctacttagtataaacaactcctctagaaagtttggtcatttactggctcttcaggttgaagtttgcatttagagggtggcatggaataaaaacgaggacctgaggagagggagaaagtgagttggagaagacctgttatgcctctgtcaytcatttgttctctcacctcttccatgggactccctgggagcacatgttgtgccctacaaggtgttwcatgcctctggagtaatgggaaagaactgcttccagatatcaaaatgtttgatgtctgtttccctttcgttggtttagaaactggttgtttctattttctgtctcatcatttacaaattacggatattgattatggtctgtttcttgccatctcttcaccatattttggtgctttgccaattgctgtgataatggaggctgggcccttgaaactctggccatgcaaagaaagatagtagacagtgccctccctgctggaggactttagagttaaatttattgctttatttggtacataatgtcttttgcataccaaaatgatctaattttagttgtccaaaaaatagaaaatcttttctagccctaatctgcaaagcctatttttagctcaaattaaatagtagaaatgtgtttatgctctaygaggcaacatttagtattttcttggaaattgtaatggttgaatggtatgatgaagcatgtattaaagcatgtgtaccatgttttctgctgaaatgttgctacttgttcttatggattgggtttacatagtgttgtaggcagggagacaaagtgagtaggagagttaagggagaaggatgataaattgcatagtctcctttgtcataataagttaaatataaatgaggttatgactatttcagttttaacaagttctaatactattaagggtgttgtgggtgtttcagttgttgtagagctttaaggagctaccagatgggggagttggggtgtaggaaaaagacttcccacagtagtttagagaacaaatrgaaatgagagctctaggttaattcatttactgaggagttatagcatataaagatttgcaggtttaggaagcatcagttatttgctaagtattgctcaaagtatagttttatactgcccttgctaagtgcatttcctctcaaaatagtcaggaagtgcatagttctgaaaagatattcattgatgttttctctgttttaaaggtctctctctgtcagagtgttgctttatcttctctaaaaatgtaacacatttaagtcagaatgggagcaatgcttatcatgggattattttattgggagagggctagtaaggaggatagaggaaatgacctttggrgcttattcctcacaatattttcttagtatcagggatcctgaaatactgtgaaatcatttataagatgccactgattccacaatctttagctggtatggaactctctgtttttttataagtaatgattttttgcttatatgtcaacttgtatatacttttttgtttcactgtgatttgtaatgtgtatttaggagccttttaattagtcataaaattgtgaagaattagcttaaggttaggttaagactaacttggagattttctgggaataactctaaataatataattgtttagtagataagaatatgtttaacatatttgttatcttggagaactagttagtgtagtaacaacttaccatatttattggtgagttaagattaatagcaataaataacttctgccattatagttcttgttactataacttggtaactgatcaatttcctctttcattaaaagtaaatattttcagtattttactagaatgaattggaattaaggcggttgaaggggaaataacttaataatgttactataatgtagtgatttagagcaagactggagccagactacttgggttgaaaatgcatctcagctacttactagctgcacgaactggaatgatttacttcatctttccttacctcatatttcttatttgcaaaatggagataatataattgcacacttcctagagttgccaagacgattaaatgagttaatttatatcaagtacatacttagaacagcatggtatataacaaacaaatggaacatgaatgtttgcttttattattattgagtattccccaaataatgtttgcatcagatgcagaaggtttgcttacttttttaggtgagaaaactgatactttgcaaggttaactaacttgttgatatctttggtcagagttaacaagccacagaggcagaatttaaattcatttcagtctgattccaaacctcatgttcttctcattactttgtgctgccttccagagttgttgactgtgtcatcactcctctgatgctaattacacaccacctttccagttctctgaattcttagaatcgtcatgatgtcacattttgcttagtgctttgctctttcaaatgtacttgggatacttgcttgtatgagacaaacttcttgtcagtattgaggaaagttcagttgtgttgcaatttggatcatttcagtttagaaactaggattgttctttagattttaggtgttgaaaatgctaactaagggtgatggtgtttcccatcacaacacaaacgtggtttcatagctatgctatagtaaacactgtgacagtttttttgctcatatttcaagctgatcttgctacgtagctggcctcatgtgttagacatcattaggccagcacaaaacctgcaaaaaggctgtgtttctgatgttgttgatttcttttaatggaaaagtttaagaatatcatcatataatcttattaaacaattcctaaacagagactttaggtagtggctctgtgtaaattagagacaacttctgtattctgctctctgcttacatactttccctgagatagttagatacagtagatagtcctgagaaagaatgagaccattgtatatggacactgcttcctatatgtaaaggataaacactataatacaaacatatccttaagttatacaagtcagttttataagttacaaggatattgagtatgtagccttttcgctggcttcttttgtttagaagtgtgaatttaagactaatccatgtctttcacagagagctcattcctttcccacaactgccctgaaaaatattccatttaacatgtaccacagtttgcttatccattcattgattgaaggataccttgattctttccatttttggttattggatattgagtggaatgtggcatagtttccctcttctcctagatattttttctcttttaggaacatcttcttctgaatcttgtgacagactatttcccatttgtcctgctaaatttctccagacatagcttttcttttttgctggaagaacatggcagtcctttttcttaattttaaatttgtgtttctgtgtctctaaagcattgtttcgctatcactagcagctttctgtctagcacctcttctttgtgtgaagggagaacaacccttcagattcctaaattcttcaggttgtcttttgttctcttttctgaactcttcagtaggttggtgtttatttttcgtttccctttaagttttttttaaatgaagttttaatgtagttttaggtttataaaaaagctgtgaagatagcacagaaagttatgatatatcccacacccattttccccatttgacatcatacattaatatggtactttggtcccaatttataaaacaatattgataggttattattaacaaaattccatgctttatttcaatatccttagtttttaaccttttcctgttccaggatttcatttcacattacatttagttgacttatctccatagcttctcttatctatgacaatttctcagacttatgttgtttttgatgaccttgacagttttcaagtgtactggtcagatcttttgtttgtttcctgtttgctttggtatgtggcaatatgcccatcattggcctgacatatgcccatattgtgtgtgtctgtgtgttcatagtgtgttttgagcacttccttacttcccagcactataagatgttccagactcatctttcatactttctgccccagttgtctagaatgagccatttctctcaggagccctgataccttttattggagaatggtattggaaaccatgacctgggcattggttgtactcattgctattggggtgttttgcttctacgccctctcagctgacagagcaagagaatatatgtgtgtagactaactcatatatatatgcccatctataaacatttttatatgtattcatcatatgctaaatatgagttaatactgatgtctccaactttactccattaccatatggatcattctaacctttccctcttgcttgtctatatccttctttctaacaaggagaaacctgactccctttagccatccatttactgaattcttcaattccagtgtacgtttatagttgtttcagaattgttaacagaaactcccaggggaaacaattttatcaactaaaatacagtgcctatgggcagtttgggagtatgtagttaygtataaagctttatagtgtccactcatatccagggttacttaggtaagcacctttctaccccaccacttccagtaagatttttttcatatatttgtaatacagctagattcttttattatagtcttccatcctgtgatactttgacctcctaaacacacacacacacacacacacacacacatttaaatttgtatacagtaagtttagctcttctgctgtaaagttctatgggtattgaaaaatgcataatgtcatatawctgccattataacatcataccaaatacttgcactcttctaaaaaaaatcccgtgtttcacttgttcaaccgcatgtcacctccaaatccctggcaagtaccgatctgtttgccatgctatagttttgccttcaccagagtgtcatataaatgtaatcatatagtatatagccttttcactggctccttttgtttagaaatgtgaatttaagattaatccatgtctttggcagagagctcattcctttccccccamccccctgaaaaatattccatttaacatgtaccacagtttgcttatccattcattaattgaaggataccttggttccttacatgtttggttattatgaattaactgctataaaacattcacttgcaagtttttatgtagactacattttcaaatcagttaggtaaatacttaggagtgcaattgttggactatgtttaaccttgtaagaaactgtcaaagtgtcttacaaagtggctgagccatttgcctttccaaaagcaatgaatgagacttcctattgctcttcatcctttccagaaattggtattttccattttttagattttagccattctaatacatgtgccttcctccttgaagttttaataaacaaaagcagcacctgttatctctttataatttctgcatataccaattataattaagaattttgttttctggttttgtcattctaaatacttttcctgatattatgactgaatttagaaactgcttaaaaatttattagtgatagcaatgattgcccatgatwctactgtaataggtagactctttctcttttgcttagtaacaataagttcctggaatgaagttattcagcatttattcactgggaaatgaaatattttaggaatttcagtgtaactttgaggtgatataaccaacagggtcccatttgttgaaggtgttgaaatataagatgtccacaaatggtctttgttaatatcgttatgctctcctaacccccagcttgccwgagttaagattcctttcaacactatcaacagccagtgagtcaaactcacttaactaaagctcctttactcaayacattctcataacaaaattctcaaatttcttagaaactcttctatttttgttttctcaaagatagtattactgccatttaaaatctgcaaaactccttagttggataaaacaaaacagaacaaaacaaaaacacttagctctgacttggagcagaagaaatggaagcacagctaggtcaggctgcttgcatggggtcacaccattagcctctggggagggcagtgtttgaactatgaggctgtgatggtagagcctgctacattacttattgacccctcaactgcttctgttaccaaacagtaattgttattattgctttttctctgagttagaaggaagattattcttcccttactatgtgagaaacatgattgtgggcctgtaatcacttcatatgtcaaactcatagcttattttgttgccatctcatggagcagatttatagtgacttgtcacatttgctttttgaaatactgtttttttttgtctttatttctttgaatcttttagctcaagtgagcataccaccttcctttctcccccaacccttttcttttgtgttagaagacttttgttaagtaaatgaattatttcccattcatgaggctgatgtttttgtccattgtgttatctctctgctttcattgttctttgatgcataactctgactcaactacaaattttaatagcattctgtttaattcttctgacagttagtgaaaatttaagtaagattagagttaaattcaaacatcctgggttctatgctagatgagttgttgttcttactagtcttgagttcggttcttcagtcaattttaagtacttttgacagcatttctattgtaatttatttaaattaatctgatgagtagagttttatgtgtcacaataaagatgttacttaaattaagacattttatatatggtaaattccccttatgatcccactgttagtcccatttttcaaaagcaaaaatattaatctcttattttctttgagtctgctcagttaaagatttccatatgttaaattttccatcagggtagctatggactcttatgtatcatgggtgatttttataggtgttttggagtgctcttttcccatttctgttactcatagtagtacctaaagtgacatcttttcaaatctaataagtttgagaccaaacttccaattcctggtctgttgtggttttttcctatatttccacaaagtctgatcttaaccttgagaaatggtaagttttctagtatgaagaaagaagttgtagattttggaagtacttttcagaattttccactgtgttataaatgaattttattttagcctttgtgggcagcttagacactgttatgcaccaatgttaggatcaggttgggtagagagattgttgggtggtagggaatggtatgggatgtgaggactaggcttcatttcccaggtagaaaagggcagttagaagaaccagtgtaggtccccacagaagacatgactcattgatggaatggagggagaacctccagtgttggtaacaggcatgaaaataaactggtagagcatatatagaagtcaactaaacaagaaacgcatgtgattttcataagcaaggatactgaagtaattcctgactcctacataatggtcaggattgaacattgtccagagccagataagtaaaagaggaaaarccaactctgaaaatatcaattttaattttgatatttatacatttatgcttttattcttcctagggaaatatgattgcattattgatttgaatcctaatcccaaaaatgcttatgtctatgctagactctagatcagtggaccttacattccacaagtgattgtacagtaggatcatcgagagacattaagaaataaaagaggcctatagacatgatacccagatattttgattaatcatatctagggcagagaccagaactttgtattttaaaaatacattctctagataattttagtatgcacccatgacttttaacaatttaactccaaggctaatcctgctcttgggcaaggatgcttaagaaactgtagtcaattcttaggatatttgataccaagtcacctctactgttagttggtactttaaaatcctgtgtttctttctgtcttatttctgaaagtgggttgttgccttgtactccactcaattcttttgacttattcctacttctcttcaggactttagttctatttctgaatcccacacaggaactggtgctctgctttcattcattgctttttgtcttccagatacatgcttaatgtctcttgctagatgctctgtatttatcttttgctagatgttctgtatttatccctccctccctcccttcctgcttccctccctccttgcttccttccctccctccctccctccctcctttcctcccttcattccttccttccttcctgcctcccttttgccttttctgtatctctttgccaaatctccttcatgctgataactgctggcttagattactggcttagactgccatcatttgcatcacccaattagaatatcatatttttttctgattttctcctgtttatgtataagtgggcatacctagttctagataaatccctccctttattcatcccatgtcattaattccacaatgacatgcaatagggttttgttsaaactaatgtcagaaatagtgggtcatgcattgttttcataaaatgcctggttactgctagatttttttacttgagagctttagataacactttcctgtccactattactattgttaggatcagaaatcctattaattccgagaggacagtgttaccctagggagaaaataaagtgggcaatagaatttgttgctgcaataggaaagggaagtttatacttgtctgtgagctttcataaagcagagtcattttaggatctttgcgaagaagatatcaagggatttcagccagagaacaagcagaacagtgacaaatgatcctgactcttgtgagttactccactgagcgattagtgcccaggaaaacgttgactgaaaatacccaattgccataatttttctgcttttcattctctgtcttctggttctgtgtacttccccacaccattttatgagacttcattcacctcttcattcacttctagtacctcagactgtttttcattaacctcttttttttggtttgtttctataacctttctattttcattattcttattctcaatcttacattttaataaaaagcaacaattcaaatctgccaaacgtgtttacttctcttaatttgtcagtacatttttgctttagtgctatttttaagcttaatattccagttgccaaatttagtagtcaagcaactctaacttactgcaaatttatacaatttctttaattcagagctctaaatgatcactagggtttcagctggactagtatattgttatattaactgcaggaaaagattgattaatccacagacgtctgtatataatattgtggaggaaatatttgccctattaaaggaatagtttttaagtactttgttccatcaatacaaatatttattgaatattttgtatttttgggtactgttctaggtactggtgatcatcagggagaaaacagcaagtgggcagccaggcagtaaaaaactacagacaagtaacaaatacgaaaacttcagagtgatgcatgctgtgaagaaaaataagacaatggggccgggcgcggtggctcattcctgtaatcccagcactttgggaggccaaggtgggtggatcacctgaggtcaggagttcgagtccagcctggccaacatggtgataaccccatctctactaaaaatataaaaactagccaggcctggtatgggcacctgtaatcccagctactcaggaggctgaggcaggagaattgcttgaacccaggaggcagaggttgtagtgagccgacatggtgccactgcactccagccttggcaacagagtgagactctgtctcaaaaaaacaaaaaagaaaagagaagaaaaataagccagtggaatgtaaaagagtgtgaagggcttaaataatatgttaacgataatattcttaaatccatttaagcaactcataggatttctatatgactgtagtatttgtgctgtttcactgatatttctggatttagagctccagaaatgaactttttttttttttttaaccttcactttaatatggaggaggttgaggttaatgaaagttctggtttctccactgatgtctgagtagcatttgctactctggatttatttaagatgaatgaaaggagacagtgaggctgtagcattgtattttgggctagacaaagtcccgagtggtgttcatcatcccaccagtgtgttttgaatacctccatgtgccaggcctgtgctggccatgaagatttgagagtgagtaaggctgatgtcgtctctgctgtcctggctctgtcagcatagaagctaatgggaaggccacatggcaggaggtataaaacttttctactcagtggacagaatgcaaagctgcttgagtgtgaccactagaagagagccatcccaagagaagtggaagtaaaatccacaaatcaaatgcatacttaagctttctcttgctgttgttttctttttctccatatacacacacatacacatatatgcctatatacataagtacatacatacacatacatgtatacatatgtatgtatacacatgtataaattatatatgctttactatttgtaaggatttttcatgtatactattttgtaccttgctaaagtctataattaggtattattatttccattttacagatgaaggaattagacccagagtgtaagtactttactccaaatcgcttagccaacaaatgcttgcagctatatttgaatatagttttttaaactacaggaaaggagtaccgctctttttaccatgttgcatttttctctgtttccaaaaataagtggtaattgtgacacatcttccattaaaagaaccacctctgtttcctaaaaaaaaaacaacaccctgtgtttatgtattagtatatactgctacatggtactgtatgttattttggccaactccctgaattaaaaaatatatatttttctttttttgagatggagtcttgctctgtcgcccaggctacagtgcagtggtgcaatctcggctcactgcaagctctgcctcccgggttcatgccattctcctacctcagcctcccgagtagctgggactacaggtgcccgccaccacgcccagctaattttttcgtatttttagtagagatggggtttcaccgcgttagccaggatggtctcgatctcctgacctcatgatccgcccgccttggcctcccaaagtgctgggattacaggcatgaggcacctcacctggccaaaaatattttataaataccttttgccaatgattattctgtgtctgtgctgccagagtgagcactgacaatatttattctgggtatgaaagtatttttctgactccaaatgagagatagaaaaacagatctagagagcaagggttttgagctgataaaaataggaggaacccagcttatacttctattaatgcacacttcatgatgtgcttcctaattgtttacatgtctttctctttgacttgaatgtaggtacctagtggtcaggtacctacatttaactctttggggcctatttaactctttgtaaccacagcaggaaggccagaggccctggaggggtagctatccaaggattattgtttgaaagacaaataaagactgaggagtattcttgaagaaaggaaactaaagacacaagaaaaacaaatgcaaagcatgatcctgtactggatctcggactaggaaataatacaactataaggtatatcattgggacaatgagcaaaatttgaatatagattgtgggttagaagatagtattgtgtcaaagtgtacatttttatacaaggaagtattagggatgaaggggcataatgtctgctacctactctcaaatggtgtgtgggtgtgtgtgtgtgtgtacgtgtgtatgtgtgtgtgtagcaaaagagaagggggaatgagagagaataagaaagtaaatggcacaaattgttcacaaatggtgaaacgagatgaatatgagaatttttatactattcttgcaacttttctctaagtttaaacttatatcaaaataaacatttccaaaaatgattgaataaagttaaaatatattataagtccaaaggaactttgtttttattgggttgtatccccaattaaaaacaaacggacatcaccacaaaactaactaaaataacaaacataagtgagtttaagagtttgcagcgtatttttatgctgctataaattcctagtatcacctatgaatgcatcaaattctatataattagtgtccagattggagtctatctgtggagtttattttccttaagttttgttttctgtctcccttataacgtgatttggtgatatggagattaaggatgaaattggaatagtgtctgaacgtagtcccactctgtttatctcctattgcagggcaattgataccagaataggtgattggttcctgtatgttccagaacatttcatttctttcttctacacagaaaaatattgctcaagaataaaatcacattttcaaagaataaaagtaaaaataaaactgctgactacttctattgcttaaggtaccgattttcatggtactatattgagtgacatctatacacggacatgtagctttcttcttgtcatccctttactattatgataattttggacttcccaaatactttccttgaattcagaagcctcatcaatcattgacatattctcctctgtagactctgatttttttattgcttccctgacattttaaatagccagtatgcatcatttttcatggcctgtcatcagtcattagataatattgcaatgtgctatcaaagtatttctatatttagtagcagtacattctgtatctccatatagcattgtgtagaattagttacacaggatcttcacttaaagcaggacatcacactaagttggtgtttagtgtttactgaactaataggcgtgtaaagtcaactgtttagaagataatatagctgtacatggtcaaaattattaccactgcctatatttttaaattaataacaggtcagagcataagcacatgatggatattcatttccctttttgttggaatagacaaaagatcagtttcaaaaatggtgttcatttcagattatacatatatgtgtayatatattttatatatatatataaatatatataattccttaaaactttaattgttgcataaaaatactgaggcttatgtaaattattctcacatttcaaatttatttgaaattaaaaattttaagcaaacatatgcaggacataatcaggtattctgtctatgtgatttaactccccccacctactcccacaattcctgcacacactmatatacagactttcatttctagtttttttttttttttgagatggagtcttgctctgttgcccaggctggagtgctgtggcatgatctcagctcactgcaacctctgcctcccgggtttaagcgattctcctgcctcagcctcccaagtaggtgggactacaggcacatgctaccacaaaaatatttgtatttttttttttttaagtggagatggggtttcaccatgttagccaggatggtctcgatctcctgacctcatgatccacctgccttggcctcccaaagtgctgggattacaggcgtgagccaccacacccagccccatatacacattttcatgctgtcatggacctcatagtcctgatcctttgggaacaaaattttcaactaaataatagaatgaatctagtcctgttaataggaggcaaaaattcaagtaacagtggtattcactgaccattgttcctgctctcaccttagtataaatgttgggaaaataggagggatttgtgggatggagtaaatcttggtatctccacataggaactttattggacttaactttattcttatttgtctaagtctttgtttggatagttctgagtagtgaaacagggatgttagtagtcagctctacagacagcagaattgaagtctatagtccagttgtttaaaatgaagattgcctacattgggagatttctacttagaacaaggttaccatagtcacaaggctgaaaaatttctcaaatatctatttgacttctagggcaccaagccaactgattcactgttagtgggatagaaaaaaaacaaactatgtagacctttgacattcttctgcaagctagaaaggaaatagcaataatatactggcaaggctaggaatgcgctgagaagagaaaagtcagcttgcttctttaattgtgactcttttttgaagcacacttaagaagcattttgaaaggaatgtggcatctttcatcatgtgtgaattcaagatcttatagctttgtaatatctttttcctgccaagtactagattcggttgaccttttggataatgcatttttgtttgctttcaaatattgagaaagatctttcatataaccttctgttttccttaggaattaaatagtgttgagggaatcttaaaagtttatgggaaaaaataaaagatccacattcagacatctttgttttatatctcttttagctcaracagccctaagtctacctattaagctatttataagaataaactaagtctctggtgctgttttcttcctgcttctgcttgtgtttttaacattcctatgtcacatatttttcttgccttcgttctctaagaagtggagtgcctttgtttgtttatgactctgcagtgggggctgctctcctttgggcatttcaggagggtgagtggcaggacacaagttggaatgagcaaggtgtgctcacaatgcattgaagagactagtctaatctgagatgtgattcttgttggtgcattataaaaaatgagcacagggaatggttcttatgctgtgtctgcaggatatgccagtgcatctcactagataaattttgttccacttagcatccttccttcctcactgttccccaaatttaaaggtttggattttcactaatatcgtctaatctctggcactcctttccatgaaattgtggtatgtgtcctggtgagataattagaaaattggtctgttgttatctagttgacttggtgcttgtgttggctgttactttgttcttccttaactcttctttttagtcccttctgtgctagcttctgtagaaaagaggatttaacatactcacgtgcactacygctgttaccaccatcatttttgctttggaatggtgatgatttaagaacttaaaaccaaaggcttaccagtatccagtccgyattttctacattatctacatttccccattaatgagccctcttgaatttaaattaaaatgtaaaggaacctgaatatgcatttattcattcaaatatctattcaacaaatatttattgctctctagatgctggcattgtgtaggtactgatttactcagccaagtacagtagagtgctgcacaaattaatagcagactactctgttctccttttattttgggcttctcaggcatcctgtgctgagtcttggatcaaaaacacaacaatacagaaaataatctgttctaattccttagtgttcctggtaatatatcttacacttggacttatggcttatagtactatataaattcttaagaacaatagactgaaatccttcatatctttatcttagtaattgcccatacctgagatttaaaaaaaataattcaaaacaagaaaaaacatgaaataacagcttagtgctgtttattgaatgctcctataaaaagacaaaatattggcaacaaccaacagtccaactataaggaaagagtcagttaaaatatgatagctctgcttagaagaattttaagcagccacttaaatgagaactatgtggaaagattatgctacagcatgggaaaatgtttgcgatgttgctgtagctctagttccccaggaaacagactccaacatggagatttgcactcagacaggctcctgggcagtgtgctcaggatcagtgatcccaccaggcaaacttcattaggtttcaaggcctgagaatgatcctttgtggttctcagctctgccttttgggtcattctcatgaaaggtagtaagtacatgtttgcagctgaggagttttaccagactgtttccctgtgagaatgtaaagaaagtagatggggcagagggaaaaattgaattgctcttgcagaagccatcacaacagaggtctcagctgatctcttcagaattgcccctgactggggcaagaaggaggtatctttttgttatgactccccactttccaaatgaactatctttgaaagcagcttcccttgcggaggcaggtggatcttgagccggcagctctcttcagctgaaggcaatgcctagagtcagactcagttgagagctgacagctacaaacactcccagtatctgttagagatgacagattatacaaaaaagaaaactttatacataaagtgtttgggcatatcatgaacattatgaatccgagtacataaaatatgtgtgagtatgcacaaaaactggaggggacactgaaaaaatgaatatggctctgttacaaaagaaaagagaakccatgagagcataatcctttcaccaaataaacaatgaaaccaaacagatgatagtttcctctaaaataatgaaagaattcatgtatatattttcccctcctcactcaattttaaaagatgaccattaaaaaaattctttcaggtctcagcctttcccttgtgttttatttgtggaatatgttagagtgggataatgacataatgacaaacatagctcagtgttctgtgagatctactttgagaccgtaacgaatatgaatagttgctcckcttggcatgcttttaatctttcctagggttgcctcacccacgatgctaaagaagcagtgcttatgagttcagtaagtacatgcaccactgatactcattttcacggctctacatttcttcctttttcagcttaacattttatatattcatgatcaaaatggaattgggcatgaaaaatgtgaacggcacaaggcaaataaatacaatactagaaaaacagtttgaggtgtatatgctagtgaagaagaataaacctgaacatctattttcccaggttagagcacatatacacaaaagactgtaatcctggcataaaagtttctcatgttagctccccttatctgaaatagacttcctatttctcaactgctttcttatttccttccaaagcataactcgtagtatccttccaaatcatacatactgtgtgtgtgtttcctagtgtacccttttttttttttatattaaacagttctttaaagctgcctttaatgcacttggaattacttctttgaaaaatacaagatgagaaaagacaggagaacatgagaactattttcagatactttaaaggacttctgtgagaagaggagatttgttcaaatcaccacctagtatatgagggtatattagaactagtggactaaaattataggaatagattttgccccacatgcaagaaggaaggaattttgtaattactggagatattcagttttggaagagcaagcttcctgagctgctcatcagggtgctgtttaagtagaggaaagatgactgtctatgagatctgctgtgttttgagagagattggactggttatcagtcaagttctcatgtacttgatggcttcatgaatcaatgttatactaaatggtgtattcacaaattctgctttaaacaaatatatacgtaatcataagatttcatcttccagaagtatagaagtattagcattgcttgtgaatgctgtaaaaatgctgtgatgctactgtaatagctacagcatggaaacacaataacatactaatttctgtcactcttaacatctaatgctgtttgtctaatgaaatacattttagacctttggctaagtatttattacctaattcaataggaaaattgaaaaaaattttagatttccatcaatttcatttctttaccacaacaccttttttttctgaaaaaaaaaaaaaaaaaaaaaaaaaaaaaaaaaagtttgtccctttgctcagactggactgcagcatagctcccaacacttggttggagcagttgaggagggtgaatcacaatttagtgatttaaaaaaaaaagtgaccattttttttggaggcggggccaagatggccgactggaagctgcgtgttcagaggctcccactggaaaaaaaatctaagcatgtgaatccttcatcagcaaccaaggtattcaggttctctcgccaaaattgacaagaaggctggcctgaccacagagagaaggaagagcagtgtagtgagaaggcccacctgagagccacacggggaaggggaagccccttccccaagccaaaggaggcggtggtgagtgagtgcgctagggaaactgctttttccacagaaccctgccacccatggattggaagatcccactcgtgaacccacgccaccagggcctagcgtcccagccttggaacatgcagattcttacagcctctcagctggagtctgcttaagcctatggaactcaggaagtgggggttgctggtggggaggggggaagaagaggcaaccagcaccagctgtggctgcctgctgtctaagccatttgagctcctggggggaggggcaagagtcagcactgggacttgcaactgcctaacacactaagctccctgggcagggtgggcacacccatttctatagctccaggctgtactttcccctgctagagctagagccagggaggctggacgacttgctcccaagacttgtccccacagcccaacacaccctctgtggcagtctgcggctagagtgcctcttcaggcctaatcccaacccatcattcctcagtgggcggggcttccctgcaggatctccaataactccagctagaggctcggggacagaattcagatctccctgggcctgagtccctagggagagggatggccacagtctctggggaccagcagacttgctgtctcctcttggtagttctgagaaatccaggcagctcagatgagtgggttttcccctagtgaaacataccctctccaccaaaggacaaagtgcttcattaaatgggtcctgctccctgtgccacccgattgggtgagaccctccaacaggggttgtcagacaccctatacaggagtcatcctactggcatcaggttggtgcctgtcgaggtcagaggtcccagaagaaggagcaggcacccatctttactgctctccagactccttgaatgacatctccaggaactggagcgaatcacatgaatacgacctgaagtgaacccctagcaaactgcagcagtcctacagaagagggaccaattattgaaagaaaaacaagcagaaagtgacaacagcatcaacaacaacaacaacaacaaaaaggcctccacaaaaaaccctatccaaggatcagcaggctcaaagactgaaagtagacaaattgaggaaggtaagaaagaatcaatgaaaaaatgctgtaaacccaaaaggccagagtgcttcatctccaaatgattacaatgtcaagggcacagaactggagggaggatcagatggacggattgacagaagtaggcttcagaagatggataataaaaaactatgatgagctaaaggagcttgttctaacccaatgcaacgaagctaagaaacttgataaaaggaattgctaactagaatacccagtttagagagaaacataaatgacctgatggagctgaaaaacacagcatgagaacttcacgaagcatacacaagtatcaacagccaaattgaccaagcagaagaaaggctatcagagtttgaaaactaccttactgaaataagacatgcagacaagaatagagaaaaaagaatgatcaaagtcttcaagaagtatgggacttgataaaaggacagaatctgcgattgattggagtaccagaaggagatggagagaatggaaacaagctggaaaacacacttcagaatattatccaggagaacttccccaacctagcaagacaggccaacatgaaaattcaggaaatacagagaacatcattaagatactctgtaagaagatcaaccccaagacacataattatcagtttctccaaggtcaaaaaaaggaaaaactgttaaaggtagccagagagaaaggccaggtcacctacaaagggaagtccatcagactaacagtggacctctcagcagaaactctacaagccagaaaagattgggggccaatatttaatatcttaaataattttcaacccagaatttcacatctagccaaactgagcttcataagcaaaggagaaatgaaatcatttccagacaagcaaatgctgagggatttcattaccaccagtcctgccctgcaagagctcctaaaagaagcactaaatatggaaaggaaaaaccagtaccaggtactgcaaaaacacagcaaaatataaagaccaatgacaccatgaagaaactgcatcaactattatgcaaaataaccaaatagcatcatgttgacagaatcaaattcacacataacaatactaatgtaaatgggctaaatgccccacttaaaagacagactgggccgggcatggtggctaacacctgtaatcccaacactttgggaggctgasatgggtggatcacctgaggttgggagttcaagaccagcctgaccaacaaggagaaaccccatctctactaaaaatacaaaattagttgggcatggtggcacatgcctgtaatcccagctacttgagaggctgaggtaggagaattgcttgaacctgggaggttgcggtgagccgagatcatgccattgcactccagcctgggcaacaagagcaaaactctgtctcaaaaaaaagaaaaaaaaaagacacagactggcaaattgaataaggagtcaagacccatctgtgtgctgtattcaggagacccatcttaaatgcaaagacacacacagcctcaaaataaagggatggaggaaaatttaccaagcaaatggaaagaaaaaaacaagaaagcaggggttgcaatcctagtccctgacaaaacagactttaaacaaacaaaaatacaaaaagacaagggtattatacaatggtaaggggaagaattcaacaagaagagctaactattctaaatatatatgtacccaatacagaaacacccagattcataaaactagttcttagagacctgcaaagagacttaaactcccacacaataatagtgggagactttaacaccccactctcagtattagatcaatgagagaaaaaattaaaaaggatatttaggagttgaactcagctctggatcacgtggacctagtagacatttacggaactctctaccctagatcaacagaatatacgtccttctcctgtgccacatggcacttaccctgaaattgaacacatattttgaaataaaatactcctcagcaaatgcaaaagaactgaaatcgtaacagtttcttggaccacagtgcaatcaaattagaactcaggattaagaaactcactcaaaacgacacaatttcatggaaattgaacaacttgttcctgaatgactcccgggtaaataatgaaattaaagcagaaatcaaaaagttttttgaaaccaatgacaaagagacaacataccagaatctctggaacatagctaaaacagtgttaagatggaaatctatagcattaaatgcccacatcagaaagctagaaagatctcaaattgacaccctaacatcacaattaaaagagctagagaggcaagaacaaactaatccaaaaggtagcagaagacaagagataactaagatcagagaagaattgaaggagatagagacatgaaaaacctccaaaaatcaatgaatccaggagctgattttttgaaaaaattaacaaaatagatagaccaatagctagactaataagagagagaagaatcaagtagacacaataaaaaatgataaatgggatatcaccactgaccccacagaaatacaaactaccatcagagaatactataaacacctttacgcaaataaactagaaaatctagaagaaatggataaattcctggacacatacaccctaccaagactaaaccaggaagaagttgaatccctgaatagaccaataacaagctctaaaattgaggcagtaattaatagcctaccaaccaaaaaaaaaagcaaggaccagatggattcacagctgaattctaccagaaatataaagaggagctagtaccattctttctaaaactattctaaacaattgaaaaggagggagtcttccctaactcattttatgaagccagcatcatcctgataccaaaattaggaagagacacacaaaaaagaaaacttcaggccaatatccctgatgaacatcgatgcaaaaatcttcaataaaatactggcaaactgaatgagcagcacatcaaaaaacttatccaccatgagcaagtgggcttcatccttgggatgcaaggctggttcaacatatgcaaatgcataaacataatccgtcagataaacagaaccaaagacaaaaagcacatgattatctcaacagattcagaaaaggcctttgataaaattgaacatcgcttcatgttaactctcaataaactaggtattgatggaacatatctcaaaataagagctatttatgacaaacccacagccaatatcatatggaatgggcaaaagctagaagcattcctttaaaaactggtacaagacaaggatgccctctctcaccactcctattcaacatagtattagaagttctggccagggcaatcaggcaagagaaagaaataaagggtattcaaacaagaagagaggaagtcaagttgtctctgtttgcagatgacatgattttatatttagaaaaccctggctgggtgcggtgactcatacctgtaatcccagcactttgrgaggctgagataggcagatcacctgaggtcaggagttcgagaccagactggccaacatggtgaaaccctgactctactaaaaatacaaaaattagccaggtgtggtagtgcacacctgtagtcccagatattgggaggctgaggcaggaaaatcacttgaacccaggaggtggaggtttcagtgagctgagagtgtaccagcctgggcaatagatcaagactctgtttaaaaagaaaaaaaaaaccctcatcatctcagcccacaaacttcttgaactgataagcaacttcagcaaagtctcaggatgcaaaattagtgtgcaaaaatcacagtcactcctttacaccaataataggcaagcagagagccaaatcatgaatgaactcccattcacaattgctacaaagagaataaaatacctaggaatacaactttcaagggatgtgaagacctcttcaaggagaactacaaaccactgctcaaggaaataagagaagacataaacaaatggaaaaaacattccatcctcgtggataggaagaatcaatatcgtgaaaatagccatactgcccaaagtaatttacagattcaatgctattcacatcaaactaccattgacattcttcacagaattagaaaaaattattttaaatttcatatggaatcaaagaagaccctgtatagtcaagacaatcctaagcaaaaagaacaaagctggagacctcatgctacctgacttcaaagtatactacgaggctacagtaaccaaaatagcatggtactggtaccaaaaccgacatatagaccaatggagcagtacagagacctcagaaataacaccacatatctgcaaccatctgatctttgacaaacctgacaaaaaacaagcaatggagaaaggatctcctatttagtaaatggtactgggaaaactggctagccatatgcagaaaagtaaaactagacccctttcttacaccttatacaaaaattaactcaagatggattgaagacttaaatgtaaaaacccaaaccataaaaactctggaagaaaacctaggcaataccattcaggacattggcatgggcaaagacttcatgacaaaaacaccaaaagcaattgcgacaaaatccaaaattgacaagtggggtctaattaaactaaagagcttctgcacagcaaaataaactatcatcagagtgaacaggcaacctacagaatgggagaaaagttttgaaattttctgacaaagggctaatatccagaatttaccgggaacttaaccatatttccaaaaacaaaaccaaacaaccccatcataaagtgggcaaaggatgtgaacacacacttctcaaaagaagatatttacatagccaacaatcatgaaaaaaagctcaacatcactgatcatcagagaaatgcaaatgaaaagcacaatgagataccatctcacgccagtcagaatggtgattattaaaaagtcagggaatagtagatgctggcgaggctgtggagaagtaggaatgcttttgtactgttggtgggaatgtaaattagttcaaccattgtggaagacagtgtggcgattcctcaaggatctagaaccagaaataccatttgacccagcaaccccattactgggtatatacccaaaggagtataaatgattctactataaagacacatgcacatgtatgtttattgcagcactgtttacaataacaaagatatggaaccaacccaaatgtccatcaatgatagactggataaagaaaatgtggtacatatacaccatggaataaaatgcagccataaaaatgagtgagatcatgtcctttgcagggacatggatgaagctggaagccatcgttctcagcaaactaacacaggaacagaaaaccaaacactgcatgttctcactcataagtgggagttgaacattgagaacacatggtcacagagaggggaacaacacacaccatggcctgttggagggtgaggggtgaggtcagggaacttagaggatgggtcaataggtgcagcaaaccaccatggcaagcgcatacctatgtaacaaacctgcacgttctgcacatgtatcccatttttttagaagaaatttaaaaaagtgaccattaaagaggcattggcattgattaacagctctgagtaagccctccgaggatcggtccatgtggaaatcatgctttcctgctgcctcttctgtggccgccaatttgaacagggctagtcrtcatcagcaaaagccagaatctatgtacgtcacagtaatcccctcccccaccttcttcaccagcgggtaagagactggtaaaaagtaaaggcgtgagaagtgatgagaatacttatctgcagggagattccaaatcttgggagccactgccctattttcagtgtggcagattgcattccagaataaggggccaggtgtgggcacagagctgaagcaggtgctcctgcagctcctctttgtaattagctcatgtctgctcattctttgactctgcaccttactgctgctgggctgctgctgggctgctgctggctttgtgtcttctctggcaatatgccagggtgctgaagaaggaaggctggggaatgtgatgagccctttgtcacctgccaggttgccagcatctgatagcaggcatagcacagtggcctgagaaggctgcctgattagacatgtgcttccctgaacctgtccccttcttagcactcaacacctgtggctccttgttggcaaaggaacaagaatttgtcaaacaataagcattcacacctattaaattagtcatttggcataacttgcccaagcttgtgataaaaggcctgccagtgaatactgaagggtacaaaatatagcaatggaaaaatcatgtatgcacacatatgaatttctatcactacatatattatgcctggacatatgatcagtcacatccagatgtatttgttttcattaatccattggttttatattcattcttttatagattcaccacagacaaggcacggtaccaaagattagggttactatagtggtcttcatttagtttctctaaaactccatagtttstctttctggaccttagcatatatgtttcttcagtctggaatggtttccttcctcccctatctatctactcttttttggtggcctagttgacatttcctttttcttcttcaagaggttaagtctggttgagggattggacacattagcagctattgtgtgggaaatattaggctgggggtaatcacaaggtgctttggaagcctaacaagtagagacatctatctcggtctcagagtgtcaaggaaagcattctgaaggaattttggtgtgaagatatgcaaaataagtgaagcagagaactagctaagtggggtaggtaggagaacagaatcctagttaaaaaacaaaataaaacaaaacacagaaccagccatgtacagaagcctgtaaatgagagagagattgttgagcatgttcaggaaactgaaaagtggttcataatggctggtatagaggtgtgaaatgggggactgagagagggaaggatgggccagtaagtaaaagctggactaagccttgctgattttggactttattcagaaggcaacagtcattggagggctttccagagaaacaatatgatgagatgtataattctagactactgatcatggtggcctaaaacaaagtagtggtatttaggatagagagactagcagaatgtcaggggagatgcattatgaacttacacacaacacacacacacaatcgtaattttattaaaataaaaaaatcatattctaaattattttgacagttttagcttagctttatatcatacaaaatcaagcatctttttacatcttttttatatgtttgcttgttttggttaaggcatacataccgtcccctagatcttctaaaatatttattgcttcatcttttgcattgtacgatcttaattgatctggaatttgattttgtttgaggcatgagatgggatttaattttattgttytccagayggctagtgccatttattaagtaaaccattcttttccctttgaattgaaatactgttctgtggtatattaaaacttctcatatacacagatttacttcagcaaaatgacataattttatgcttttttgcaatgtgtttactggttattttattttcatatctcacagtattttctagaacctccaagataatattgaaaacgatgatagcaagcatacttgtcaaatttctgattttagttaaaatgtttttagtattttgctatttagaataagctgcttctggtttttggaaaagatcttttattatatttgaacagtttctttatatcttattttattcaaaatgcttattaagacttgaatctcacacttttcagaatctactgatatgatcatattttgtttacttttatgaatgtaataatttatgctgatatattttccactgctgaactaccgtttcatttctgatataaatcctacttggtcatgatgatttattcttttataaatcgctagattctatctgctactatttttgcaaatattcataagagaaattggtcttagtatactgtatcagcttttgacataaagttatttgggattaataaaaagaattgagtgattttaatttttttctatggccggaaaatattttaaaaactttgcagtcatctagtttttttcctaattgctagccagaactcaggttcttcttgagtcaactttggtcatttatactttgccagatacttacccatttccattccatttacacatttgttcacagcaagttgcatgtttcttttctgatttatctaattcgtcttaatatgtgcctatgtattcttattccaatttagttactttctttcttaatttcagcttttatctattaattcctactccatagtttttttcttaagctcattacagttttcttaatttggaagctctttatttacttatttatttttgttgctgaaaacatttctggcattttccttgagtatagttttgttgtacctcagaattgtgtatgatgcaggctcctttttattgatttctaaaagttataattccaattttgactttccctgtaatccaagagaatgtattgcttaactctcaaatatatatgccaccttttggttatttctgtttattattaaaaatgtgatctgtaaaatctttaaaatattttatggggtttttatgatcaagtatttgagcaatttttgtaattttacatacatataatacatatgtacatatacaaatgttttgagtttgttgcttttgctattttatttttctgactttgcctttttgttagtttttattattaacatttatttaatttctctgattttgctttttagttttgatcttttgatttctcaaaaggacacattaaagtttttcactaaaattttatttttatcaaggttttcttttatcttcattgttctgttgtatataattttaatttctctatgattttgctgatctattygttacatagcttggtactgagagacatgtattagtgtttcctactataattatagttgtatagatttcttctttcattctttttttttttttgtgagatggagtcttgctttgtcacccaggctggagtgcaatggtgcgatcttggctcactgcaacctctgcctcccaggttcaagcgattctcctgcctcagcctcatgagtagctgggattacaggaacctgccactgcgcccagctaatttttgtattttttagtagagatgggtttcaccatcttggccaggctggtctcgaattcctgacttcattatccacccgcctcggcctcccaaagtgctgggattacaggtgtgagccactgtgcccagcctcttctttcattcttaattttgaaaatatataattttgaaactatataatgctttattgaaatatgatttacataccatgcaatttacctaacaaaagtgtacaattcgatggttgttaatatattcacaaagttttgcaaccatcactacaatcaattttagaacattttcatcactccaaaaagaaaccccatactcattagtaattaattcctaattgtttttgctttatatatttagctacaatgttgcttggtttatgtctcttaggtcttctttgtaaattgtgattttgttttactttgtctctttttattctgtttatcacttctccccttattctaccttgttgatattaatattgcccctccattgctgctttttttcttgcagtttctttgaattctttgcctgttgactcattttcaaccttttattttttaatcaccttttataagtacaattcttgtgagagttttctcatttaatgggatgatttattcatttacatttactttaatccgtgagctatatgattttcttgatttatcatatttcttttacattgtttttgtttctggtcttttgctgttttgatcatgttgacatatacataatatttgaccttgtatttggagagttctactccaatttcccatttcattattgattatcttcctttttctcttagtagaattagacccatgggttttttattattttaaaacaaaatatcaattattttctttctaagattatattattcctatccccccaaatccccttaagaagaaacttttagaataggtttacttttctcctctctaccttctcccctctcctcaccatccaagtcctgtggtttgctgagattgtttagtttcagaatatgaacaaaatttaccttgtggtagtttggtagtttttctatgtatcagtagcttttttgtttgtttgtttgtttgttttttgagatgggtttcgctcttgttgcccaggctggagtgcagtggtgtgatctcagctcactgcaacctccgcctcccaggttcaagcgattctcctgcctcagctttcccaagtagctgggattataggcatgcgccaccatgcccagataattttgtatttttagtagagacagggtttctccatgttggtcaggctggtctcgaactcctgacctcaggtgatctgcccgcctcggcctcccaaagtgctgggattacaggcgtaagccaccgcacccggcctgtatcagtaatttaaaattaatgttcatactacaactgtccaggtaataggtcattatccataatacatgtctaatatgtataaatgtgtggacatttgtatgtatgtacacatttgtatatgatgtatatgtacacatacatcagaaagcatgtgtctatgtgtgtgttgtagggttcattgctcactaatgtgtctacttttccttcttctcttaaccagactcctctacttcttcattctgagtgatttcttgatcgattaatgtgttttttttgttttgttttttttgtttttgttttttttcattttctaaggtgtttcactgagtgatggaatcyctgaatctttgccagatactcttctgggtgataaacttttaggtttcagttctctcagtatctcacctgtatttttctctcatcatctagctttcattgttgcaratgaaaagtaaattttttttaattacctgttttctcttgcaacttaaaagatcttctttatctctctctctcttttttttttttcaggaatccaaccagatattcttaggggtgtgtgtgtgtgtctgtgtttcttatcattcctggttgcaatttatgctttttccatctgtagatgtrggattttccatggttcaggggaaattctctctgtaattcatttagttatagtccttcttccattggtttcttttttctcattctacattatagtgtttttagaggttgttcctctaaatatgtttatggaaaatagaaggatcacagaaaaaatactacaagggactatctgctattttataagaaagacacggacatgtgctttgtgatttgaaaggaaggagtaacactgatagttttgtagtgtatgtttatgatactgcacttgttagatgtggttaytaggtgaaaaaattcgtttcagagtactcacatgggggttggcttcatcttcattataccacatttctcattgttaaaatttatttctgatgtatgttttaaaacataaattcacagattaaaaaattttattttaaattcaggggtacatgtgcaggtttgttatataggtaaccttgtgtcatgggggtttggtgttcagattatttcgccactcagatattaaacctggtaccgttcagttattttttgtgatcttctttctcctcccaaagatggctccccagtgaatgcttcctgacatttacactcttctacagtaattttcagtacaaggtctcactctgtcactcaggctggagtacagtggtgcagtcacagctcactgcagcctagacttgcttgggctcaggtgattctcccacctcagcctccagagtagctgggactgcgggcctgcaccactatgcctggctctttttttgtatttttagtaaagacagggtttaggcatgttgcccaggctgggaccacctgctttttttttttttttttttttggagacagggtctcactctgttgcccaggctggagtgcagtggtatgatcacgggtcactgctacctcaacatcctgggctccagtgattctcccacctcagcctcccgagtagctgggactacggactacaggcatgtaccaccatgccctgctaatttttgtacttttttctagatatggggtttcaccatgttgggcaggctgggtcttgaacttctggactcaagcaatcagcctgctttggcctcccaaagtgctaggtttacaggcatgacccactgtgcccagcctaacctgtttttttatttaagtctcccttcaaacattgtctctctgaggagaggcagatactgtttttcttctacttccgtgggtactcctgtgtacccctgttgtagcccaaccataatgtaatttactgttttgtaggggcccatgagagaaagtcatgtgtctttttgttttcatatccttagrtgtggcacaagtgcaaccttaaaaggttagtaatattcaccaaacaaatacttagatgaatgcttaatttctatgaaacaatgcttattctccaggtgtcaggcattatgccagtgatagatacgcagacataaatagggcaaggtccttgtcctcragaaatgccatctgaggtggggtgggatagcagatgagagacaacagggccagatcatgaaggaacagatcgtatttcatttacagctaaaggatgccagcatttatgctattcacctttttaaagaggtgaattaacagtagttaaaaattctaacttaacttacccattaataagagcagctttgttataaattttgccacttgaggaaatgtattcttatagacccagatgtcaagctgtcatagaatcttgtgatgtgaggagattagcattgtctatatgtttcaaatgatttactgtaagtagggggtttgcgtcaatcgtaggcggaactttgggagtcagaattgcatcagttgtctgaattgaattactttgtctgtgctttctgaattttgagattaaagtttaaaatcaaagtcttggctattgacttgtatatttgtaaaagttgaagtaatcttttcttagttttaatattttcaaatctaataacttttttcttttctgatcttgtgcagtttaacagttctgggaataaaaatctttattagttaattgaatattatgggtttatatagaattgccattcataatattttaatgtaatattcaaaaaaattcatttttttttagtaatacaacagtcactttagcatctggtattccttagcatcatcatttgaaaattaacaatattgtaccttaaagtacagaggtcctttataaagcagcaggctttctagttgatagattgctgcgcatagagtagtttttagtttgttgcctatggtgaacttcttattttctggatgattctttgggatcctggcattaggcacagaacataagcttacactgtattgtctttacatttgtgtgcaccataactgtgaggaccttttcaatgttatgaraaatgcaagttagaagaacttctctttttctcttcaatgcacatggacctgaagtcttttgaaaatacagttcttcaaagtttagaagcaatccatggaatattttcagtgacacacggaatattgtagttcagcatatatggtcagtttataggaatttttatttattctgtatttagtttttaataagaatttcataactggaagatttcatagcaacaaaggactgtcattgaatgtgtatataaatttaacttgtatcttagagttttctagttataacatagtgatggtgatgtaaggatttggcatagaaagaagttttagtgaaggaagtgagaattaatgttcatgcagagtaatcaaaccaggagagtatggtttgataagccaaaagagatgagagttttaggaggaagggatgattaatagtgtcaaattaaaggaaaaacagcaaacaaggttaagtaagataaggacaaaacagtatgtattgatttaagtatttatgaaagcagtttcaacagagcagttggaacaggagactaatggcagtgaatattgtctrtctttgttttctcttctacactagagaactggacagataagtactattattgtctattctggctgacattattgttagtgaatgcaacacatgttgaagagcagtcttgtaacctggcaatgtgacatgagtggtgatatttttatcttaataagtgactttctcaacaagtcttgagcatccaatccatgaaaccaaaatgaatatgaaatgcttattaataaagggactgtttctcacttaggttttctactcattttcctatcacattgattttaagaagttctttgtcaaactgacttcttggctaccagaagttttagactctatagtaagctcttaaagaatattagatgtgctttgactattttaaaaacaatattattcactctgttcatttgcctcacttctggctgggaggaacactcagggaatgataaaggtaggaaagcagctaagctgtagacagcctagattgctctgcactctaatggggcgctagcaaagtgaccttcttttcccagtcctgcctgatttgcaggacttcaaatgagatgatggaaatggggcaagaaaatatgaatatgtaaactacatgtattgatttcaaccaatgtcaaaggagaagcaatagagtttaggtagaagctgtctttaatatgcaggccaaaatcttttgtatgtgttatagtcctctttggcacataaattccctcatttttcctcakatcatcctcaagggggggatcttgtgatcacatgtgatcctgcttcttattacgatagaatacattgtgcacacttatttatttttcattgtaatatccagcactataaggtggaactcttttgccagggcatcagggagtgattatatatggagaaaacttaacaataacctttaattctrtctcatcagattcctcctccatgcttggctgcccttacttttgtgggtgaaagaatgtaaatcattccagagttctgtcattattattttcttgttttttctccttttccctgaggtctagctgacctgcatgtctttccctgagattgctaatgtaagccttttgtttccaccagatagcttgatgcctatccccattcatgtgccatagatttcttttctggtttatattttccacttaatacatgcatttcgataagaagtaagatgataatatggatgtaatatggacataatatgtaggcaacttggatattctgtgaagaatggggaaatcattaagaaaaagaaaaatatattatttatgataactactgcaaggctattgaaaggtgaacagctagattagcaacatttaaaaagctgatgctctgggagttagggrgaaggaagggataaacaggatttttagggcagtgaaaatgctctaagtgatatgataagtgtatacatatcattatacatttgtttaagcccacagaatatacaatattaagagtgagccttaatgtaaaccatggaatttggatgataataatgcatcatgtaggttcatggattgtaataaatgtaccactctggtgggagatatgataatggggcaggctgtgcatgtgtcggggcagagagatatgggaaataactgtgccttctgctcaattttgctgtgactctaaaactggtctaaaaatatgtagtctatttaaaaacaaacaaaaaggttcatgttcattaacattttagaggcatcctgaagatgaactgaaatttatattttctgattcaagatgagtgaattaacctatgtggaaatttgtggatctaagagaaataacctttgttactttattcagtagttactcttttgataagcacttaaaaagctataaattcaattatttatattagacttcactaacatttgcttcccatttacctctaggtttgaagtttgaggaaattcaaaaaagatttggkgaagagttctttaatatatgctttcatgagaatgagagagtccttcgagctgtaggtggcactttgcaggacttttttaacggctttgatgctttgttggaacacattagaacttcttttggaaaacaggccactctggagtcaccatctttcctatgcaaagagctccctgaaggtactctcatgctccactacttccaccctcaccatattgtggggtttgcaatgctggggatgattaaggctgcaggaaagaagatctatcggctggatgtggaagtggaacaggttgcaaatgagaagctatgctctgatgtttcaaacccaggcaattgtagctgtcttactttccttatcaaagaatgtgaaaatackaatatcrtgaagaaccttccacagggaacctcccaagttcctgcggacctcagaattagcatcaacaccttctgtagagccttccctttccacttgatgtttgatcccagcatgtcagtccttcagttgggggaaggtctaaggaagcagcttcgatgtgacactcacaaagtgctcaagtttgaggactgcttcgagattgtatctccaaaggttaatgccacctttgaaagggtcctgctgcgactgtctaccccgtttgtgattagaaccaagcctgaggcttctggctctgaaaataaagacaaggtaagtgctatggacttgagatggtgatgggaactasaagagtggataattatttcagtaaattacatggtggctgtacttgtaattatttaggcaagagagcttaaagtgccatttagaagattactggtccctggatgtatgtaaaaagatttggcctcattcccagccattttgcatagtgtctgcctcctccattaatttatttcagcatataaaaagaagacatttattaatactagctatagcaattacaaaaatgatagaactcactaaaaacctgataatataaacacatgaatatttccactgaatgtagtcaaactatgagaaatatagcatttcaatattgtggggcgtgactgcaatatctttaaatacatatgctaaaagttaccttcactttgaatatgttcttttctaaatttcataatctgggaacatctggtttacatcctatttttgtcttaatatgcagaataatgtattccccaaaagctgagaattgactatctcgagacttctgtttaaattttagtattaaaatagagattcattgctttagaacatgatctctagttgagagaataaagtgaagactaggaaattttttgtggatttctttgaatcccctttgggaaatctggattataaattataaataattgatgaaaagacaccagaaataaatcttaaaatatttgggtttaaatgaacattttgtccctmaggtaaaatattttaaaaagtcaacattaaaatagataataaaatgtaaagaaaaataaaccatgattttttatgtttagtaatatgctttcagtgattaaacggaaaaacaacattaatttccaggacagaaatttgtatagttccattcagtttccagtagagtgtcttttcaacattttgtactagggtaaataaagttcttttaggctatttagcctgtttccaagcatttgagggaagctattagctattagaaatgacaggttgctctgggctaaaggaaagaagagttgtagaagtaattaaagactcagtgaaaatatacatattctggaataataataaataaatgaggaaatagccctctgaaagcagcgcttaacttgtttttgaggattttatacagcattagtttcatgattgatgatttttataattttgaagttcaatggaaagttttttaaaaaaaatattcgagaaagatggctgggtgtggtggctcacacctgtaatcccaacactttgggaggccgaggtgggcagatcgatcacctgaggtcaggagtttgagaccagcctggccaacatgatgaaaccccatctctaccaaaaacacaaaaaaacgagctgggcatggtggcgggtgcctgtaatcccagctactcaggaggctgagacaggagaatcgcttgaacccaggaggcagaggctgcagtgagctgagatcatgccactgcactccagcctgggtgacaagagtgagactctgtctcaaaaaaaaaattatttgagaatgatagaaagatgmacatttattcaatatgacgaaatcaggtggtttaggaaattaataatgtttttatcatacaagttcagtgatttgaaaatatctaaggatagacctggattccagtttggcacatttggatattttagtctgaatgaattagtatkatttgatcatatgatgttttaaatacaaattgtcacatatgtatattatatgtatgtttaataattgctacccattttgaagtcctttagaatggaagaaacttgttaaatgtgtatttttgttcacatttgtagatgctttaaaacgagttattctttctctttaatttagggaatatcaaaactatcagttctgttttacagaagcacaatatttggctaggagaatttgaagcatttttggcctttagaattgaagttggtgtttttggaaatatttctgaactagaatatattattatcaatgttgttgctttatatattttatcgatttgggaaaaattaattcattttaaaatgactgcttcaggttttttccccttatatttcatttggcttctatttctatttaatttgtataccagggtaagaaatagacataatgaaatgatgactcaaatgtcaaggccccctgccaattccaataataaggaactgtgctcattgaggagatgcaattatcatttaaacatgttagtggcagtttaaaaataaagtaataggcaggatttttagttaaaataaggatagaaatctactcatccttatatttatttctgcttactcacctgagtttgccagaatgggacatttgagaggttacagttgccccaaattgatactatggtcagtaaagttgtcacatacagtcttacccagatgaataacatttttaaattagtaagtcatcaaatttcacatttacagtttattaaaacatggaaagaagaaagaaaaataatatgtaaaaattgtgtttttgttgataaatttgactttgtcttcattattttccccataatagctattcttgttaatgtatacctctatgatgtctgaagtctctaattttttagttggcttttataagaaaatgctattttaaaataatttatatttattccttcttctaacattgagggctctcataatttaactgttttgtttgtgcatttaataccaatgaaccactacgtctgccataaaaaaaaaaatcaagagcaagcatgtcaccgaggggcatctgacgcagttatcagtggcaggattcaacagtcttgaggttagaaaaaaactcttccagatggcttgaccaagctttgattctatcacttggtttcctctacattttctctaagtgatcatccatgcctcacatattcttctctctccctattttctttttcctcattatagtattcgtatgttttcatctttccctaaactcaacttcctgtcatcatcatctttccttatcagatgtcaaacattaagtatgaatgaattggttgtttttaaaaaacccaacagattcagtgtagagaataaagactgaattaatccatgttaatttgtgctgtgtatttctttcattccatgtatatcaaatattgttctgagaatttggaaatgtattgcatagatcttttgaattacaagacattgtggtaaatttgagatgaattttttttgcagcttaatgagcagtttgcagttaatatttagtccatgtaaacataacctactgatatagattacaaagcttcttggtatggaatgaatcttgtttgagtgaatagctttgttagaaatgagagtaatagcacatagcttccttctctgccaggtaaggtcatgatgtgtggtgaaagtatcaacaggctgggagagaggtgtctctgacagccatgatcttagtaaatctttttaatgtctgcacctcagttttatacattggaaattaatgaacctagacaaactaatatttttactcctttacaaatcatacttaacatatatacatatacatgaggtcaattgatcatgattttttttttaattttttttttaatttttttttttggagatggagtcttgctgtgtctcacccaggctggagtgcagtggtgtgatctcaggttaccgcaacctccacctccctagttcaagcgattctcctgtctcagcctcccgagtagctgggactacaggtgtgcactaccacacccagctaattttgtatttttagtagagactgggtttcaccatgtttgaggccagactggtctcgtctcaaactcctgacctcaggtgatccacccaccttggcctatcaaattgctgggatcacaggcgtgagccaccgcrcttggccatgaagctttctttcatctctatgtttcagtgaattcagatgcattttaaaagagaggtgcggagaatctgacttacctaccatgaagggatcatcttgttatcaagaattagttaaaataattctctggtagtttaggctgcctacctcagaaagttatttgggaggattaaatgacataatccatgtaaaattcttagcatctttgaccccagggataagcactgcataaatgttcattattacttctactgctattattakttgtgttcctttccacctataacagtctccgtatttattcccctattcacttactgccttatagatgaaagcaccaggtatcagtaggtttgataattttagagaaatattgagctcacctaacatcttcctaaaatatgccttggaccctgctgcttgtctccttaataaagactagaagaccacttgtcacacattctataggagctctgtttggatctgcattttatttacatactatcattgttttaaaatctctggtctctgtcagattgatgaaggtttggaatcgagttttcattacctgtatctactaatgtcktttatgttcatttatcagagcattgtgcagtaacttccaaaataaaatggatgtgttaacttaggcacaacctgaagcagcaacggattttgagaaacaataaataacatgagttcttttgacatttttttttagtagcatcacttgagagaactttaatagcaccttggaaggaacccagcatttgaaatacatcatccctgcgacagagcaatagcattgttattcatcttcacttttgttctcagggttggaactgaggaaaagcataacaaaaacacatttcttttttaattcccagaaatatgctctcatttgtcttattaattagaagctacaatcaaacgctgggaaacaattttcaaagaataaagtaggaaatgtctggttttctgtggccaaatcagttttcagaatactctcttatcttttctagacagttgcccacctttttctgaggcgatgattgaaaagtttttaagtatttattaatcttactataccataatgaaaccgttgaaagacaagtttcatcttgctgtcaagaatacattatttgacttcaaccttaatttaatttgagaaagtgtgagcatttcttctttgttcagataataatattttattagagaatttcaaatattgaactgtagttacctttagtgatgaacaacctgacattagagctttctctatacattagcagagctgagacatgatttcgttcagaattacctggagttcactctgttcttgtaagtatgaatgagacctttatttttaatttgtgtgttgcttacctttctctagaactgctctctgatcattgcccttttttcttttaatgtaatttattattttttaataatttgaacttcatctagattcagtgggtacatgtatgggtttgttacgtgggtatattgcatgatgctgaggtttgggctttgactgatcccctcacccaggtcctaagcatagtgcccaatagtttttcaacccttgtcccccctttcccatccagtagtcttcaatgtctattgttgccatctttatgtccatgagcaccaatgtttagctcccacttttaagtgagaacatgcggtatttggttttccgttcctgtgtttgtttgcttagaatggtggcctcaagctgcatctttttttatggctgcatagctgcatccagctatgtgttctttttaatggttgcacaatattccatgatatatatgtactacattgtctttatccaatccaccactgatgggcacctgggttgattccctgtcttcgctattgtgaatagtgctgcaataatcatatgagtgcagtgtcttttgagtagaatgatttattttcttttggatatataaccagtaatgcaattgctaggtcaaatggtagctctttttaacttctttgagaaatctccaaactgtttttcacaaacgctgaactaatttatagtcccaccaacaacgtataagtgttcccttttctccacagccttgccagcatctgttgcttttgacttattaataatacccattctgcctggtgtgagatggtatctcattgtgggtttgatttgcatttttctgatatttagtgatgttgagtatttttttatatgtttggtggctgtttttatgttttattttgagaaatgtctgttcatgtattttgcctatttttaatggtgttattttttgtttgcttaacttccttatagattttggttattagacctttgttagatgcatagtttatgaatattttctcccattttttaggttgtttactctgttcatttactttgcttttcagaagctctttagtttaattaggtcccacttgtcaatttttgttttgttttgttgcttttgggacttagtaacaaattctttcccaaggccagtgtccagaatggtgtttcctaggttttcttctaggattcttactgttcgaggtcttacatttaaatatttaatccatcttgagttcatttttgtatatggtaaaaggcaggggtcccatttcattcacctgcatacagctagccagctatcccagcaccatttattgaatagggagtcctttccctattgcttatttttgtcaactttgctgaagatcagatggctgtgtgtagctttatttctgggttttctattctgttccactggtttatgtgtctgtttctgtaataataccaagctattttggttattgtaaccttatagtatagtttgaagtcaggtaatgtgatgcctctggctttgttctttttgcttaggattgctttggttatttgggctctttttttggttccatatgaactttagaatagttttttccagttctgtgaaaaataatgatggtatcttgataggaatagcattgaatctgtagattactttgggcagtatggccattttaatgatactgactcttctaaactatgagcgacaaggctcatgtatgatattttgatgcagatattagtgatgttcatgctggttctgggtttttaaaaattagtataaggttaaaattgctgtatggtattttttttaaatgaaccacacaggaggcttaatggcattgttcctgtrtagttactttattgtgtatagtaagaggacactgtacatgattacatgatgaattatgtattcccaatagtcatctataggcttaaagtgcttattttgccatatttaatttttgttaacaagaaatattgtagccctgagcataacaggaggtacctcctattggagatcagatttttatttagttctattaaagktttgtaggttctcagggataaaaatcaatccctttagttaaaaatcatacagaatcttcctttaactgttccttttgtttttaagttagaatcattttagccagtagctttaagtctcagtgaaaaaaaaatacatgttttcaatgtgttgtctacctcttcattttttgatagtttcctgtttgttcttgtgtacttttttggtaagtatacagtgcaataatttttagtaaatgaatataatagtgcatctacgacaacaatttggttttagaaaactttatcacccccaaaagtttacccatttgcagttaattcctgctcctacctccaactgcagccaaccactggcctactttcatctctatagatttgcttcttctactcatttcttacaaatgtcatcatacaattagttatctttctttttcttttggtttgccatcatgtttttgagcttatctgtagtgtagtatgcatcagcagattgttaatttttcctgatgaacagtattctattgcatagatacactacggtttgtttatccattcaccagttgatggacattggattttccagattttggctattatgaataatgttgcaatgaacattcacatacaagagtttgtgtggatatgttcccatttctcttgaactgatttgcagttgttgcatcatatagtaagtacatgtttaatttttaaagaagttgctgaactgtttttcaaagagcttatgccatttcccatttgactggcagygtaagaaggttcagcttttacactcacacctggtattgtcggtctttttcatcatagccttcctaatgagtgcaaagtggtgtcttaggttttaagttatacttccctgatgactaaagatggtaaacatcttttcttatactttttagtcattggtgtaatttctttagttaaatatgtaggcaaatattttgtccatacttaattgttgtttgctttcctattaataaattgtattaaaaatatacattctagatatgatattgtctttaaaaggtacttcctatgcagttgtcttttataatcttcaatttactgtcctttaaaaatatttatggagaaacttctgttcagaaagtttcattcatagaaatgtaagtctgggctttatcggtcracactgtttacatatttcagtatctccttcagttgcacttgactttatcctttctattgatatcttaggttgaaataacagttttcctctggatatattctgtgtggccatatgctggtctcgaactcttgacctcgtgatccgcctgccttggcttgccaaagtgctgggatttacaggcatgggtcgctgtgtccagccccgaagtactttcaaaacaggaaaagatatcaaaggcatggcaacataacacactaggtttcttttcttattattttgttayagttttacttttcaaggattttgagatttggtataattgagttccagaacttagacatcaacttagtattttttcctatagcaacttttgaatcatgacttaagctacagcatctttctttttgcaattgggttttatggtaatttctaattattataattctgatagaaacaattagctttacatatgctttgatagggcatcatccttgagcaagcacagaaaaaaagcagtattgagagacagtattgtgtatgattaagaatacagtctctgtagaatggcttgaagccgggaggcagaggttgcaatgagccaggatcgcaccactgcactccagcctggttgacagagcgagactctgtctcaaaaaaaagaatgcagtctctgtagcaggacttcccaacttcagactgttatttactagctgggtaaccttgagcaagttaactttttgaagcttgttttcattgccaacctcatagtcagtgggcctctcttgtttgttcccatttctttttaaaataactaccacattctcctgacttccacaaatatgtttactacttgtttcagttttatcactgaagacatatttaaacattcccttagttgtttttctcatttttaatccttagttttgactaagccttactccttttgttaaattttagtatcattattcttagagaaaaatgccaaaatattaatatttaaaaggcatatctgtctatccattagtatttatctgtatctatgtatcttaacatttctggcactgttttaagtgtcttccatgaaaatgttataagaaaggagtgaaagctgctttcaaatatttaaatagttatcatataaaaattagataaagtttttgtttcagaaggcaaaaccagtgtcaaagaatagatgttataagaaagtagatttggttaagaattaagaggaactttccaacaactggagacattaaaaatggagggagttgcctagtgaaataaaggtctatataatacttgagagttcataaagaaaatgaatgacagtcactcagggatattttactgaagattcataaagggaacccaaactttaaaggtaaataatatgatcacgttatttttgtaatgctagtttcaggaatagggagagtatccatattataaacattttgtgctattgtgaaaaaaaactttgattctgttttcttttcatagcagatatggtttaaccttaaaaagtaatgaattggtggagtagagagatttagaaaagctttgactatttagcaattcttcttctttcaaagcttagtacatagtggcttttaaaattcaactcaataaagtatgtttaaaatgctgcctgtatttggattccaagtttagtagacaatttctgctcctcaaaatgcaatgaaaacttgatttctatgatctatgatgaataataaaagctgcctttaaaacattttatacttgtaagagtgctttataagaaagccacttatttacatttttcagcctccatgaaattgaacctttaagaaatgctaaaatagtaaacaagtaattaggctatgagttattaacaagttttatttcagtttatttagttgttagacaaagctagtttacacatttctattatactggtggctaaagattatgatcacttattagagagatcagtttctattgtacttataacatgattcagaacccttcattctgtttaacagcatttccttattctgtgaagaaatgagtacagtttaccacattttatttttctgaaaataatcaaaatccaagtacagtcatacactacacattgatggtttagtcagattgactgcatatatgacagtggtcccataggattgtaaagccgtattttatcataccttttcaatgtttagacacaaaaataccattgtgttccagttcttacagtattcaggatagtcacatactgtatagatttgcagcctaggagcaataagctctaccatttagcctatgtgcattgtaggctatgcctctaggtttgtgtaagtataccctgttgttcatataatggtgaaattgcccaacagtgtgcttctgagatgtatttctcttgttgttaagtgattcatgactgtatttatgtttgaatcatacaataatcttggttcgttttccgtttttcctaatgaagacatggtggttttttttttttccttggagatacaggggggtcaaaaatctgagcatattgtaggtgacaagcagtggaagttgattccaaaactcttgctttttgaaggagaggtcaagaattatatttcttgtcagcacagactcatctgtgaagttgttgttggctgatgttaaaaatgcttgtaataacatgtgtaggttcttcaaaggattgagatttcaagcttacatgtctcaaaattttgagtgaakcagtgactcttttttggccattgaacaccagcttcagaaatccttccatccactgtagaagaggtgtgagggaatctctttctctctgtgaacatatatggagaactcatactatgatttatggcagcttgcattttcatatttttctaatttagatgttactatgaataaggtaggtgtagatctaacaatagaattgccataaacaggagttagaaattcttaacatcctacagtaaaagaattttgtgctactctgatacattttttaggtaggttataaattcttatcttactatcttaatatgactaattatgacagctatttttcagtagtttaattaccattctaccctgttctgtggttataaagacttattccaggccgggcgtggtggctcacgcctgtaatcccagcactttgggaggctgaggcaggtggatcaccaggtcaggagatcaagaccatcctggctaacatggtgaaaccccgtgtctactaaaaatatatttaaaaaaaaaattagccgggcgtggtggtgggcgcctgtagtcccggctactcaggacgttgaggcaggagaatggcgtgaacccggaaggtggagcttgcagtgagccgagatggcaccactgcactccagcctgggtgacagagcgagactctgactcaaaaaaaaaagacttattccatacaagagtttattattctgtgaaataatatatattattttatgtacaatgtttacattctatgtcaactcaaaaagaaaattttgtgaagtttgtgttcttatccccccagtttatagaaataaatagtacctaataaattatttatagttctcttgcttgtttctctataatcttgattttttttttgagacggagtctcgctctgttgcccaggctggagtgcagtagcgcgatctctgctcactgcaagctccgccccccgggttcgtgccattctcctgcctcaacctcccgagtagctgggactacaggcgcccgccaccacgcctggccaactttttgtatttttagtagagacagggtttcaccgtgttcaccaggatggtctcgatctcctaactgtgtgatccacccaccttggcctcccaaagtgctgggattacaggtgtgagccactgcacccggcctctaatcttgattttatgggattatgtatttcaaagattttacattttaccctgttaattttttttttgtttttaagtagatacgatttttaaacttgaatcttcaccactgaattacagaagagaatgcacaattgtccattcccttctgttatttagtggtgaagattcaagtttaaaaatagagaaaatagagaaaaaagattattgtgctgttcctgatggggatcattggacactataaaactgtgtttgattttccttaaataacatgattttggaaactttatatatggtttgatcactttagttttccccagacatttctttcgagtgaaccattgttttacagtgtgacctccggggcactgccgatactcggtttatggggctgcttctcaccactatcatataacaatttaaattaattaatttaaaaaatgtgttcggagccttctttaagtctaaatatagagtgtatgtctatctgctatgtttcccttaactactaatttgataattctaaggggaagagatgattcagtgggtctggtatgaactgttctctataatctgagcaaggctctgacctcatctttcctgaaggtggaaaaatggtctcataaatttctttttttttttttttttgagacagagatagagtctcactctgtcacccaggctggagtgcagtggtttgatcctggcttacttcagcctatacctctcaggttcaagcaattctcgtgcctcagcctcccgggtagctgggactacaggtgtgcacccctaggcccagctaaattttgtattattattgttattagtagtagtagtgaatacagggttttgccatgctggccaggctggtctagaactcctggcctcaagtgattcgcccaccttggcctctcaaattgctatgattatagacgtgaaccactgcgcccagcctagtctgataaatttctagatgtttttgttattatgtgtataaaaatggactgaagtattatttcctatctttacacttgttaattcttgactcattatacttacactctatttacttttacagatcatactatcataggtgagagggcttcctgggttaattttcaattatatttcctttaccccttaccctaatcagagattgctatcaccagaacgaatggtttatttcaaaattctacatttattttatttaagacatttcattccccaattttgtctatctcctttgtcattgtttgcatttaatgtttggattgatttttcttggaatggcataggtgaattgactaagacactatttttagcatattgtaagtttcagttgtatttttcaaaagcacactttatgactgggaagaagcttttgagtgttgatagcgtggagtctcaagattgcttatcagaccaaccgttaacttatttataaactattatgtattataatgtagacaatatatttctttatttttagtataaaatgtcaaaaatcattgtatttgtcttgccaaaaattagggtaaaaatgatcatctaagtatttattccacttatgtttctactagaattaatcaaaacacttaaaaatctatttttatttaacttgaattggaggcccagaatctatgacatcatttaccctttcataactgaggataatttaaaacagatttcatacctcttggtataaaactcacaggcagtaagagacagaagaatgtgctctaaaattctaccagtgcaaatataaaacaatgttttattacagcagttattctgaataattgatacagtttatcaaagtttaaaagtaatatgatttttctttaaagttagtggctttcagtttctggttgaaatctctctctctctttctcctctctctctgtctttctttctctctgtctctctctctctcttttgaaaactttttcaggattttaatggactttgataagtatggaatgcaaattaacctgataagcataatagtttcttcctaccctttcaaagattatgattattaaggtgatgatgatgatacatggttttgttttgttttgtttttttgagacaggatcttgctctgtcacccaggctggagtgcagtggagtaatcttggctcactgcagcctcgacctccccagcctcaggtgatttctcccacctcaggctcctcagtagctgcaactacaggtacgcaccaccatgcccagctaatttttgtattttttgtagagatggggtttcaccatgttggccaggctggtcttgaacctctgggctcaagcgatccaccctcctcgacctcccaaagtgctgggattacagacatgagccaccaagctgggcgatgatgtgtatttgttgagtgcttagtagcaggccctcttgtaaacattttatatgtattatcttatttgactcccgttgcaaatatgtgaggtagagacatactaaggcctacttcttggatgaggaaactgaaatacaaagagattaagaaaacttttctaaggttatatagctagtacatgccaaggacaatattggacccaaatggtcaggctctagatagagcctgtgccacaatgcgtggcctgaaataaacttcactagtgtattcttctgaaagaatatcacacaacatttattgcaaaaaagtattatgatargctctgtataaagttcttatttttatggagtctaggatcaattttgggaatgagatataaatatatgtagagatcatgattaatgcagaaggtataaagaagttgtccattgarctataatcagtgtgagcttgtaatgttcttcctttgagataarctgaattaaaaaatgttacatttaagtaattattttgcttgtcctatggacacaagtgtagattatagtaattgccagtagattatactactgacaatttgtaatttttaaaaatgttatgacaaaacatatgtgtactgcttctggaaaattgaaataagtttccttcctaccacctattctaaaatcaaataagaaaattcctaatatcatcttgattgctttatgtaacattcgtcaaagatttaagaatatatattttattcttataattttggtttatctcaatagatggatggcaagacttatctttgtcattttagttttattttacaaatggtcttgggaaaacctgtcagtttttaccccacgaaaatttcctctgatatatggtagttctttcaggttccagattagtttaatactttaaaacttctcaacctttgtctcataaggcttttattttattttataacctgttctgtctcctcatccagaataaatttatagtgtagtctattattctactccctattttcttcaatatagttttcatatattgttaccatcccccttttatatgtcaatatttgctaaagtaaaaattaaaaaaaatctttctcctaatgtacctttttgtcatatgtttwaaaaaaaattgctgcaatattgcattaaacttgtacataatgtcatattgacaatggcatgtttacggggatgtgtgattgtgggccttgcaaaggagtccttggagttcacctaggccagtcacatgtaggacacatttatgtgttgttttcatctttcatgtttttcagtcagacatgtagagttttgttcattattttatccctgacatttagccattgtctttgcatacagcaagtgtttaggaaatgtttgctaagcgagcgatctaaggattttgtaatttattctgttttgttgttaaggccaaactaggagaatacatgtgatagcattttaaagggcactgcttatgtaaggtattatattcgatacaattattcatccattaattagtgattacatttaaatgttcactgttaacataaaataatctgattacttaaacaatatttctccaatatacttgtcattataatctgcctggcataaattgcaaagaaaaccctaatgaaatcatttcctagtgggtccccagttttggctattagtccaatttcagtcattgcccataacatagcaattcaatgttattatatttccttttcattttctagtatgtttctacaacaggtagtccgaattttgacctcgagtccctagtcaccttcctttatcttctttcgttgccactgtcgcctgtgtatattcagtcagggttcagttcaagaccatttttgaacgtttattccattgcaagcacattgggagtatacatgtgaaatgacagatttccagtcctaaaggaatctcttatcattaactactcatatatatttaaattaaccactcatatatttattaaattgtgagtacatatatatatatatatatatgtagttamcaaagcactgaattaccattatttgagagtaattataataaggacaatttgaataaaagaaacccatgaagtatagattttttaaaaacatatatatatatatatgttcgtgtgtgtgtgtactcacaatttaataagagaggcatataaacaartatatgtatttatatacaaatatatagttgaatatatacatatatatttgtttctgtgtctgtcttttattaaattgtgagtttcttaaggacatgaattatatcctatccatctgtgtttctttagcacccagtacagtgcctggcataaggtagacattcaattgttgaattaagaaacaaagactttatcctatgtttggagggcacatataaaaatatttcatttataatcctcaattcaaagtcttctttcaccttaacattttaaagtaaaagggcaggtatttgtcatccacactttatagttgaagaaacagagagacaaatgttgtctgatttcccatatgctgtggtgctagcaccctcgtctgctgatatctcacttagaatcaatttcatgaggaaagcaacctaggcaaaaagctaattgtacaagtgttaaaagttcatcactttttcaaattgtatagaataaatgctttttgggggttgagctgatgtgcactttatgttaacattttacttagacaaagaaatgagtgactgtcttagtaaattcagtaattttattaattcccaagagcctactttgtactagtcactgtgttgtgccagatgttagagatatgaagatgaatacaacacatgttgttaatgggctttcactcaagtggaaggcaaaagcaaacacattgtggtaacccctaaaatggaaggggtttgtttgtttttttgcttgtttgcttgctttaccaagtgtttacaatgagcaaggccttggaataagcattttatagacacagttttatttactctttccaacagccctagggggtaaaattactatcgccattttacagacaagaaaattgaagtttgactattgtgttgtggggccatcgatgagtggacaattggttctttgtgaaggaattggagaaggaaactgggactaggagaatggtatggtcataatgggtcaaggaagagttctaaaagatttatttaaagcacatttytagtaaaagagtagcagtttttttttaaactagaattgttttagtcctttaatcatttttgaagccttttttggaccacattttgtcttaagatcacatgtctggcatggatccctgggaatatgcagaaaggacatcttagaatgctctagttggttagaagtgtggaaacagctgagggatttttctagtcaggtccagtaagagaagtgatgctgcaagttctggtcttggagcatttcaggatatgggaattgaattcagtgactatggaaataataatgagaaatccataaacaagttttaaaaataggtgacttccatgccctgtttttggcttttcccagggtatcatataattatattacattgcacatggattgagtaaggcagagtatgtaacagttgaccttatacaccctaatattttcactggctttagttcatgttgcaaatattgagttgattataaaatataaaaagaaaaatcaaaatgaggttcatcataggattctgaatgagacaatttcagagaaagcagagactccattgctttttattactagaatgtcattgctttccagtagctactgcattaccattatttgagagtaattattataaggacagttagaataaaagaaacccgtgaagtatagatttttaaaaaggaaatatgattttgttactgcgatcgactttattcagtactgtgaaagaaaccaacaacttaattttctgctgtttacttgagcttctaacaaaatggtaataagaagcagcttacaggggttgctttagtgtctatttaagtgtcatttgtaattataagatctgaatgataaacaaatggaaatgtttaaacaaatggaaatgtttaatccattaaacatggttcagtttcttttaatagattaaaatttccctcaaatcataatcatgtttacactttcaatgcttaataaatttacactccacccatgttaatgtattataaattttgagttggtggaatgtgatttaatacttaatgacaaaagccattagaagtttttctttttatcttttactaagtaatattttatacagacaaaagagtataatcgatatgtaatataaatgtaagttatgaagcataaataacgtaataacctgtgaatccactgcctaatgtaacagttaaaatattcccaattttatactggggaactccctgcatccactttcttcactttcttcccagttctgcactgctccatccactgaaataaccattctcggtttggtgttattgccctggtgtgtgcgtgtgtgtgtggtttttttttaatggcgttcccctaatgtatatatctgtaaatacatttgtttacttttacttgtttctaagctttataacaaatgtaattatatgtcagagatttttgaggttaggtattagctagtttatctattgcccaatgagtcaacctgtaattttttgaactgtggtttagcgcatctcaatttttaaagtgctttaacatgttttcttggacatcttcacagttgtccttgtgagtaaagcagtggaggtaacatctaactcacttacttttggtagataaactccatgaagagtaagctcagattttaagaaatgaaatrtggcttctctgtagtgtgaactcatgttattctcttctcttcacactgttctagccactctattttccttttatttcctcagatatgtaaaccttttttctacttcagggattttgcatatactgttcttgattcctaaaatactcttctacctctttttagcatcactaacttaatttttgtccttcagatctcaactgatatttgatttccttccttgaccacttcacctggggagtccacatgcctttattgtctattgttagttttccacattgcactatgccaatttttttccagcttgattgaggtataattgatgaataaaattatataaatttaaggtgtatgatgtgatgatttgatatatggatatattatgaaatgattatcacaattaaattagttaacacatctatcacctcaccaagatacctttttttgttattatggtaacatctaaaatctactcttttagcaaatgtcagtgtacaatacagtattgttaactatagtcatcatgctgtatattagattcttagaacttattcatcttaaaactgaaaaagtttgtagcctttgaccaacgtatgccaatttgtgattatatattcttatgtttcttcatgtttttgaacatgagcattggacaaaaaacatgagcaaacataacaatatataatcacgcttgttttttgtccggtgatttgactgaaagatccatgcaggcagagacaatgcctcctttatccaccaatatgtacctagtgtcttctaaaatgttttgcatataggaattcaataaatagataataaatgaatgtaattatagtctggtattaaagatgaaatacacagacaataattatttggctatatacctgggcagtatcgaatttaggttaaatatcagatttttaaagatgttgcccactttgaagttgtatatcccagaagatgataaatcaagattttattggctttctaatattgattatttgaaatgctaggtacattgtacacttgagtgggtaactaccttgtaattcattgactggaaagaaagataaaaagctgttaaccttttttacttgtcatgagatgaagtgtgcacaataaatcttttctgtctttagttgtttgcctgggtaagtgatctaatagattcacaggtcttgtcaccaataaattttgaaaatttcctttctttttttgtgaatttgaaattaatgtgacatgtgtaatgtctctgtgtgtgtaatgtctatgtgtgatgtgtgtgcacgtgtggaagagagaatttgtgtgtgtttatgtatgtctgatgtccatggcgaggaagaatatgcaaacaaatttgagttctgttgtctccttacaagtaaatatgtagaattatgcattgtttaagagtaggattttttaaaaaatggtgtgttgggtaaaatatttgctttcaaagagcagaattaaagggaaggcaaattggacagttgccaagtgctgcattcaatgtggggctctgcagtgtcactgcaaatgtaataaatagagaaaattgcatttaccacaattttttttcaaggagagaacacaggtggttgcaagtaaatctgtggtgtgctccatcataacagatagtccttacagtgccccccaaggagaactagtgaactgcaggcatgttttgcagagctgggcatgcaaacaggggcgttatacccttcgttctccttctctgttctacccagagcagtagttcctactaaatgcttaaagaatgtttaaattattttatgagaatttaaatttgaagaggaatcacattattgtctgcccatggtacccacttctccttgttgggctttgctaatttcttttttttttttttatactttaagttttagggtacctgtgcacaacgtgtaggttagttacatatgtatacatgtgccttgttggtgcgctacacccattaactcatcatttaacattaggtatatctcccagtgccatccctcccccctccccccaccccacaacaggccccggtgtgtgatgctccccttcctgtgtccatgtgttctcattgttcaattcccacctatgagtgagaacatgcggtgtttggttttttgtccttgtgatagtttactgagaatgatggtttccagcttcatccacgtccctacaaaggacatgaactcatccttttttatggctgcatagtattccatggtgtatatgtgccacattttcttaatccagtctatcattgttgggcatttgggttggttccaagtctttgctattgtgaatagtgtcacaataaacatacatgtgcatatgtctttatagcagcatgatttataatcctttgggtatatacccagtaatgggatggctttgctaatttctaagagcattgcctgatctatctggctgctgtttacctccaaccccttgtcttgtcactctgtaccataagcagtctcatccagctgccccaatcttgcatcttttcctaatatgctaagctccttctggttgccacagggcctttgaatatgctgcttgtttcgtctgaaatgctctttccctaactttttaaatggcttcatagtgctcagattttagcttaaatatcaactcctcagaggggcatttctcttgctctatgtgaaatagaagtagcccagtctcagtgctctgtttattttctttataacactactatctgtaatgatttgtttctttattgtcttgtgtcctcactaagatgttagtgacatgaaggcatgggcctaattgcttattttgtttttcatcttgtattcccagttagctcctagaacaacattttaattacataatagattctcattaaatgttttaaaaattaatttaggaatgattggtattcaattctgcaatttctagtttgtacattctaattttttatatcatgataatgttttatttctgcaagtgtttataaattttatgtaagttgtctttcatatgaaagagcagactcagcccaggttttcctgtgatgatgtcagtaatcaagatatatctggactgaaccaacgagtcagtttacttagcagtagataaaaacatgacagaaccctgctacgctaattggctacttattcttctttgatgtaaattttggtatactacctttatctaaaaaaatacatatatatctatgttcatgtgtacttcaaaactgcatttcactctagttaaaatatggctcacctggtttaagcacaatctttaagcaggaacatgaaggatatcttgaaatctcttccatatttataactgctgatatttgagagtctgtactacgatccaggcccagggctacctgctttgatttcttacttatatttaatactctcaacaaccaaatgagataggtatgattttatcaatgtggattagagagagtcagtaatttataacatttgttttacatatatagactgatagactgataatctgcaacccatgaaaattttggatttttgctaaataaatctttgatttttccctgaacaactaatagacaggattgatataacagctgttgtcatttatgattctcaaagtagtcttactatttaaccaaaaagtactttatgcttatgactaaattgtcaactaaatcttttgtctttttatgtttaatcaaaggaatactttgtaggactagtgtttagaaagctgtctttataatcagagtcacaaattagtgtgctgatgttagtgcattttgatcatgtcctttatgtatcttatccccttactttcccttgttccccttcatggattttttttttcttttctttacagtgagagtggcagtaaccatgacagataaaaatgttgtgtatatagaagctcctctatttcaggttaggtcccagaaggctgtttttcagttgttcttaaatccaaagtggcttaaggggtttcagcttgtaatgctcaaatgcctttccaacaagcagttatgagatttaaaatgcacaaatagtgtgaaatcttaaaatcagacawagttctttttcacttggtttacgtggctcatttatattaaaattgggttgaacgaagaagcaccctttttctatgatctctgtaagtaacttagaaatgcttcagtgactactgaatttacagcgagataatcaccatgtttccttcatgttcttgaataaactttttaccttgcccaggattaaaattaggcaatgttctagccacrttttacaaaatgtttttttatctcctgctgatagactgtcagttgcacaatgtggcacttttacatgtgttgtcgttttttagtggttgccctagatttttcaacccatatttccaactaatctaaattcactttcaaatgacactgtattgcctcgtcggtagtacagataccttgtaacagagtatgcccaatccctccctccctgtcccctataaggttgctgccattcttgtcacttatccatatgctttgatccacaggctatattcaggcaatacattgttactattattacttttaataaagttgtctatcaagtcagttaagaacaaggaaaatacaatattttattttaccttcattctttctccaactctctttctttcttcaaaaagatccaagtttctgatctgtataatttttcttcttcctgaagaacttttttaaacatttcctgcagggcaggtctgctagcagtgagtttcctgcttttgtttgtctgaaaaagtctttatttcttctttacttttgcaggattgctgtacatacaattctaggttggcgtttttttaaatttcaacataaaatgtttcagcccactctgttcttgcttgcattgtctgatccaagaaaagttgttgattttctgtttgttcatctttttttcttgttggaagatggagtgacaacttacaaggtcttcacatgttagagctgaaactagaagtccctttgtgacttactctttgtctttcaaaatactttatactgttgcaaaattccaaatacccatgaaacatttttactcttctcatattttcartttttaaaatattatctttatttattttctcttgtaattatttctcttctcagattttcaatttttaatatatttatttaattttccttgtaattatttccttgtgattattatttttatttttatttaattttctttgtaattatttctctttttaatgttgtatttgttgtatttgtacttactggacgtagcatggctagtgacattcttaaaatacctcaaaatcaaacatagaaacaccaagccaagtgaagcctgtttacaacatgttaaggtaactaaacatctgcctacttggctgttatcaccatttgttgatggcatcagagtaattcagtagctgaattttgtttgtctgcataaaaaacttataaagtagggtcactttcacattaattatgtacattaggagtggcactataaatggatatttggtgggagtaaatgaaggatagtgtgacccattaagttcaagggcatgtcactcagtgaaaatctgtatagatactgatatcttcatgtatgttaagaccccctagtatatgctcccatagtattcagtgtaatatacttactacacagttgcttgttttacttgcctgtctcccctacaaatagattttgctttctgtctcactggccctctctctcttttctccttccctccctgcctccctccctctctctctctctttctttttctttctttctttctttttttttttttttttgctttttcattacctgattgaaatcaatgacccaacaaacattagcactctttcagtctttagccaggttatgcttgatggttgccgattaacatttagtactttttctatgttgtggctaaggaacactttggccttcaagcataaggtattttcccctataggaaatctctttggcatttaattaagaataatttagtgggatagtcttgagtattttaactttaatgttgagatgaagcaagtcatgcttataaatttacatagcacattaggtctacatctgtctagcctcatttaggtactggatttgtattttgaagagctgtactttgatgtctatgtgtgctatagtttgaatatggtttgtttgacccttccaaatcctatgttgaaatttaatccccagtgtggcagtgctgggagatggggcttagtgggaggtgtttgggtcctggcgttggatccttcatgactgaccagcttggtgctttcctcatggtgatgagtgagttctcactgtattagttcccataataactggttgttaaagagaggcaggcatcttccccctctctgtcacttctattctcatcatgtgatcactgcacatggcagttctcctttccactaatggcagaagtagcctgaggctctcaccagatgctgatgctggtgccatgctttgtgtacagcttgcacaatcatgagccaaataaatctcttttctttataaattgtctagcttcaggcattcctttatagcagtgcaagcgaactaagacaatgtgtttgtgtgtttcatagattagtacaaattgtgttaaaatatttgattgcttttatatatatatatatawcttttgaaaaaaattccacaacataagcaaaacatcaacttacatttgtaactgtgtatagaatgctggtactgtgtctaaaaccaacatgttttcctaggtttggaaaatatcaccacagtgtgtttgctgaaggcaaatagtttgtgtttgtttgatacaaaatatttaatttttatgagagaatcagtggtagaaatcagtataggttttttggaagcaggcagatcaaactcctacttggctaacaatagttttcactgatgagctgattgttcttatgctgtgtagacagaactttagtcaaatagagaaacagaaggtttcattaaagggcacagttaacaattttctttttatacagcactgttcttttttctttataggttgatattttattttcattattatagcatccaagtgctgttagggcatagagaaatcatttcatctatttcattgacaggattgtgccaagcttattctcaagccttcataatgattgaatatagagaactgcacagttaaacctcaccccactgcagttttctcaaatttaaaaggaaaatttagtcgtgagtgtctgtagatggaagatactacagaatagagatttatactaacccctgaacctcgtagcactttatttggttctggggagaacatatttttttaaacaagagaatgcttatataggacagaggaaaaggtttgggttcagatggaattttggccttttctccatagatttgtttgaaaaatgctggaaagatccatgaaatagtaaatggctcaacaagtattttgaaatattttttaagtggcaggcagaattctaagttgtaatgtgtattgtatttgagacaatttaatcttatatttttgaggatggatttgcattgagaactggttaaaaaaaaagatgggagttgatatgaaatttaggtatgaattagtaagaaccagtgagttaatatgagctatagaatatagagaaagagttcaggtgattttcaatataaaacttatattgatttttattttcttttagcagctagtttgttggaggaatgtggcaatggagtacagatttcctgcagttttggatttctactcagactaattattagcaataaacatattagttcttccaaatattctatatggattcaaaaattagagcaaacaattggatgcaagtgattaattggaataccagaaatattagagtatttggttgttttgccatcaaaaatataatctaaatatgtaccataactttgaattttattttagaaacttctaaattctcaagmtaaatacaaatttgatatatttatgtatagttttcaatagtttgctttaaaaaggactttaaaaagcatgtatttccaaagcattgttcatgtttgtgcacacacaaaaataaggttcttccttcttgatagtagaacaaaaatattaggtgctgtgcatacaacttagtatcattttgtgaaactctcaggccttatatctcttgggattttaaaattgtaatttacatgcaaaatcaacctttgggcatttaaaggataattgtcgaatttaaggattacctaaatcctgtgctttaacttctgctgcttctgtttattgtttatttctttgctaattgttatcttctcagaggaagaagcggggaagaaggagagccttcaatacaaattagttaattttattactgatcgtattttgctaaagagtgtaaacaaaatgattaaagtgggtttaacatgaggtgtggctttcacatagtttttgttttccgtgttcctggatcatcaagaattttctcttactttgggctcagttttctagtagtcttcagtagaagtggctattgtgggaactttaaacatttttaatgcatttttatatatagtgaggttagctctaggtaaaaacattaaattgtacagcttgtattcagtatgttacccatttttcctaagagtttgtttttcttcttcaggttcctcttctcccctttattccttcccttccttcctccctctctttcttcctttaatacatacttactgaacttcaactatgtgctagaatgtatgtcttcatcttaacagtggagccctggaggaaatgttagttttcatggacaactaagggcacaatcagataactgcccatacattcagcggactggttttggtgcaagtgttaagtctccttctctcagagtcattatgttagctagggtaggttacattcctgtaacaaatataatcaacatgtactagcacaagcaaagttgaagtctttctcaggaaatagttcccagccaatgtttcaaattgggatgatgggggtctgtaagggaccaaggctgatgtatgacttcgtgggtctaagtcatttcggccaatgtaagaagatacaaagagtggagacctgagaacagtatgcataatttccattcacattttatagtcacatatccagactaactgcaagggaaactgagaaaaggaatataggcctgtgcctagaaagaagcggggaatgaattctgatacatgtacattgtcgtggagccatagtcatggatgagccaraactaactagtagttttcacaaagatattctggttttaatttaaaaaccttaaaaataagttctatgccttttttcctgtttacaaaaaaatgttcctagagctgcgtagtatacttattatatatataaacaatttagaagaatgctaaatctgcccytaatcacatagccaaggggatgttataatattgttgtatttttggccctttacatgcattttgaaatataatagggatcatactacatatagttttggattttttatttaaaactaatattttgagctttttccatgccacagatgtacgtgaaaacattatttactatggccctacagatttttgtcataaggatatactgtaacttaattataaatttattgatggaattcatattttcattctttagtgtaagtatgtttttagcgaataacttttatacataaatgcatacctgcatttctgattattagcttagttgacttggtgactcaaaggatgtgaayatatctacgtttcttaatatacactgttcatttgattttcaaagaatttatgccaatttaccttccaaagaccaggaatgaatgtgcccacaaagttgtgggcaattaccagatgacccagaaatttcattcttaggtattagcccagagaaataagaacttatgatcatacaaaaacctatactggaatttgcatgacagctttattcatattggctaaaaaccaaaagcaacccagatttccttaactgggtraatggttaaacagcctgtgttacatccagatggaatactactcagccataaagaggatggagctattgatgcatgcaaaacttggattcatctgtagagaattgtgctgagtgaataacgacagccctgaaagattagatactgtatgactcaatttatataacattttttaaattaaaaaaagaacaggttagtggttgccatgggttaaggttaaggggaggagcaagcagggaggtgtgtgattataaaggggcaacaccaggactctttggtaagggaacttttctgtctcttgattatggtggtggatatgcaaacctacacatatgaaaaagttgcagagaatgaaaagcrtacacacacacacacacacacacacacacacacacagatgagtaccaccaggaaaatcagatagatgatagattttatcaatgtcaatattgtttccaatgttgtagtacagtttttaaaggtgtaaccattggagaaatgagtaaagggcatccaagatctctgttatttcttgcaactaactgcatgtgaatttataattatctsaaaataaaaagtttgattaaaatgtagtgcacaaaatttattatatagcttattatcttttatataataaggttctgttgtttgatgatgtaaacttttctgtaattgtaattaggaaattatccctttcattcattccgcactattcctggttggtatttaaatgttctgagaccttttcttgtttccmtgcccaaattttcttcttttactttttagtaattattgygtacaacagcaattccaaaaatatttcttcaccttcttctagcctttttgtggaacatatgatcccaaatatttcattgacctattttgtagggtagctcagaccccagcctattttttacatttttatttttgttttctttaaatgtaattgccaaaggatttctggaccagccctggttgatttagtgcctaaagaactggtcgtacctatttatatcctcttggtcaataagttatgctgttaaagtgttcttttattttattacaaaaagaatctgattttattcacttttttatttaagagttgctctaaataggataattgagtaatgatattcctcacatcttcagtttaaaaccctttatcatcctctctctctgcaaagtcctttttttctttattcatatgttatttatcacttgtttttttgtcaccggctctcactccaatactcccactcaattttctgctttatgtataggtatatccttgtaaaatttgtaacattttgcatgcatttcacatttacataaatattattgtgcctatatatctttttaagtaatttagttatataaagatctctattctacataaatttcatatgtttgttgagttcttcagaatattcaactagaattttgattaagactacgttatatttatagattaatttgagaaaaattgagtttttcactatgtttagtgcatgcctagtaaagaaaggtctaatgataagcagtaaaattgataatatctacgtttcctttctcttttaagattttaatgagggaccccaatgccatttgcctaatatctctttgatggtgcttttagtatccagactttaattatttttactacatttggtgtacatgaactaatatttagatgtgtgttatactactaacactgaagtttctgttataatcctaataaagttctttcattattgtatttggattgtgtaattttcatttgcagaaatctgccagaaagatttgaaactctatttatatcttcttgagattgtgtggataaacttacatgcataaagataagaattgctgtgtctccatgcacacatatgtttattgcggcactattcacaatagcaaagacttggaaccaacccaaatgtccaacaatgatagactggattaagaaaatgtggcacatatacaccatggaatactatgcagccataaaaaatgatgagttcatgtcctttgtagggacatggatgaaactggaaatcatcattctcagtaaactatcacaaggacaaaaaaccaaacaccgcatgttctcactcataggtgggaattgagcaatgagaacacatggacacaggaaggggaacatcacactctggggactgttgtggggtggcgggaggcgggagggatagcattaggagatatacctaatgctaaacgacgagttaatgggtgcagcacaccagcatggcacatgtatacatatgtaactaacctgcacattgtgcacatgtaccctaaaacttaaagtataataataataaaattaaaaaaaagaattgctgtgtctcagccatagctagaagaatcccagacaaatgaattgtcaccctaaaaaaagacatcagagaaaaatatctcctaatacaatgaatgtatttgggagtaagcaaaaaaaggattcaggcacaactatggcaagccataggtgcacctgaagaggggagtggaaggggaagcttttatttggcaaaaagaagttaatataagctgcttggaaacaacagttctttggttcaggaggctcagaaatggagttggtgtcagttcatcagtggagctgctgttactaggcaagtggtctttttattttaaatttaagttctggggtacatgtgcagaatgtgcagttttgttacttagatatacacgtgccatggtggtttgctgcacccatcaacctgtcatctatattaagtatttctcctaatgctatccctcccctagtccccaaccctctgacaggccccaatgtgtgaatttcccctccctgtgtccatgtgttctcattgttcaactcccacctatgagtgaggacatgtggtgtttggttttctgttcttgtgttagtttgctgagaatgctggtttccagcttcatccatgtccctgcaaaggacatgaactcatcctttttatggctgcatagtattccatggtgtatctgtgccacattttcttaatccagtctatcattgatgggcatttgggtcggttccaagtctttgctattgtgaatagtgccgcaataaacatatgtgtgcatgtgtctttatagtagaatgatttataatcctttgagtgtatacccagtaaccggatttctgggtcaaatggtatttctggttctagatccttgaggaatgggtgaacacccacaatggttgaactaatttacactcccaccaacagtgtaaaagtgttcctatttctccacagcctcaccagcatttgttgttgcctgactttttaatgatcaccattctaactggtgtgagatggtatctcattgtggttttgatttgcattkctctaatgaccagtgatgatgagatttttttcatatgtttgttggctgcataactgtcttcttttgagaagtgtctgttcatatcgttcgcccagtttttgacggggttgcttttttcttgtaaatttgttgaagttctttgaagattgtggatattagccctttgtcagatggatagattgcaaaaattttctcccattctgtaggtttcctgtttactctgatgacagtttcttttgctgcacagaatctctttagtttaattagatcccatttgtcacttctagcttttgttgccattgcttttggtgtcttagtcaggaagtccttgcccatgcctatgtcctgaatggtattgcctaggctttcttctagggtttttgtagttttaggtcttacgtttaagtgtttaatccatcttgagttaatttttgtataaggtgtaagcaagtgttcttttaaaagcatcttatacgtgttgctgcagttctaaagaataactagtgataaaccttgtcacagaaatctgtacatacatgcaaaacataggtcatgaaaagcatgagctgcattaaggacatgaaggaatttctcatggggttattttaggaagtttttgagatagttcttatctcagacatgtgagcatgagctgccctcctttgtgctttcctggctctaatttgtttagaccggccatgagtgattccatcctggtatctgcaacttcacagggtcttggcttatttgggcttcttttctgtcagtgataagtgcttgatcccaattctctaagtgatatggactgagttgtgttgcccccaaaagttatgtgttgaaggcgtacccttcatgtaactgtattggagataaggactttaaagaagtgattaaggttaaatgaggtcataatgttggagccctggtctgatagaactggtgccctcactagaacctgacaatgctaccatctgatcttgtaactttcaacttccagatatgtgagaaaataagtttctgttgtttaagccacccaatctatgatattattgcagctttatctgactaagacactgtctgacattagagtgattgtcatattaattaatgctctgggagatagaattatgagtcagctttctattagaaatgattttataacagtctatttttgttctagggtgtttaggcattaaataaagtaaatgatccattggttgtatctttccatgtttgccgactcttaatgaactacatgaaatggcaactaccttttctagccacctcagtgccttacattcatggttaggcattatgcatcatttcctgtcttttctgacactcaggatatgaaattattttgccatgtaattcaattaggtcactgaaacactttgtgagttagacttctgtaatgcaaaatmgtgttgcttatatatcttcattttttttcagagcaggagtcatttcaagagtcagaactacctagaaagtaagataattacacttaattattttttaccaattggcatcatactttttttcctcaaggagtcatgtcatagcaatctgatgtttctcctctctgtttttttttgagctctcactctcagattgaatatattaaagttgtagtagattttggacctaaataaaatatgtattttctcataagtgtgggaagaatttttgtcttttatttagcttcatttaacatctacctcagtgcctgaaacattttaggagactagatggatagatatttgttgtacattaaaaaaagctttaaaaagcccatcgtatcaaaattaattcatgtaaaaatttgaaacactctgaaattgattgttaagtgctcctcaaagagtaattttggcaaacatctccaaagaagttcatgaaaacttctgagttactgagacatagatgtttactaacacagtaatcagtggttacacattctaaacatttaatcaatgtaatggaatattgagataacattataggaattacacaattccattgtcattgtatgtaaggaaaacagtgaaaacttcttatgataaacactttcagtatgttacttatctccattttggatgagatacaggccaagtcctatatatattttgctgctttgtggataattagccgcagctttgttcagaaaaggtggaggtaagtgaggaataggtatcagacatctatatattgttttataawtttttttgtaaaacattattatcagtagctctggctttgtggctgctgtcaaataaatttggttacttataaataactttaggttagactatgatagctatgagaaatttgatggctttctgtttagtgaagcagagtataattctggttattccaatgtcctttatttagccacaggttgtgatttaatgaaaggtttaggagctggattggaaaaatacttcttaccttctaagaaaatgttccacatcagctatgttatctttatattattagctgggaattatgagctgctatgttgctactattcttacaagaaggcttgcaagcagttgtagacaattttattttttgtgaccattctgtggcttgatggtaaattacaagagaggtaataacacttcacagaaatktctttatcactttctatcatcttccctgcccttggcagtctcctttgctatttagatgacaatatatactcagagtttgtattttaaaaagcatgactctctgttcggatagtatctagcaatttgaaaccagatagcaaaatcattttaaaaaaccccagctttcgtttgaatggttagctacagattcaaccagggcctgaggactatgatgccttaaagtggaccctgaccaaagacttcaaggtaaattctatgggtttattagttgtcttggttttatgttttggtggaatataatccacaagacatgtaaagctgmaatgtaatataaagaaattccatatcattgtttctctagagatagttcagtaaaggtcaaagtaaattgaatcaagatagtgaggcaatacagttgaactgagaaaattggatgtggccagacagcattaaagaagagtagaatgaaattgactggctgtgaaggcttcagaaattggtgatgagttttttttttatcatttcagaagatgtaataattattagataatatttatttagcattctgctgttgggactttggtggcatctttaaaaaaagattttacatatttattttatccttagaagtttacattctaaagaataaaatcagtgtttgagcacagtaagtcattggacatatttgaagttcagttagagttcttatatttgaaaagttttgcaagacatagattcataatcaagaggcatgtactgtcgtcccttggtatctgtgggagattggttccagggcctcccatgggtgccaaaatccacggatgctcaagttcttgctgtaaaatagtgtagtatttgcatataacctatkcacatcctcctgtatactttaagtcatttctagattatttataatatctaatataatctaaatgctacrgaaatagttgtattgttagggaacaatgacaaggaaatagtctgtacatgttcagtacagaaacaggtttttaaaaaatattttcagactatggttggttgaagctctggatgtggaacccatggatgttgatggccgattataaatactttcactattatgatagaaaaccagcagcatgtgttgatatagaagctgcaggagatccagaagatctagctaagataattaatgaagacagctacactcaacaaaatattttcattgtggatgaaacatccttctattggaagaagatgccatctaggtaggactttcatagctagagaggagaagtcaaaacttcaaaagatggtttctcttgttaggagctaatgcagctggtgactttaagttgaaaccaattttcgtttaccattttgaaaatccttgggttcttaaaaagaatgctaaatctattctacctctactataaatagaacaacaaagccttgatgacagcacatctgcttacagcatggtttactgaatattttaagccaagctttaagacttaccgctcagtaaaagagattcctttcaaaataatagtgctctttgacaaagtaaatggtcacccgagagctctgatggaggtgtacaaggagataaatgttgtttgcatgcctgctaacataacatcatttatatagcccatggatcaaggagttatttcaactttcaagtcttatgatttaagaaatacactttggaaggctacagctgccatagatagtgattcctctggtgggtatgggcaaagtaaattgaaaaccttctggaataaagccgcaataaatatacatgttattgcggcactattcacaatagcaaagacttgggaccaaccaaaatgtccgtcagtgatagactggattaagaaaatgtggcacatatacaccatggaatactgtgcggccataaaaaaggatgagttcatgtccgttgtagggacatggatgaagctggaaaccatcattcacagcaaactatcccaagaacaaaaaatcaaacactgcgtgttctcactcatacgtgggaattgaacaatgagaacacttggacacaggaaggggaacatcacacaccgaggcctgttgtggggtggggggagggaaagatttaggagatatacctaatgtaaatgacgagttaatgggtgcagcacaccaacatggcatatgtatacatatgtaacaaacctgcatgttgtgcacatgtacactagaacttaaagtataatttcaaaaataaataagaaaaccttctggaaaagtttcatcattgtagatgccattaagaacattgacgattcatgggaggtggtcaaaatgtcaatattaacagaaatttggaaggcattgatttcagttctcagagataactttgagggcttcaggattttagtggaggaagttactgcagatgctggtgaaaatagcaggaagactagagttagaagtggggcctgaagatgtgactacatagatgcactctcacagtagaacttgaacatatgaggagttgattcttatggatgaacaaagaaagtggtttcttgagatggaatccacccctggtaaagatgtgtgaacgttgttgaaatgacaacaaaggatttaggatattacataatagggcagcagcagggtttgagaggattgactccaattgtgaaagaagttcctctgtgggtaaaatgctatcaaatatcattgcatgttagagagaaatctttcataaagtaagggtcaatcaatatggcaaactttattgtttcaagaaattgtcagaactacctcaaccttcagcaacaaccctctgatcagttagcagccaacaacagaggcaaaacctacaccagcagaaggattacaagttgctgaaggctcagataatcattagcatttttagcaataaagcattttaaagtcaaagtatgtttgtcgcttttttagacataatggtattgcacacttaatagactacagtatagtgtaaacataatttgtatatgcactaggaaaccaaaaaaattcatgtgactccctttattttagtattcaggaacctaacttacaatatctctgagctatgcctgtacagaaaaactggatatatagaagatagtttcagaaattattcagaaaaggaagcttatcattagaaacacacgagtcttattcagatttactgcagatattacatgcctattcaagtataaatatgtttacttcgttaaattggcccacgcaattatgtcttttagattaataattatgtttgttttgtggctgggagaggtggctcatgcctggaatcccagtacattggaaggccaagtttgagaccagcgtgggcaaagtggcaaaaccccgtctctacaaaaaatacaaaaattagctgggtgtgggggcttgcagctgtagtctcagctacccaggaggctgaggtaggaggctctctggagcccaggaggtggaggttgcggggagcagatatagtgccgctgtactccagcctgggtgatagagaagaccctgtctcaaaataataataacaataataaaattatgtttgttttgtgaaaacatttttgcagttatcaggcatcttacattgattggctacatatattatagattgttttttttttttttttttgagacggagtctcgctctgtcgcctaggctggagtgcagtggcctgatcttagctcactgcaagctctgcctcccgggttcacgccattctcctgcctcagcctcccgattagctgggactgcaggcgcctgctaccatgcctggctaatttttttgtatttttaagtggaggcaggatttcaccatgttagccaggatggtctcgatctcctgacttcgtgatctgccctcctcggcctcccaaagtgctgggattacaggcgtgagccaccgtgcccggccatagattcttaatgtagggcatatgtgtgtgtttcagaggctctatgaaagccctgcattattaatatgcaaaatttggcataggattctttttctgggatgaaggttcatcagattatcaaaagaatttcttggaaatacttagtctcaattattttgtaattaaagaacaactataaatattttaattctgtggggaggaaaatatgatttttaatgtaagttagactaaacaacaggttgcttgaattttctctctgtagttgttgttctgayattatgtagacaaaggctaagtcctttaattatgtctaaattaatttacaatacatgaaattcacccacacttgttttatttatctctccatggaaacagcatgctttgagctgctactaaatatttcatatgcaggctatttatacttttatatttaaggatatattctttagactctattatttcatttaaactgtttctggaaatgcagtaaagtttaatattctttttaaaatgcattttaaatgagtcagcttttcattgtatggattgatttccttgccatcattcactatcgtgttttttgtttggttgtttcctaatgttatttcttaatatcttcctcttgcaaaaatttctcactttgggggcctcattacaaagtattttctatgtacatgttccaccagattttaaaaattttaatttttaaaggtataatttacatacagtcaagaacccaaatcttaaatatgtggcttaataacattttaatagttttcatgttttcgagtagttttaggttcacagcaaaattgagtggaaggtacagagatgtcccatataccttctgtctcttcaacaggcatagccttctattatcaacattctctaccagagtgatacatttgttacaattcattaacctacactgatacatcattatagtccaaaattcatagtttaaattagagttcacttttagtgttgtgtaatctatgggtttggataaatgtataatgacatgtccaccattatagtatcatatggaatattttcactgccataataatcctctgtgctctgtctattcctccttccctaccccttaaccccagatagcagctattgacctttttactgtctccatatttttgttttttccagaatgttatatagttggactcacacagtatgtaaccttttcaaattgagttctttcatttaattatgcacatttaatttttctgcttatcttttcatggcttgatagcttgatagcccatttctttttagcactgaataaaatttcattgcctgcatgttcagagtgtatttactcacctatagaaggacatcttggtwgctttgagttttggcaattatgaataaacctgctataaacatccattgtgcaggtttttgtgtgcatacatgttttcaacctatttgggtaaataccaagaagcacaattgctgtatcatatggtaagagtatgtttagctttgtaagaaactgccaaactgtcttccaaaatggctgtactgcttttcatttccaatagcaatgaatgaaagttcccactgctgcctacccttgtcagcatttgatgttgtcagtgttctggattttggccattctcataggtgtgtagtggtatctcattgttttaatytgcatttttccctgatgccatatgatgtggaacatatattcctatagttatttgacatctgtgtatcttctttggtgaggtattttttaagatatttgttctgttttttaattgggttgtttccctaatattgagttttaagggttatttgtctattttggataataaccagatatgtattttgcaaatattttctcccagtctgtggcttgtcttttcattctctttatattgttttctgtggagcatagatttttaattttaatgaagtcaagttcatcaatttttttaaatacatcatgcctttgtcatcttatctgaaaagtcattgccaaactcaagttgttctatattatcttgtatgttatcttccaggaattttatagttttgcatttaacatttggtctgtgatccattttgcattttttgtgaaagatatgaggtctgtatctagattcaatttttttttttgtaattygatgtccagttgttctagcaccatttgttgaaaaaaggtatcttttyttcattgcattgcttttgctcctttgtcaaagatcagttttactatatatatatatttgtagttctatttctggggtctttattctgttctattgatcaatttgtctattcttttgcaaataccactctattttgatttctgtggttctataataagtcttgaggttgggtaatgtcagtcctccaactttatttttctccttcaatatcgtgttgtatatttcaagtattttgcctacttcatgtaaacgtaagaatcagtttgttgatattcccaaaatagtttgctgggattttaacagagatttcattgaatctatagagcaagtggggaagaactaatattgtgataatattgtatctttctatttatgaacatagactctctctccacttatgtagtttttctttaatttctttcatcagagttttgttattttcttcataawgatcttgtacatattttttaggtctataagtattttattttggggtatgctaatgtaaatgtattgtatttttaattttwaattttacttgttcagtgctgttatacagaaaagtaatgggattttgtatattaaccctatacactgaaattttgctataatcattttattagtctcaggaatttttttgttggttcttttgaattttctacatagatattcatgtgatctctgaacagagacagttttatttcatcctttccaatcactacacctttttgtcctagttcatttgttctgtgataacacagtcttgataatttatgaagaacagaaatttatttctcacactttggaggctgggaaattcaagatcaagacagtggcaggattggtgtctggygagggatgctctctgctttcartatggtgcttccaatattcctctttgagaggagaagaatgctgcatcctcatgtggcagaagggatggaatagcaagagagcacttttttcacccttgagcccttttataaggatgctaatcccattcatgagagtggattgtgagataatcacttccaaaggccacacttcttaatactgttgcattggagattatgtttcaacatgtattttggagaggaccacattattcaaaccatagtaattttatttccctttattattttattagctaggacttcagtacaatatttaaaaggagtagtgagatggtacattcttgycttgctcctcatcttagtgggaaagctrgttttttaccattaagaataatgttagctgtagagattttgtagatattctttattaagttgatgaagttccccttyattactagtttactgagagatttaattgacgttggattttgtcagatgctttttatgcatctgttgatatgatcatgtgatktttttcttctttagcctattgatgtgatggattacattaatttatttttaaatattaaactagacttgcatgcttgagaaaaatactacttggttgtggtgtatacttacatttatacattcttggatttgatttgtgaatatatacgtatatgtgtgtatatatatctgtatatatgtatactatatatatatattttttttttttttgagacagagtcttgctctgtcgcccaggctggagtggcacgatcttggctcactgaaaccttcgccttccaggttcaagcgattctcctgcctcctgagtagctgggattataggcccaagccaccatacccggcttgatttgtgaatctattttgttaataatttttgcatttatgttataagatatatcagtctgtcgttttcttttcttgtaatgtctttgtctggttttgttattagggtgatactggcctcagaatgagttaggaagttgtattagtccattctcatgctgctaagaaagacatacctgggactgggtaacttataaagaaaaagaggtttaatgaactcacagttccacatggctggggaggcctcacaatcatggcagaaggtgaagcaggaacaaaggtatgtcttacrtggcagctggcaagagagcatgtgcggaggaactgccctttataaagccatcagatcttgtaagacttactatcatgagaacggcatggaaaaaacctgcccccatgattcatttacctcccatcaggtcccttccwtgacacatggggattatgggagctataattcaagataagatttggtggggacacagccaaaccatatcacaagtattctcatcacttctatattatgggaaagatttagaaaaatggcatggtataatttatttcttaaatgtttggtagaattcactagtgaactcatctggcctgggtcatttctgttttggaaagttattgattattgattaaatttatttaatagatatagagctttacagattatcttttgtgtgagattcagcagattgtgtctttaaggaattgatccattttatctaggttatcaaatttgtgggcatagagtatttctttgttattcttgtaatgtccagagaatgcatagtgatgtctccttgtttattttggtcttattaatttgtatcccttctctttttttcttagttagcctggctagaggcttattagttttattaaccttttcaaagaaccacgttttgttttcattgacttttctctgtttatttcctgttttcaatttcataggtttctattctgactttatttcttttctcaggccgactttgratttaattttttcttctttttgtagctttctaaagtgaaagcttaggtaattgatcttagatcttttctccttatatatgcattcagtggtgttactctctttgcactctttcactgaatcacaaattttcctaagttgtgtacttatttttatttagtcaaaaatatttttatatttttattcagatttcttttttgacataggttattcaagtgtttggggattttttagctacctttctgttactgactcataatttaaccccatttcaagacattgtaagacttctagtcttttgaatttgttaaagtgtgttttatggcccagattgtggtttagcttggtgaacattccatgtgaacttgagaataatgtgtattctgcttttgttggattaagtagcctttagatatgcattatatccagttgattgatgttgttgaattcaactgtattcttactgatgttctgcgtgttagatctgcccaattctggtacagtggtgttgaagtctccagctgtaatagtggattcctctatttctccctaaacttttatcagtttttgtctcatgtgttttgacactctgttgttcggcacatacacattaaggattgttatgtctttctggaaaattgacccctttatcattatgtaatgaccctcttcatccctgataactttacttactctgtttcttgacctgttgggtatttctcttcctccatgcggaaggctagagttgattggagttgggtatttcctttcacctgggtcagttaggctctgataaaatcctagtaggataggcagtgattacatatattctcctgagggcagacatttttgagaagtacaaaatgatctggtgtatttctaaatgggtcttttcccccttcccttgtgggaatcataagggaattttcctctagtattcactgtgagaagctagtagagctccatgaagtaataatcacaaaagtgtgcagtctccgggatgactgggtgcccctggagtttttagtctctcagacttgtcgacaccgagcctccagtaatttgtaaactgctgttcaggtttctctactgtggcactggttcccaaggacgtttttgcttgtgggctgctgctccagtaagtcattattctctgtatctgcctgtctttctctccagttttaggggcagtggtttgcccagtgacatcatttctcttatagatttaagaagagttgctaatttttcagtttattstgctttttacttattgttaggatgaagtggtgacttccaagtttcttacatgtgggaccagaaactggaggccaccaccatatattttaaaattatatagttatgttgtaccctataattttrtatttcagtataggtggtatatatatatttggcctatgtgtgacagaaataagaaacaaacagaatttattggattatttatttccccaatcctttaagtttttttttaaagactaaattattttctctttccttccatgaaattttgtacattttgatttcagcaagatgcctttaaccaacatgtttttgattcagtggttacaaatagatatgtgctacttgcctttaaagtcaagttaaagtcctttctggcttagccaaaaattatgtcatatatatgacgctagttccctgggactgaggagatgtttaggatgatcttgtaagatatttttctcgttttgatttgcacacttgaaatatcaaaaagaacagatacctttaaagctccccttaaatattgttcctgacattttttgggaagaagattttcctatgtgaacatctttccttgcaggaaacttttttttgttgttgttattgctaatgttgccttataaagaaatacatccgccccacttttctagtctctaaacacatttaatggactggtgaactaaatacaattatttaataatcacttctaggaataattacttttcagtgttggaaaggactttaagaattcycttgtatgtaaataatggctttaaccaagtttgctgaatacaagtttcttgcaaaccccaaacattttctacacattggataattttcatkccaagacccccatcacacaatatatttttacaatgacttttaaagcattctttactacaaggaggaaataaagaaatttttgaacatcatttactaaaatcaggaaaaacgatacacaactattttttggaacattctttgttgaaggaggaagggcaataaataaacttggaaactcctgtgggtgcgacgctagggctagctaacttgatataagttgtaagaacaaaggtaggaagattgacacatttcaggactgggacactggcaagtttttgggaaagtaaacatatcaattaaaaaagaaaagtaacagttctgctataatttctggtcttagttgaaagtccagaaagcaagaaattattacaaaagttcaattataatctggctaggatgatgaccgcaaatatattacaggcccagaatatgagagaaagatctgaaaatgagagatagcattggtcaaagggaaatggccctaaatttatagttattatttactgtgtcaccatagacagctgtatatgctatgaacaaaccatttggaaaatggaataagcaacaataaataaataattttttaataaataattttaaaatgccatttacaatagcatcaactactgtctgggaaatacttaggatgccaatacctaaaataatagatgttcaagtcctctataccccaaattgcaaaattttgcagagaaattaaaggagacttaagtatatattgaaatatactatgttcatggatttaaaaactgtcattgagatgctatttctctacccactgatacataactccagtgcatcccaataaaaattcagctgcatttttgtagtcgctgctgtctttagaatttaaatgagaatacaaaatgcttaggttagctaagacatttcttcaagaagagaacaatgttagagaacaagcaagacccaagatttactataaactggcagtaaataacacagtatggtattggcataataactgatagattagtggaacagaatagaaagttcggaaataggttcaaatatatattgatttttgacaaaggcaccaaagcaattcaataaagaatagaagacctttacattaaatagtgttgcagtaactgagtatttatatggaaaaacaaacttgaacctatctcatataaataaacaaaaattaattcaagatggatcatagacataaatacagcttctagagcaaatcacaaaatatcttcaggatcttgaaaaaagcaagacatttttaacagaatatagtaggcacaaacaataacagaaaacaattagaaattaaatttcatcaaaattaaatattttcttcatcaaaaggcagaaagtgaaaaggcaatccacagacagggagcaaatatttgcaataaatattcctgacaatagacttgtatctagagtacataaagaattactataaatcaataaaaagacaattcagtttaaataaaagcaaaggcttgatcagctattttttaataaatggacaaaaaagtatagaaaaagatgcttacattatcattatcaaaaaatgtaaattaaaaccacagtgacataccactaccaatggctcacattggaaagactgacaatactaaatatcagcaaggataaggagcaaattgaactctcttactttgctggtggaaatgtaactggtataaccattttgcacaactatttggcaatcactagtaatgttaatcatacttctaccctatgacctaacaatttcattaatgggaatatactgaagggaaataggtaaaatgctcataaaaagatttgcacacaaatatttctaacagctttatgaataacttcccaaaccaggaaaccacccaattgctctttaatagggtataacattataatgttctctatttatattttgtcatcattgcaatgtggtggaacttcagtagtttctctaggcttaaacttaaagagtcatcttgaatagaagtctaatgytttttaaatgatattttctgcagtgtttatgcagtacagtgagctgtgaagattgcagttatatccgaggtggttgtgtgtaatcaactagatgaaattttgtgtaaaaattgattggatagcataatctcctagtggttctattctgtggccagcaggaaaaattttggtaagtgtggcaggttaaggtcatgaaccgtcacatacaggaagaagtcagaatcgtgaatttcccaaatagtgagtasagaaggcatgtagcaatggccatttactgagccttcttgactagaacttaagtttcaggtggaagaagtaaagtcagtcaaagagccagaaccagcatcctgaagagtatcagcagaacatcaaggaagggttgtgctactgttttcctcttgatattattataggtagtgagattgtgaagcataagaaaggagaagttacttaaattagctagaacaggttgctggttatgcaattacaagtgcacttaagactagagaaacgtttactgaagagttgggttttgatgaagtacccttatagcatatagataataaattcacagattttgaacttaaagcaaggaaaaacatacagtagcagatttaacgggcaatgaagataagataacaatttattactacttaactggaatacttaaaatcagaagaaagggcagcatgggccaggtgaagtgacaaattaggtgaggatcttcaaatacactatacagagatgcatcattttagtaatgtgaaggtctgagaggttaagagatttattaattatataaggtggactcttagtacagaagtttttgcaaacttgcaattttggtaattgcttttctattataaataaaaatcagcattaaagaaccctctgaaatacattaagttgcgtaatgccaaaaattaatatgctttatcacactgaaggaccttggttgtaatataggcttcagtttctttagacacctttttggcaggtatgtaaagccatatgcacaatatgtagttgactgatactgtgaaatgactggaattttattggacagtgggaggtgaagcagccaagacatataatagttttgcagacatctcaagagatttcaaaatgaagaaaaaacccaaaagttttagcacttgtgtaaaataaaatcattttttatctttgctctgaaatttcttcaggtttcaaaggtcctgtaataaatgtgttagcactggatttttccttgctgtggragtgagctgtgagacaattgaaatagattttggaatgcttgagacgtgaggggttggatttaagcagatctgagataggaagtcaggattctctatggtctcttcagaagtttatgagactctgttatgtggtcatttattttctgtcatttgacttttgtctgatttgtcttgaagcttctatctccacaacttttctgggcacttttttaaacacacaggaacttaycttggagaacatttttwaaaaatataccaaaaatactgtgtctaaacttctgagaatgtataatgtgattgtcttctgaaaagtaggagttaaagtacgtttttatccttgggaatattgttaaatgactaatagaaagtggaaacctggaggcatggcaacgaaaagtcatttaaaggaaccagtttttatttatgaaatgcttactatgttaagagatacagtgcattgtaatttttttaatctaatggacaatttttaaggttttttttttctaaatagagaataccggattaacctataaccttctaagttgtacctttgaagaggcttttcttgctatgtcttgaatagccattttgtattatctatagctctccctggtcttcctgtcctcaagaagtgttaaaataatttgttgttctaaggtagagaatgggccaaagtaggaggatacatcaagatgtctaattggaaaggaaatcagattgcttttccagtgatcaaaggaagtatagcagtggagcaatgaacttttaaaaatgattcttatgggacaaggaaaccattgttgtaattttgttattcagcaaccagaaatgatgaattagatgtttactaaatcattgcacttattgtggtacaaacgcctgttggctataaaggatagctcttaaaagaaaccagaaagcaagggaaacaaaaacaatcgtgtcactttcccagcagcatgtgatgatgaatttctcattcaaaccctgtgaaataaatagcttgctcattcaaaatcatttttttttctttcttttttgagatggcatcttgctttgtcgcccaggctggagtgcagtggagtgatctcggctcactgcaagctccgcctcctgggttcacgccattctcttgcctcagcctcctgagtagctgggactacaggcacccgccaccacgcccggctaatttttttttttttgtatttttagtagagagggggtttcacggtgttagccaggatggtctcgatctcctgacctcatgatccacccgccttggcctgccaaagtgctgggattacaggcgtgagccaccgtgcccggcctcaaaatcatttttggttctcagcatccttaaaatacttttttagacaagttacccagagaatcatctgtgccctgtgtaggcacaggtgattgttcattcccccaacccccactcttcagagagagactttgtcaggcaagttttgaagtgatttatccaggatcactgtggtaataaccttcaaagactggtaaagaactrggtaggactctagccctactggccaaagatgaagttgacattataaattgcaaccgttgacaatctctgatgtaataatgggaatataaggctggaattaattctgattcaagagacctaattccctggcttttaatcagtgtataccactgaatatctctacctaccttagtttttatgccggtcatttaacctaagcatcttcatctctgtcaaaggctcctatttcttctcccagtagcagctgccgttgtaaacaaataattaagttgaaccagttgtaatgattgttgggtagccatgatacaacataagggtggcaggaataagggactcaatagtgtgactcagagtcattgaagtgattggcatgaggtctcagcagggctttggtggctggcaaaaagcatggagttggactggatgcctaagtgcagttttggtggagaacgaacagtgcaagaagttactttatggataaaaaagatgactttcagattttgagatttaatatatctttgtccctggataacattatctaaatttagaggccatgtaagtggagaaaggaagataaatgaagtcaagaaactctgacaacagggtgaatagggcagattgccccaaactaattaactcatcagtcagttactgaacaccatatacatggtgtaaaggatcaaataaattgaaaaacatactatttatgtgctgcaggattgggtggtggcaggttttgaaaaactgatgactaatatactcgatgattataatagaaatagtgcctgctgcttggtaggtacttagatttttatcaaaagaataaatttatgcatgaaatcgtaagaaggggcaacaagcagatgcatgtggaagagtgtcatggaaagacactcagaggagataagatttgagttgaacttgaaaggatagttagccatcagcaaggtagatataggggctggagtgaggaatttgaagcaaaagagatatgcctctctgtacaaaggcagagatgcagggtgaggctggagtacaggatgcatgcagaggaggaataaaagtgcgcccttagcaacccagaattattatttggactttgtcctgaaggaaatagaaagccattggaggactctaagatggactgtgataagatcaaatttagaaatatgatttctggtgactatctttttgacagtttagagattttgaagagggtaatactgtgggccttttggagtattccacgttgaaagtgtctgtcctactagacagttgaatagtcatggtcttttattttgtttttgttttatttcaaattaaacatgaacaaatttatatttcatatagtataaatatttgtatatatttatgtttataaacagttgtacagatcattgtagataacayaagcacacactttgtatatgtgtatacaaatacatatacaaatatcatatacatatgtggtatccagataggatgaggtttgtgcatgagtcactgaagacccaaaataacagaagtttgtatttctttcatgagaaagaaatatgtaggcagtctagagttgttatttgtgtttcagatatctagacaccttttatcattttgttctgcttcttatagcctgtaacttttccccattgcccaggatgtctgcttgagtttcagcattatgtatgcattccaattaacaggaaggaggaaaggatggaagactttaaggacacttttactataaagacacattcaacatgacattttaaattatattccattggtcagaatttagccctagagccttgcttagctataagaggggctataaaatattatcctttctggatggcagtgtacccacttaatagtggtggctctcttgtgatcaagaaggggaagaaggaatacagcatgagaatgaactgtgtatgccagatacacgtagttatcctccttttccccagtaattcaatgcagaaaatctctctctctttttctctttctttgtctctctctgtatgtgtagggggatatatgtgtgtgagcatatttttagaagttcttccaatagggggaatgtacaatcaacgcacattttgtgggcaataataacattttataagcacaagtgttttttgaaatgcttgtgtttatgtaattggcttaatgtatactacatgtgatgattgtaataagttgcatttgtatagagctttaaaaacatttacaaaagtacattcacacttgttatctcatataatctatataacacttttaaggtaaataggatggtgtactatccctattttatatgtggggaaatggaattatgtggttcgatattgaaactaggactggtattcactgacccctactttagggttagtaatggaaggcaataatagtatggattttcgagaacagaggataattagaaaataatttgtattttaatttgaatgaatgtatgctagtggacatgaattcttgtcatttgtttgataaattagcattcgagaattttttcccacccacctgagcagtggtatcttggccatggtcagagcgtcccatgctgttttctcctcctaataggacagatcaattgtgtggtgctgctcagttaatgtaagattgatggataaatttactcatcaatcatgtatttccctgcaattgtaacatgcaaaagttgtctacaagttaattgttttctgacacattcattgtacaaaataatcagagaatcccactatctttttctgcaatattgctttgtaaaaacagagccctggtaaatgttatcaccataaaggcaaaatgaagcactttcaacacctgactgaaatcatggtgttttgagctggtgacgtacattgctcaaaaggacatagtttataatttctactccagggggcattcagattagtacaaagtacttttagcctcttaycgttgggagtaaattttctgaaggtacatttatcttaagaatagcaaagaaaaaagagagctattgagtggctgactaggccgggaattgagctacctcttttgaaaagactgaatttttacttagaaacccaagcaatattgttcaaattttaaactctcatttgggccagaatgaaactttgaccactaatgaagggttaaaacaaggtactctgatatgaagtgtctttttttgtttttaaatgggttaaaaattataaaaactagaagtatagcttcttgctaacattcattacctccagggacatttttcagtccatcaaacttctccattcagtaataccattattgaagactctctacttcttgaaataccttctttctttggtttctgtaactttactctttccttttctctttctaaccccttttcctgtkttttcttagtttactttgcaggcttgtgttcatccacccagccttccacgtggcttgttcccagcccttcctttcctctgtacacctctcaaacttcctagcattcttcccatgctctctctcactctcagagacattgtacgtgctattttcgctgtctgaagtatccttcccttgaatatttaccggttaacttctattcttctaatgtctaatgtaacatacaaacgttgtctacaagttaattggtttttgacatattcactgtgcaagataatcagagaattccactgtctttgttctgcaatattactttgtaaaaacagagccctggtaaatgttatcaccataaaggcaaaatgaagcactttctttctttcttcctttcttttttttgttatactccaagttctagggtacatgtgcagaacgtgcaggtctgttacatacgtatacatgtgccatgttggtgtgctgcacctgttaactcgtcatttatattaggtgtatctcctaatggtatccctcccccttccccatgacaggccctggtgtgtgatgttcccaccctgtgtccaagtgttctcattgttcagttcccacctatgagtgagaacatgtggtgtttcgttttctgtccttgcgatagtttgctgagaatgatggtttccaacttcatccatgtccctacaaaggacatgaactcatccttttttatggctgcgtagtattccatggtgtatgtgtgccacactttcaacacctgactcaaatcatgatgttttgggctggtgacgtacattgctcaagaggacataatttatattttctaccccagtgggcattcaaattaatacaaagtacttttagcctcttatctttgagagtaaattttctgaaggtatatttgtgttaagaatagcatatacaagcctaaattttattattaratttaaattagacctaaatgtaattatcatttgttcagagaagccttacctgaattctgatttataaaaattgcctggtatatctctcatagcatcctctagctcttcttcctacacattacatagtaagctccatggggacggaaaccattttgcttttctaacaacttaatccccagtgtccagtacaatgttcatcacacactaagtgcatgatatttttgaatgaatgaatgaatgaatgaatacattatcatagatacaaataacacattatgaaaatactgttgtgtaaggtatacacacatagataaaggcatccaggagtttccttatttattggctgaactgagcatcaaagcatagatgaaaaatgagagatcaatgtcaaatcatcaggttttcaggttgggatgtaggctttgttcttagtgttgtgggacttaaaagatgcaattgcgggcagaggaaagaatgaatttaagtggttcagtagtgttattttaattcccttcaataataattcactttctctagataccttcaatgtgtaatatcaaaggcaaatataatttttatttctctaaacacaggctcgtatgtagaagatgacatagagatattggaacacctgctacttaactaaatgaccctcaaaattcaattttcatgtgtttttctgawgagaatctgaatgatgggatgaggaattggggaacttctaacatgggttggttttatagtttcagaatgagaactgataaaatcttaatatcacgtctctaattattatgtaagttgactatattcttatatttcactaccaaatatactactcctttcccwctggggacaaattttcttcttttggggacacattttgatggcaataagtgcatatttttgacatgtgtaactttctgtgaaataatgctggggaaattacagataactgttaaatgagggtcaacagtcatgccaagccctatatccagatagcttctcttatggattagatttataaagtcctgggagagtgctttgtgtctgtattcactagacattttaaatcttctaatacatgttttatcttactatagccattagaaaacggttcatgattgttcaaactttttttcctctttcttctctctttcaccctccaccccagttttgagctacttgttataaatcttgactccattaaattcttacaagaacattttggaagctgctgctattggggaaaaggtgcacagttagcaatcacctgaataattagattcatgtaaaattccattttgcataatgtaagtcctagcctactcctactgtgtctttcctttagaatctccacatctctacaaattatgtaataacctttagtaaatgctttggccacttagataatggtgatgcatctataaacctcccatctccagatgttatgtactgaaatgtagtgtaaaaaaactgagtcaatatttatttttcttcagcaaaatatataaaatgtgaagaaatgagaaaagagaaggaaggaaggaaggaaggagaagaaaagaaaagaaagagaatgagagcgctttttgaaaatttccagtggagaaaaaattactcatcatgctagaagccttgtaattgatagcccattgatagtctgggaatattctgaaggatttttgattgatactttttaaaaatattacgataatatttgtatcattgcctagtcatttatgtatgaattctataataatatccctttattagtackcaacatttcagaaatcctataaaactaagtgtgtgttcatgcagagaacatttaaatcagtaaaatccatacatcaaattaatctggacaagtctttctaattggttgcaatyggcatttactgtagagctttctttacattctcattttatttactgttgaaagtactgtggattacctctggggagaagaggaagaatgtagcataggtgacattttggtaacattttactgctttaggtggacagtcggtaaattggtattcattttcttattctttttcacttgtaataaatttaaaataagaatacaccataaggcagactttcatatgtaataaatttttaatgaggatactacaccataaggcagacttaatagtgactagttttgtgaatttgcaagcaagttgtatactcattctggatcttgaagaacttttggtaaaaaataaaaaacaaaaatagtaaatataataattcatgaagtcagagctttactgagttatggccatcttttgaggctactttagttctatgaccaatttagattatttgtaattcattcatcctttgaacatttggagtgtggctaatgtttatatgcaattaaccctatatgtaacattgcttcatatttatataaagttattataggacggacttccaacatttaaaagggatgtgccaattggaagtgaaagtattagttgttcactgtctgaacacaatccaaaccactggacaattaggttaattcagagaaaatagaatcataggatgctagagctggaaggaacctcagagataatttaatttacccctttcaattataaataggaaattattacagtccacagaagctttagtcctgcagttagttaatggaagagctagcactaaaactcaaatttcagagcttcctctctgcttcctttctactgtattggtatttcccaaattgtcatttccaaaattgttcatgtgagtgaaaccaaaacaaacaatcacaacaaacaacaataataaaaccaggattttgtggcacagtaactttttgaaatattgcatcttgtatatcccttgtggattcacaatgcactttaatatggtaaaggctctgagaaaccctacagtaaagaaatctatgtaaccatttaatccactcttccccaaattttttgacaactgaacctcttctatgctaaacaaccagtacgttttaagaaagaaagtttggataatactatgaaattagattgtttattgttagcatgcaacttgattatatatgccatgccaaacccctgttgatttcaatagggatagcactgtgttggataaagaagaggataaaggagaaacttggatccagtgaatgagacgtggggtttattcaggggacttacatacagtgtggtccagcggcagtgggctggacaggagaaccactacagtttgtaaaaaaacatgcagtcttcacttagcaccctccccttggcaaccttcacgtggcaaccatcatttaaccccaaacaaaaggccttaatctccctgtatgggcttgcattccacaggatgggtcaggggtttagaggttccttatagataaggaatgaatcttcaagttggctgttcctggatttcttagctcagaactctgaacacacattcttcttaggccatggtgtcattctgagggcatgcttaagttattgttgtcaggtgcatctgccatacagggtcattctcagggtatgcttaagttattgctgtcaagcgcactggccatacaggagcattctcagggtatgctgaagttaatgctgtcaggtgcattgaccatacagggtcattctaagggtatggttaagtcgtcattgctgtcaggtgcatctgccatacaatataacgatcaatttttaaaattagattaactgatgacagcatatagctctaccttaatggacgtagacagttgctcaatagagaggtcagtatcccataagtgctttcaaatcttttcatttcatggctcagtgaagggactctggagagagaacaaggttctagctaatgaaaactgattggagggcatactgatgaaaatggtacttagtaattaataatggaaatacaggtattaggcaatggcaatggaaacagaggaaagagagaagagagtcagagccatttcagagggatgggttgttttaggcccatctctttctcactggaacaaacctcaaaccaagtaaaaataccagaaagtgatacaagaaagacgattagtgtgaggtaagtacaaaggaaggaaaaacatcaaacatggacatattaaagataaatggggcaatatgccatgtcctggaggttatttttgaatcacccaacaaacttaactcttccatatctaaactcctaaagcttttctttcttgactctaattttacttaccctgttmtggattttcctttagtttyttgagtacatgttttatcactcccaagatattattctagaggacaaggacagtagcttgttttactaagttccacaggtactgggcaattactttgtatgaatcacgccatcgatgaatgtttgctgaataaacacacataggacaaaagcatgcataagtgtgtaactacagtagagtatgtgaagcattagctctgatgatcccttctctcaaaaggtttagagtgtacttcagacaattaacgcactaaaaaagactgttctggtgtgaaacccttgatataggacatatccattacaaggaataggtcatagaagcctttgtagagaaaatagtgttgaacattaacagtatttattgaaagcaatgttggtagttatattagtcctgttgtaacgaaattatcacaaacttaatgtcttaaaacatcacaaattatcttattgttctgtaggtcagaagtctgaaatgagttttacaaagccagaattaaggaattggcagagctgcattacttctggaagctccagggraaaatccatttgcttcccctttccaacttcttcttttttttttttttttttaacttttaagttgaaaggtacacgtgcaggtttgctatataggtaaactcatatcatgggggatttgttgtacagattattttcttgaccatgtattaggcctagtacccattagttatttttccagatcctctccctcttcccaccttctaccctccagtaggccccagtgtttggtgttcccatctatgtttccatgtgttttgatcttttggctcccacttaaaagtgagaacatgcagtatttgattttctgttcctgcattagtttgttaagtataatgacctccaggtccatctgtgttcctgcaaaggacaagatctcattcttttttatggttatatggtattctatggtatatatgtaccatattttctttatccagtctaccattgatgggcatttaggttggttctatttgctactatgaatagtgaggaaatgaacatagatgttccttgtgtccttatgacagaacaatttgtattcctttgggtatacatacaatgatgagatggctaggtcgaatggttatttatgtttttaggtctttgaggaatcgccacattgttttccacaatggttgaactgatttacactcccactcacagtgtataagtgcttttattcttcataaccgtgccagcacctgttattttttgactttttaataatagccattcttatttgtgtgagatgatatttcattgtggttttgatttgcatttctttaatgatcagtaattttgagttttttttcatatattgttagctgcttgtataccttttttgaaaagtgtctgtttatgtcctttgtccactttttaatgggtttgtttgggtttttctttcttgtaagtttgtttaagtttgttatagatgctgcatgttagacctttgtcagattcgtactttgcaaaaattttctctcattctgtagtttgtctgtttactctgttgatagtttcttttgatgtgmagaagctcttcagtgtaattatatcccatttgtcaatttttgcttttgttgaaattgcttttgacatcttcaacatgaaacctttgtccattcctgtgtccagaatggtattacctcaattatcttccagggtttttatggttttgggttttacatttaagcctttaatctatcttgagttaatttttgtatgtggtgtaaggaagggtccagtttcagtcttctgtgtatgggtagccagttatcccagtaccagctgttgaactacttgtctttgtcaccttggttgaaggtcagatagtcataggtgtatggccttatttctgggctctctattttgttccgttggtctacgtgtctgtttttgtaccagcaccatgctgttttggttactgtagccctatagtatagtttgaagtcaggtagcattatgcctgctgccttggtatttttgcttagtcctggccagagaaatcaggcaagagagagaaataaagggcatccaaataggaagaggggaagtgaaactatccctgtttgcagatgacttgatcctatacctagaaaaccctgtagtcgcagccccaaagctccttatgatgataagcaggttcacaaagtctcaggatacaaaatcaacattcaaaaatcactagcatttctgtacaacagtagtcaagctgaaagccaaatcaggaaccctttttcaacttctaaaggctgcttgtgtcctttgcttacggccctttactgcatcttcaaagtgcatcactataacctttgcttcgttcttataaggaccctgtgatttttactgggcccagcagaataatgtagaataattgctccatctcaagatctttgacttaattacatctgcaaagtctcttttgtcatgtcagataacagattcacagattctgggaattaaagactgggatatcttttggggaccattattctttctaccacagtggaaaaccagcatcagcaaagttacggaagttgaaataagcatggagtgtatagccgaataataaaaagatcaaaatgaaatgtaaagtatgtattaagaagtgtggcaaacaggattgctaagcaggctggtataagttacaaagccctttaaaactcaggacaggagatttagatttaatgcagttaatactagcgaacattccaagtttttaaagaagtggctactgttatgaaaatggtatttataggaggttggtcatgtatgatttgtaggagagcctggtggagagaaagtttgatggcagggagaatcgtaaatgtacagtcagatgtggtaccttgcatagttatttacgtatgttggatacaatgcatttctataaattgtttgactcaaaaattatatttttgaattaaagtagcaattattaatttttttacaattcacttattttatattgtatctgtttttggaccatagtgatggttgtcaattcataccttgtcagtcagtggtttttctttgcttcctcattgtctttccctctgtcttaacacctatttgctaatggctattctgaagggattcttctttttctcattcagagaaatcttatgtgttcttgtgaaagtaactttatgttaggaatggtaaattactttttttagatattgttatacattttcttctttaattattaaatttgtgatattagtgaattcttccaagggggaagatactgacatcagactgaatatttactttaagtacatcttaactggagcttttattgctttcacctggaaagggtcaacacttagttgaataaaaaggattcacctttttacttgtaatggaatatcaactgcaatgtggtttttgatggtccaaagaccatggtgtcctcattatatttaacgtcagagtaaagtgccacatttcctctggcaccagaatggaaaggactgcatgcataatagataaaaaaagcatagatataaaaaaagatataaaatatactatttttctgctggtgataggcaccttctccatcctttccctattgcaatacatgaattttgcccttctccaactctaattgatggtcatttagtatcagagtaatgaattctatagttggcctgtaacctgtggctggaacttttgctaggtcttgggagatgagacacccactctctactgaggtggataagctggtaaatcttaagtttgggactgctgagagtcaccattagagagagttttcttaacaatgaagtcagtgcagaggaaagcaaagcccataaaaaagagtctcagtgttggtgagatgatttgagccctggatccaaccatgatttaaactcaaatatttctgtttcttttggtttataagccagtatattttcttcattatttaagctgattttagttgttcatctatcagtttctgtcaagactccactcttgcacagtacacatacaaccagaactcttacttgggctccaaagtctcttcaaggtccctctgtggcatgtttgtcatggtgttgagttttccccttcagctgcctgactttgtatcttggcagaaggagtgagctagatttccttgctacctcctggtaatttgctgagtcatacaactctcttcaaatatgatactgttatagtagcattaatacagggattctaaaggaaaaatatttaattgccataatggggacaaaaacctggttgataaatcttttcatatttttcctatttatggaattagaggaatgaacacaagactgtcttcaatttatctattactataatggattatttctttatttcactarcaataaatgttgggggattcctggggtatttataaggagtaagagatagttttgctaaaagaatctttaaagattttattgaatgtgagatatccagtaaatgataggaatcagtcttgattctcatccataatttctgcttagggagaaactttaaccaagtttttttttaaaagattaaatattacaatatttttttccagtttttttttcttttagtggctctcctttcttatcaccccatataacctaagaggcagagagagtagttctgttgctaactcttgcagaagttgtgcccatttcttttttctggtttgctgagatttttatgccaataataaggtcggcattcttctttggaaaagaaagttgtctaaattctacrtataagtggcactatagaaatatttggaaaataacaatggcatactaaaattacttggaaacaacaaatgaacagagcagtcactatgcagtgtctgcaattcagaacaactctgctttgagactgtgacataagataggcagaaggagggaagattcaaaaattttcttcttggataaataattagatcaccttttaattattatcagactactgtatgattgctgattttgttcctcaatacttatatgtgctatttctttattaatcaattcctggactactcggtttctgtattcgatcctattctacaaaggccacagcctattggattttaaagagcccttaagtaaggttatctaacataacatccagctgtgtgggagagtgcactatataatatgtattcagcaaatattttttgattacatattaattagaagacattgtgctagacatcaaagataaataagatcaaaataccctcctgctgaaactctcaatgtaatgagatagaagaatggagtgaacaggctactaaaatattctataataaaggataacattgatttatatatcagaggttccagaaagctctaacatttgaattagtctttgaacatgaagcttagaaaacaaagagcacgctaggcagaggagacaatatgcaaaaacatggagacatggagagttcatagacaatttggataattattaacagattgacatgagatgaaactagtctattggtgaagaacgtattaagaaaagcttttgtagcaattgcaacaaaagccaaaattgacaaatgggatctaattaaactaaagagcttctgcacaacaaaagaaactatcatcagagtgaacgggcaacctacggaatgggagaaaatttttgcaatctacccatctgacaaaggtctaatatccagaatttacaaggaattaaacaaatttacaagaaaaaaatggacaaccccatgaaaaagtgggcaaaggatatgaacatacacttctcaaaaaaagacatgtacgtggccaagaaacatatgaaaaaagttcaacatcactgatcgtccgagaaatgcaaatcaaaaccacactgagataccatctcataccagtcaaaatggtgattgttaaaaactgaagaaacatttgatgctggtgaggctgtggagaaataggaatgcttttacactgtcattgagaatgtaaattggttcattcattgtggaagacagtatggtgattcctcaaggatctagaaccagaagtaccatttgacccagcaatcccactactgggtatatacccaaaggaatataaatcattctactataaagacacatgcacatgtatgtttattgcagcactatttataatagcaaaatcatggaaccatcccaaatgcccatcaatgatagaccggataaagaaaatgtggtacatatataccacggaatactatgcagccataaaaaggaatgagatcatgtcctttgcagggacatggatgaagctgcaagctatcattctcagcaaactaacacaggatcagaaaaccaaacactgcatttctcaaacataagtgggagttgaactgtgagaccacattgacacagggaggggaacaaaacacaccagggcctcttcgggggtgggaggcgaggggagggaacttcagaggacgggtcaatgggtgcagcaagccaccatggcacatgtatacctatgtaacaaatctgcacgttctgcacatgtgtagctgaatttaaagtaaaattttaaaaaagaaawaaaagaacagcttttgtgttggtatgtgtgtgtgtgcacatgcaccattctgaagaattgggacttaaattggtcatccagacagcatgcttatatccagagttcacaaagcagcaattacacttttgagtactgctaattgccggctttttgcctatatattttgctgagatctttttctgatttgtattcactggtcctattctcaactccttaaattaaaattagtataaatctcttttatatgactatccctcagatatttaaaagtgtctgttccttatcttctagtcttcagaattaaagttccagtcattcaaactatttatcatgctcttcatagaacattccagcctcagaatgtagatagtctaataataagcaacttgactggtatgtagcaatgttgtgacctttctctggattctgcaagtaggaatatgagtgtcacttatgataatattagtatttttattgctataattgtcagctacattatatttgtatatattgactttaaaacccatagattagttttccaagactcactcctgtgttgattctgcccaatcctgtaatcgtgcagatgattcctatgttacaaggttttacatttattcttgttcaatttaattatagttaattttggtctagcataattgcctgtagagatacttaaatcttcattctctttctctgtgttatcaaccgcttatgttttttaatcctgtgtaacttagataaatatactttcattctaacttttgataaaaatgtagaatttcaaaggatacatgacaacatctacagcagagcactatagaacacacgtcaaggctggtaatatgcagaatttgcaatataaaatacttcagggatttgactaattagtttaattcacctaaaccagctaatattttcctgtctatactcctaatwcataatgagtctgttaaatatcttctaaatcaaagtacattacatctttgacattacccagatcaaatagtataataaccttaaagcaaatagaaatcgtgttaatgtgacataccttttcttttaatgcacatttgttgagtcccagaaatatgtccatttcattttccatgtgaatgtgactttatttggaaataagcttttggcagttataatcaaatgaccttaaggtgaggtcattattttaatacaatataactggtatccttgtaagaagagaagaaacacaaagacagatacacagggagaattccttgtgaccatggtggcagagatgggagtcacatgtctgaaagcatagggacagcaaggattgctgacaatactggaagttaagagagctgtatggaacagattcttcctaaagcctttagaaagagcatcaccctgtcaacaccttgatttttggacatctagcatccaaaactgtgagagaataaatgtttgttattttaagactgccagtttgtagaaaattaaaaaccttgacataacgctaatgtcgacatttcatttttaccccttttttgaaattagatcaaaatatactcatcttaattcttctggcagtaatttggttttctgtgtttctctgaagattactgaaggttgattaatcatcacattattaggatattttaatgttcctctaagtttatacaaattccaggtagtcagatgctcacttactccactgtgtactcatttaaaattgtttattagttgctaattatgcacttggaactaagctagacactggaaatatggacatggtccttggacttgagaagcttatcataataagccaatgaaaatatcactgtaatttagagcaacaagtgtaatgaaataggatacctgtagtcctaggagaaagcaagaatagggggaagaaacctgggaagttttccatagcactgaatttaaggttgagtgcaatatgatgtatggctttaggcgaaaccacatacatcaattaattaaaacaaaagaatgaaagaaccttgcatagcatggagatgggagagaagaagaagctttctggaaatctaggtaagtagatttgtttgcagtacagtcagtggcagggaagagagaaggctggaaaagttatccagagctgtttattgagagatcttggatttctttctgaaggtcatacgcagccattataataattcccacccctacaaactttagatgtgtagcaagctctttcaaaggaagggaaacaaacaagtaacaacaacaacaaaaacatacaaaataacttcttgttgatcccctgtatttacttaaattatttttatattaatgttaattggttatgttcaaacctaacaggaatttggaattcttgtacatataattcacatacaactataaaataaaatatatttataaactaaataccaaagaactcccacaaaactaatcaaattcaatttaacagtgttaaattatrtgaatgtaaatgtttgctgaaactaagttgcacctgctatggtgtagtttttttatagatatattttttttattatactttaagttctagggtacatgtgcacaatgtatgggtttgttacgtatgtatacatgtgccatgttggtgtgcaacacccattaactcgtcatttacattagttatatctcctaatgctatccctcccccctccccccccctcacaagaggccctggtgtgtgatgttccccttcctgtgtccaagagttctcatttttcatttcccacctatgagtgagaacatgcggtgtttggtatttgtccttgcgatagtttcctgagaatgatggtttccagcttcatccacgtccctacaaaggacatgaactcatccttytttatggctgcatagtattccatggtgtatatgtaccacattttcttaatccactctatcattgttggayatttgggttggttccaagtctttgctgttgtgagtagtgctgcaataaacatacatgtgcatgtgtctttatagcagcatgatttatattcctttgggtatatacccagtaatgggatggctgggtcaaatggtatttctagctctagatccctgaggaatcgccacactgtcttccacaatggttgaactagtttacagtcccaccaacagtgtaaaatgttcctatttctccacatcctctccagcacctgttgctcctgactttttaatgattgccattctaactggcataagatgttatctcactgtggttatgatttgcatttctctgatggccagtgatgatgagcattttttcatgtgtctgttggctgcataaatgtcttcttttgagaagcgtctgttcatatcctttgccccttgttgatggggttgtttgtttttttcttgtaaatttgtttgagtactttgtagattctggatattcgccctttgtcagatgagcagattgcaaaaatgttctcccattctgtaggttgcctgttcactctgatggtagtttcttttgctgtgcagaagctctttagtttaattagatcccatttgtcaattttggcatttgttgccattgcttttggtgttttagacatgaagtccttgcccgtgcctatgtcctgaatggtattgcctaggttttcttctagggtttttatggttttaggtctaacatttaagtcttgaatccatcttgaattaattttcatataaggtgtaaagaagggatccagtttcagctttctacatatggctagccagttttcccagcaccgtttgttaaatagagaatccttttccccatttcttgtttttgtcaggtttgtcaaagatcagatagttgtagatgtgtggtattatttctgaggactctgttctgttccattggtctatatctctgttttggtaccagtaccatgctgttttggttactgtagccttgtagtatggtttgaagtcagatagcgtgatgcctccagctttgttcttttggcttaggattgacttggcaatgtgggctcttttttggttccatatgaactttaaagtagttttttccaattctgtgaagcaagtccttggtagcttgatgggcatggcattgaatctataaattaccttgggcagtagggccattttcatgatattgattcttcctatccatgagcatggaatgttcttccatttgtttgtgtcctcttttattttgttgagcagtggtttgtagttctccttgaagaggtccttcacatcccttgtaagttggattcctaggtattttattctctttgaagcaattgtgaatgggagttcactcatgatttggctctctgtttgtctgttattggtgtgtaagcatgcttgtgatttttgcacattgattttgtatcctgagactttgctgaagttgcttatcagcttaaggagatttggggctgagacgatggggttttccagatatacaatcaagtcatctgcaaacagggacaatttgacttcctctttgcctaactgcattgcttattaggttgaatatgtgagacacacttttccttaattgtaaattatcattcaatgttatgactacttatcatttcacctactcaatcttgccttttctaggtaccggcatagctttatagctaccaaattttagattatgttccctaacctgggtttatgtagttttattcagtattttatcttgaacattatgaaaccgaagactacatactactaactcactttaggaatagagctttcagaatttacttttagtttgttctgcatatctgtcaccagaccagagggttttttgggggttggggtgtgtatttaaggtgggagaggcaattctcatataaattcaataataaatttggaacaaatgtcattccatatgcagattagtttataaataatcatgtgcttactagcactgagctaccatgccatggccactaaaaacctcttaattctgttccattcctcttttttcttttgtgtcctaaatattgatattctagtctttgatataaaatcaacgattcagtgatctgcaccaaaaattcatttggcctgttttattttgaaatttttaacttattcagaggagtctattaagcttgaattttgttcttaaagtgctataatggtccttagcattcatgctgtgtcgttgaacttggatttaatttatttcatcttatattaaatatgttataagatgctgattagatattttggatcttggatgaggatgtactaaaacttagccagtctaagtaaattttaattctagaggattctctacagactgaaaacttaagatggcttttcaactagtctcaactagaaaataattctgttctagcgtgtgctctgttttctcttcctaactggagagtctctattgctcatagtttgtattggtgtctgatacgtatgtctatctcctagacactgtggtgttttcagaatggtagaaaataagattgagattgtgacagcaggctgataaatatctttatgtctcttttatttccctgtgtagtgtttaacacataatatactttggacagtgttttaaaaataaattgtacatttttgtagaaaaccaactatctttataataaacatagatgattacctctctttgagaaccaccagatattttagcttcctaaaggagtgagtccagtagcactttatttttaattaactgacttattaattaattaatttgggggaaacttggtattatttgttgaaatgcatagatagtattctaaagaaagtttggttaatatttatacttaggggaaagcagtacctagggcttgtggaaatttggtgggcagctatgacctgtgctatcttttaaaatagatttttttttgtattagaaaaggttttactagtatcaactaatggcaacataattcattactgtaggttgttgctataaggtaagatcctcattgtctgcatttcagaaaagattctctctgtgttattccatggagcagcagatagcaattctaagacactgaggtacacaccacagatactgtgcattttaattgactaatttgcctcttcaccttttgaattacaaagatgaggagctattgaatgaatgctcaggctttagcaaactaagggagaaatgtcattattaccacagaccaaataaaaggtacaaaaatgctaactgaacatagaaggaccaacttgcagaatgaccttgggaactggcgattttcagtggctcatccgcattctcttccttgcatctgcctgagcrcagaatagttcattctctctccaaatctctttcaatttactaaaatttgtctttagttgaatagcagcagcgacgtccacactgtctcaagtcatgcattgaagtcattaaatgacaaatatgcttccttaggaaatgttttgtgactcattagtctaacaggagaagcaccatttctctacttccctctctgtctcctaacctcccccttttcttcctcctgtcctcccttccttctttcattttttttttaattcaagaacttgaaattaaattagagataatccaatttaactatttcatttgaggaaacgaaggcccaaacaggttcattactgccagagccagaagtagctcctagatgttcctgatctagttctttttgcaccacatacactgcttctttataatatgcatactaaaataaaagcataagtgaatattataagccttaacacatatgtgttcagcatttactgtgtgcaaggtgctatgatagatgctgtggagtaaaccaaagagaaagacaatgtttattttctcaagaagtttacattctaacaaaggaaataatttccatatgcatttttatataattatatataaattatataataattgccatatgagttttgtttttaaatcctgggtagaaagaattcaagtctgggattatgtttctttttattattattattattatactttaagttctgggatgcatatgcacaatatgcaggtttattacataggtatacaggtgccatggtgttttgctgtacccaacaacctgtcatctacattaggtgtttctcctaatggtatccctcccctatcaccctcacccgctgacaggcarggtgtgtgatgctcccctccctgtgtccatgtgttcttattgttcaactcccacttatgagtgagaacatgcggtgtttggttttctgttcctgtgttagtttcctgagagcgatggtttccagcttcatccatgtccctgcaaaggacatgaactcatccttttttatggcagcatagtattccatggtgtatatgtgccacatttcaaaagctagcagaagacaaaaaataactaagatcagagcagaactgaaggagatagagacacaaaaaacccttcaaaaaatcaatgaatccaggatctggttttttgaaaagattaacagactgctagtcagactaataaagaagaaaagagagaagaatcggacacaataaaaaatgataaaagagatatcactactgatcccagagaaatacaaactaccatcagagaatactataaacacctctaygcaaataaactagaaaatccagaagaagtgaataaattcctggacacatacaccctcctaagactaaaccaagaagaagtcaaatccctaaatagaccaataacaagttccgaaattgaggcagtaattagtagttgaccagacagattcacgggcaaattctaccagaggtacaaagtggagctgataccattccttctgaaattcattccaarcggtagaaaaagaaggactccttcctaattcattttatgaggccagcatcatcctgataccaaaacctggcagagacacaacaaaaaaagaaagcttcaggccaatatccctgatgaacattgatgtgaaaatcctcaataaaatactggcaaaccgaatccagcagcacattaaaaagctttatccaccatgatcaagtcggcttcatccttgggatgcaaggctggttcaacatatgtgactcaataaaggtaatccatcacataaacagaaccattgacaaaaaccacatgattatctcaatagatgcagaaaaggccttcaatgaaatacaacaccgcttcatgctaaaaactctcaactaggtattgatggaatgtatgttaaaataataagagctatttatgacaaacccatcgcccatatcatgcagaatgggcaaaagctggaagcattccctttgaaaactggcacaagacaaggatgccctctctcaccactcctattcaacatagtattggaagttctggccagggcagtcaggcaagagaaagaaagaaagggtattcaaataggaagagaggaagtcaaattgtctctgtttgcagatgacatgattgtatatttagaaaaccccatttttatgtaattatatataaattatataataattgccatacgagtttttaaaaaaagtcctgggtagagagaattcaagtctggcattatctttcttcttmttmttattattattatactttaagttctgggatacatatgcacaatatgcaggtttgttacataggtatacacgtgccatggtgttttgctgtacccaacaacccatcatctacattaggtgtttctcctaatggtatccatcccctatcgctcccaacccccgacaggcagggtgtgtgatgccctgtctcaaagatgcccaaaatctccttcagctgataaacaacttcagcaaagtctcaggatacaaaatcaatgtgcaaaaatcacaarcattcctatataccagtaatagacagccaaatcatgagtgaactcccattcacaattgctacaaagagaataaaatacccaggaatacaacttacaaggcttgtgaatgaccatttcaaggagaactacaaaccactgcttaaggaaataagagaggacacaaacaatagaaaaacattccatgctcgtggataggaagaatcaatatcatgaaaatggccatactgcccaaagtaattatagactcaatgctatccccatcaagttaccattgactttcttcacagaattagaaaaaactactctaaatttcatatggaaccaagaaagagcccatatagccaagacaatcctaagcaaaaagaacaaagctggaggcgtgctacctgacatcagactatactacaaggctacagcaaccaaaacagcatggtactggtaccaaaacagatatatagaccaatggaacagaacagaggcctcagaaataacaccacacatctacaaccatctgatctttgacaaacctgacaaaaacaaacaatgggaaaaggattcmctatttaataaacagtgttgggtaaactggctagttatatgcagaaaactgaaactggaccccttccttacaccttatataaaaattaactcgaggtggattaaagacttaaatctaagaccgaaaaccaaaaaaccatagaagaaaacctaggcaataccgttcaggaaataggcatgggcaaagacttcatgactaaaacaccaaaagcaatggcaacaaaagccaaaattgacaaatgggttctaattaaactaaagagcttctgcacagcaaaagggattatctttcactctccctttgtgtttagcctcgatacaaatctcttacaagtttatctttgaggactaagcagtgagagggggcagcatagtcagagacagccccagccacctctgtcccaggtcacagatgattcacaaatgccctaaagttggcagatctttcttcctcttagtttacaaagcatagcatttttcaaaagaaatcttctctaggtatctcaatgaaagagagaagtttaaaagcatagaaacaaagagcagtttgcacttcccaggatttttgtcctaatgtatctgaaaatccagccagggatctgttagaacagagtcgtttacagagccacttccatgcctcccttttcttaaattcaatttgcagagaattttctcctcattccagtttctggtcagggaaggaattggaatagagtctcccattaatctagcaaaaacggttcagtatagtattaattgcctaaggaagacagcaattatcactcttctctgggtattcccttagagtgcccacaaaggttttaaatgtttctttgttccttcagtgaggtgctgcttctttcagttttcacaatagaaaaggctggtttttttgtttgttgtttgttttttacagagttaaataaaatccagaagctgttcaggagcaagatgcttctggctgggatgctgagcatggttaaatgatgatgatgatgatratatcagctaccatttaacctccttgtttgtactagaaacttatctattgatgtgttttttttatatctcattcaattctcataacaattatatgaaagtagtagtattatcttcattttaccaatgagaaacttaggaacttgtttgaggtcagtgagtaatagatactttatttaaatacagatcttctgtgacctcaaagcctatatagtctttccactattaacacagactctggtgaagaaaacagtgttctaaacctattagtggggtgggcagaacaatagatgctatgtgttgcattcttagagcacttaaggtcatctgtgttgacgaaggggactgacgacataattttgcatttttcatttattatgtctttaggtacagatttctctacagtgtttaatgaagaggaaaaccaaaactgcccttaacacttgcttttagaagttttcctcttttcaccattagtttatcagagttttgttattttacagaaaatttggtagaaagaaatggtttgttgaataaaagctaatgttagataatgataagtgttgttaagggaataaaatatagaaaaatgagataaaagtgtttttttaaatgagtaatttccccatatttgattttgagcatttcatttttaatagcatgtttgttcaagaaaaaattgcattaccatattgtaagcttgagtacgtaatatatcaaaggaaatcctaattttaaatgctattcttttatacacatctctgccttcagaattagggatgtatttattatcctaagaacatccctttaacttgctaaccatagctgtaatgactcttagtgatagagcccmaacttgtttctgaagcttggtgctttggggaagatgattatttcagaactgaaagttgatgggaacatggctgacaaatgggaagtttataagtaaaaagtcctagcaacaaagagasacctatccacatcaatatgggaaaaaagaatactgatttgttattgagtacacacaacagactacgtgcatgtagacagcacacaaaacctttgaagacagaatgacatttcacacaatttatacagcaaagaataagaaaatgaaataacatttctcttctttcctcagttacatctcaagataggctcctagattagctctaagagtatgtttatatttcaaggggttatgaggtctgcaaccttggagacatctttgcagtgtgaaactagagactgggtttatctagaccctgtggagaccatttatatctaataggttagagcgaggactcaagcacattgtgttttcaaggagactcaggaggataagagaaggaagttgcctccttcctcttcataagcaaataatcttcttctcatcttcctcctcctcctcctccttcttaaaatttatctttataacaggaagagtagagcttttccctttcttatctgtgattcatcccttggactggagtcaagctgaaatgagggttgggatgggtattctttagctatttatgatggcattgcatattcagtggcagcaacagaagatgcactgtcttaatttttgtgagttaattcagccattagaacaataagtgaaaggatagacattggcacctcctttatatggagttgcattatctgacagcttcaagttttgtgaactcagccaagtatgtatagaaagctctgagaagctaaaatatagaccacaaaatctgggtcaccaggcacgtaaaaagaattcattatgctctcacttactctctttatacatagttgaatatgcttggttgtctggtttcccagtccacaacagattagatacaatatggtaaaatacactatggttgggtagagttgcccctaatgacagcaaatgtgatagtggaaaacctgatgtcaatggggctataaaggaaaatgacctataatttgaaagacagaaactctaacaaatattaaaatatacattttagtacatatttaatatgtaaaatgtttgataaatactagacacttagttcatgtcatgtgtttyccttttttcccctgcaagcattgctgtattacatcacagcaaaaaaaaaaaaatcaatgttcatactattactcttagtttkgagaaatgtttatgtctgggtactctggaaaacagcagagcactgtgtgtatacattattagctctttttaacccaatatgttaaaactgaaacatattttggtattttaaaacataaacttaagtaattcataaaatttaaatatgttgagtaataatagtaaaatagcaattaaaagcactttacacatattagttcatgtaatttcatttatttatgctgaattagatgaaactcctcccattagtgctagattacagtacagtcatgcattacttaacaatggggataattgctgagaagcatttttaggtgatttcatcattgtgcaagtatcatagagtatacttacacaaatctagatggtagagcctactgcacacctaggctatgtataacctattgctctgaagctgcaaacctgtacagaatgatactgtactgagtactctaggcaattgtaacatgatgatatttgtgtatctaaacatatctaaacatagaaaaggtacagtaaaaatatggtattatcttatgggaccaccgttgtgtaagtggtcggtcattgactggaacattgttaggtgatgtatgactgcacttttacctggtatttgtattgtcattattttttgtagaatcttatttcacttttaaaaatgcacttttcttgagaacaggaatctgtctgactagtacttaaatttttgatcatgccttttgcataaaagatgcttagtaaacttttatgaagtcaattaattaaatctattgtacaattccgttggcactatacctttcttgtaatttattttttaacagggtagggaaaatagactgatgaggttcagcagaataaatacataaattaagcatggatggccagctcaatttaagtatgagacaatgtctattatcccctgttggtaataaagtactgttttttcagggaagttcaaatgttcatacaaaaataccaagccttaacacaggattggattcaggtttaaagttatcagttcactgacaatcttggttcacagtttggtgcctgwtaattgaattgtagatgtaagattatttataattactgcactcttacccttcattttaatctgaattcattaattttacataatgtcagtagtaggtcaaattattgtaacaatgaactacagtccctaaaaattatgacaaaaagaggccagggttaattttaatttacagttttcagattttataacctatgtatcttatatgtgatcaaggcatccagaattattgaatggcccctgctccartgtttcaattttaaatcagctatttgtaatcaaaacacaattatctgcttatgtgacatatttcttattatgttctcaggttactttctgaaaacctgttatctaaatacagtggcctggaattgtactcatctaagattttagcctgaagaaagctgggagtggactggcaacatagtgatttttctccttgtcttctagatttaggcctagaacaatatttgataccaacaaaggttgtcaaaggaatttgtctctcacatatttgtaatccatttttatctgccttataagtcataatacttctggtcttgggtctatacgtgccaggcatcatagaggcctagaactctggttctgagtttagatggacctgtgtttaaatcctactgcctctacctcttgatgatgtattcctagccaagtttcctaattccccatagtctcagttttctcatctataaaacagagataacagtagtatctatttcacaggcttgtcaagaagattaaatgatataactcactaaatatatgatgagtattgacattatagtgccctaagtcctttaatgtggtatacagccaaagcttttcaactttacaaattgcttctcattcaagatgatctaatcttttccctgacaaataattcatttctttatataactcatagaatttaaatagacattaaaaggtaaacaatctagctacattaatttttactaagatgtgaatcactggtaaccataactctccaagacttatttatgttttaagagatatctatcttttgaaatctgttaaatattgaaaatttaggcatgatgatgaattgaagtgaaagctttagacaatatatgtgaaaggtacatttggggcacattgcctttcaggttggttgtcattgctgagaggcctatcttgggtttagtttgtggaagtttaatctttatatcatatattttttccttttgtacttttccttcttaaagtcctggatttgttccaggatccctgacagataccaaaatctaaagatgctcaagttcctgatataaaatggtatagtatttgcatataacctttgcatataacatatgcatatcctcgtgtatattttaaattatctatagattacttggaatacgtaatacaatgtaaatgctatgtaaatagttgctatactgtatttttaaggaaataatgacaagaaaaaagtctatctatgttcagtacagatgcagtttattttcaagtggtttaaattcacaattggttgaatccatggatgtggagcccacagatacagagrgctgactgtacgttctcgaaaaaactgaatcatttggcaaaggcaaggtgacctacaatagagggaggagttagaataaaggtcaggtcagttgaaggttgagaaagcaagatatgagaagcagcaatgactggttttatatgaagctgtgtgtaagtaggggactgcaactgatgggatgtttatgttcccccaaaatccatatgttgaaattctaatccaaatgtgttggtacttggaggtggagcctttgggaggtaattaggtcatgagggtggagccctcaggaatgagattagagcctgtgtaagaaaaagagagctagctagctagctttctgtcatgcgaggatacagtgaaaagtcagcagtctaaaacctgaaagagggtcttcaccaggaactcgacccttctggcaccctgattttggacctccaacctccaaaactatgagaaataaatgctgtttaagccatacagtttgtggtattttgttatagcagccctagctaagacaaggactaaatttattctcaaggttatagaaatgaggaagttaattcacttaatgctaggtttggacatagaagtagatatgtaatagctcatttaggtaattctgtaggtaggatatagtccattttaagggaacataccagttatttggagattagctttgttttctagaagtgaaaagcactatggggactagtataaactgtacggtttaagtgaaaagaatgtccagatgatgtctgcatttcttataaagacaccaagtagggaagttggcagagctctgccttctacttttggtgctatagagtttagaagaaagagtaatggaaagaaaaaggaactgggtacacatcaccacgggtactcatttcagtacaatgcacaccgtggtgctgtaatacttaccccagggacatagattaaggtgccagtcttgcttctcagacacttaatggaaattttgactgtctgcagagataattttttatattatattcaagaaataataaatgtaataggatatagaggaatgaaactttctagttacagaaatatttaacatagtttcactttatcttcaraattaatccttaaaaacagatagaactgatggtcttatctctgagttrtagataaggaaaataagattgccaaaactcgtatagcttcagattcagaaaaaaaaaggcagatcttttttattctctgtggttctttctgtcatattacttatgtaaaatgacagtgaaacaaaatgcccaggctttggggcatgtgaagacggaataattttcttctagctaacacgttttttctttttttgagatggagtcttgttctgtcgcccaggctgcagtgcagtggcatgatctcagctcactgcaacctctgctttccgggctcaagcaattttcctgcatcaggctcccaagtagctgggattataggcacccaccacaatgcctggctaatttttgtagttttaactctgtctccmaaaaaaaaatacaaaaaaaaatttagccaggtgtggtggcacatgtctgtagtcccagctacttgggaggctgaggtgggaggatcacctgagcccaggaagttgaggctgcagtaagctgaggtcacaccactgcwctccagcctgggtgatggaatgagaccctgtcaccaaaaataaataaataaataaataaataaataaataaataaakaaataaaatacaagagacccaaacagataaaacacccttgaactatgaaggactaatactttctgatttcaaaatttattttaaaactacagtaattaagatagtggtcttaattggacagtggtactgctataaatatagacatgtaggccagtgtaataaaattgagtgttcaaaaataaacccttacctttatggtcaattaattgttgacaaggatgccaagataattcagcaaggaaagaatagtcttttttcaacaaatgtttttagtacaagtgtctatctccatgtgaaaaaataagtttgggcagctaccttaaaacatatacaaaaattaactcaaaatgggttgtagacctgggagaaagatcaaggtggctgactagaagtatcccgcagtcacctcctccacaaaaaaaaggaccaaaacagcaagaggataaccacacattgaatagagtatctaagagaacactgaaattcagcaaggaagtgacagggaccctctgaggcatagagtgagagggcagccaagcagctggcctggccaggatcggtttggaatgaggaaggtgtcttcattgtggggaaaaggtaggtgagagatccccagccatccactttcccaccacagatgctggtaatactagccacaagagagccactcagcactcacaggcccttagcctagtacagggagctgcctagggtctgtgcaagtgaattgttgcagagagggaactcacactggctcccactcactccccgagaccaaagcagctgcagcatggagccactttgagaacccaactcccaccagactacattattccctgaggcccaacgggccttgcattttcacatccccaaagtcccacttataacccctgtattcacctagaaagctgcaacaccacaatgacagctaaatctggcattgtggcttggtccccaggattctggcctatgcagtgcactacaccctggggaacaggtgatakagcacaccagggtggctgcccccagtactgatactccccagagccttagagctgcctgttctgggctgctgcaactcagaacaacctcccctccactccaacttcacaactgtgtgcaccttcatagggcctgaggacaggacttccataggcagactgtctccagtgcccacatacaccctccggatacctgcatattggcctgccccactcatagctgccaccactaccacatgctcatccatccggggccctgagggcaggcctgccctgatcgccactgttgatgcttgtgcatgccatccaggagcctgagggttcgtccgccttacgtggtactaccccgctttgcctgtatgcactattttgaagcctgaggatcagcccatccttctcaccaccacatgcccccttgtccactagccagaagactgaggacaggcctaccatgttcattgccactgacatatgcctacctgctgccatctgctgtcatggtcactaccactgcacatgtgcacttcccaggcccccagagacaggccactcaacctgctgctgtactcctcatctaggcattccatccaagatcctagggactggtctgcccagcctacaaacactacttctggtgtcttcactcccacgggcccaaggctgycctgccactgctattgtcactgccagtgctatgcacactgtccaggggcccaaacacatgccaacctggccctcctcagctaccactaatgtccaagcatgctgcctggggcttgaggatcagcctacctgggtcaccccacagccattactggtgccagtgtatactacccaagggcccaaggactggcatgcctagtttaccagcaacatcactcatgcccaaggaccagcccacctggtgaccttgtccccagcaagtccttgtcacagctgccagcaacaactgcagccagtgtcactgaggaactcactgctcacatttattacagccaaagaaatcatacagagactacactactgcactttcccagaataaaagccaaaacaccctactgaacaaacaataaagatctacttacagggaaaaaaatctttcccgactaaagccagtccataaaattggaacaagtgactattaagacagatgcagaggtatcaacataaggacacaagaatgagaaagcaaggaaacatgacacttacaaaggaacatactttttcagtgacagatcctgcagaaagaaaagtctattaaatgtccgaaaaaattcaaaataatgatcttaaggaaacttagtgagatacaagacaacacagataagcaatataaagaaataagaaaaataatttatggcctgaatgagaaatttgacatagatgtaagaaagaaccaaacagaaattgtagaactgaagaattcaatgaatttttaaaaatacaattgatatcttcaacagtagactagatcaagcagaagaaataattaaacttgaagatagagcttccaaaataacccagccccaataaaaacaaaaaaccaaaaaaattttaaaaagccaaaagaaaataaaaggagtgaagaacatccatgtgacacatgggatgctataaagtaaacagatatatttggattttcagaaggagaagagatgggcaaagctatagaaaacctatttaatgaaayaataactgaaaatttcccaagtcttttggaagatatagacatccagatacagaaaggtgaaagattcctaaacatatttcatctaaaaagatcttttctggtgcatgttttagtcaaacaggcaacagtaaaagagaattctacaaacagcaagagaaaagaattcagttacatgtaagggaagccatatcagactaacagcagattttccaacagaagtctgacagcccaagagaaaagagaatgatctattccaagtgctgaaaggaaaatactgccagccaaaactcctatatccagcaaagctatctttcaaacatgagggagaaataaatctgtcaaaacaactccagagaatcaaatagaaggaaattcttcctaactcattatatgagaccaacattacccttatgccaaaagcaggcaaggacacaagaaaaaagaaaagtacaggccaatattcctgatggacaaagatgcaaaactcctcaacaaaatctagcaaaccaaacccgatttcacatcaaaatgatcatttaccgtgatcaaataggaatcccagagattcagtgattgttcaacctacacaactcaataaatgtgatatgttacatcaatagaatgaaggacaaaagccaaatgttcattttactagatgcagaaaaagcatttgataaaattcagcatcccttcatgttaaagactcaacaaattaggcacagaaagagcatacatcaatataataagggtcatatatgacaaacccatggctaacatacatactgaatcgggaaaagctgaaagcctttcctctaagaactgagacaagrcaaagatgtctgctttcaccactcttattcaacatagtactggaagtcctagtcagaaatcaggaaagagaaagaaatataaggtatgaaaattggagaacaggaagtcaaattttccctctttgtaaacaacatgatcttgtatataagaaaacctaaagaccccataaaaaagaatctcttagaagtgatacacaagttcagtaaaattgcatttctacgcaccaataatgaactagctgaaaaagaaatcaagaaaactatgccatttacaatagctacaaaaaatacctaggaataaattaaacaaaaggggtgaaagattgctatgatgaagactataaaacactgattaaagaaattgaagaggactcaaacaaatggaatgacatcccttgctcatgattggaagaattaataatgttaaaatggccatactaccccccaaaattttcagattgaatgcaatctctatcaaaaatattaatgacattctttacagaatttgaaaaaatatcctaaaatttgtatgagatccacaaagaccctaattgcgaaagaaatactgagtaaaagatcaaagctgtaggcatcacaccacctggcgtggtgtgattcaaagtatactacaaagcaagagtaatcaaaatagtatgctattgatataaaaacagacacatagatcaatggaacagaatagagaagtaaatccacatatttacagccaactgactttcaataaagtatccaagaacatacattgggtaaagaatacactcttcaataaatagtgaagggaaaactggatatccatatgcaaaagaatgaaagtagactcctctctctcaccatagacagaaaccaactcaagatggagtaaatgcttaaatgtaaaatgaaaatgataaaaccagtagaagaaagcatagggaaacacttcaggacattagtgtttgcaaatattttatgggtaagactttaaaagcacaggtgacaaaaaagaaatataggtaaatgggattatattaaactaagaagcttctgcacagcaaaggaaagaatcaacagttatgagacaacctgtagaacgggagaaaatatttgcaaactatttatccaacaagggactaatacacagactatacarggaactcagacaaatcaacagcaaaaaacaaaacaaaacaaaaaaaaacccatttaaaaagtgggcaaagaaactaaacagacatttctcaaagggagacatacaaatggccaagaaatatatgaataaagcattcaacatcactaattgttagggaaatgcaaatcaaaaccacaatgagagatgtcactccagttagaatggctattatcaaaaagacaaaaaataacaaatgctggcaaagatgcagagaaaaggaaactcctatacactgttggtaggatgtaaattagtacagccattatggaaaacatcatggaggtttctcagaaaactataaatagaactgccatacagtttagtaatcccactactgagtatttatccaaagccagcgaagtcaggatattaaaaagttgctgacactcacatgtttattacagcacgatttacaatagctaatatatagaatcaacctaaatgtcaatcaatggatgaatggttaaagaaaatgcagtacatatacacaatgaaataaaaaaagaatgcatccgtgtcatttgcaacaacatgaatgagcctggagkacattatattaaacacaactaatcaggcatagaaagatcaataaccacatgttgtcacacatatgtgggtgcyaaaaaaacattttgagcttatggaaatggagagtagaattgtgggtgaggttgggaagagtaggggatagagaaagatgggacgaggttagttaacagatacaaaaattacagctagataggtggaatgggttctggtgttctgcagcaccttacagtgaatatggataactataatttattgtgtcttttcaaaaagctagatgagaggattttgaatgttcacaacacaaagtaataataaatgtttgaggtgattgatacacttgttaccctgatttgatcattacccattgtacacacattgaaataccattctacgttccataaatgtatacaattattaaatatcaactagaaaaagggaaaaaatggattatagacctaaatggagaactcaaatgatattaataaatctcttagaaggaaacatgggaatatggttccatttatatgaaacatcagaatgggcaaatctgtgaagactagattagtagtttgcctatsactgacgcagggagggagagagatgaagactgactgctaatggaatacaaagtttcttcgtggggtgatgaaactatyctaaaagggtttgtgatgatgattctgtaattctctgaatcgtctgtaaaatccactgaattgtatactttgaatgggttaattctatggtatgtgaattttatctaaataaaaccattaaaaataaagacaaaggggcctcttcacctctattatgttctccttcctgtgactgttttccctaaattctttccaagataatgctcagtttggatggaatattagttctccttttgctgaaattttcaggtaggtttggtggttttccatcagatatttttcaaaagagtgtcttaaatgggggttaccttttcctttggaacattatgaaacatttatacaaacagagctgtagatatatgataaaagatttaaaattcagttatggagctgggagagggctcaaatcacattttgtagctcgtatttttctacattattcctcgaaatacactcaatcaaatatatttaccaaaataactatgtactagctttcaaatccaacagcttaaaccacaaaacactaattgctacctcctttgaaccttgtaatacttctttttctataatttgcttataattaccatatgcaggcttgtataaagttaaatatatatgtttatatattacatatataatatatgtaaaataataatttgcatattatatatatttagcttaatttataaattgtaagtcaatagacgaaagctttttaaagtttcctaaagacctaacacagttcactacatatatgagctaattaataagtgtttctagttgggtagtagataatgccagtctctacaccagagagaaggggttgaacattaatgtgagtggcttttatcagtaatccagaaaattatagaatggcaccttgtatagtctgtgtattagtcccttgttggataaatagtttgcaaagattaaagatactctatacaatcttacagggctcatcagttagtagctcatttttgtacagaaaatggtagctctgtgaaatagaattggcttagaagactttgacttactggaattctaagtaaaattcaaaacgtaacttttcctctcacacatttttacaaagttaaaaacaaatgctgaaaatacttcatttggtacaagtattccacatgtgcaagatacaatacagcaataagatggaattttcaataaatgactaaacattcaaataagcatctttcataggaggtccttggcaggcagcacacttttcccactaaggctgctgttataaaatcatttttggagctattcttttggaatgtctgtccttctctcaaagccagtgtacaaattatatgaataaacagttttggtacttttccatcataattgtttataacaaaaattataatactccagttagtcaaccacttcattctagggttagctcactttggggtgcttccaaaattatatccactgttaaaacaagaagatatgctaccatttacagttcttaaaaatggattttgagctttgtaatatcactataacaaatgtgtatcttggttcactgccaggtacatgttgagtatccaatcaaatgttggtataatgagtgaatgaattaatatgatttttctgttactttaaagggagtacatctttagcaatatctgtatatgtttctgaaaaatcaattatttcatattcactgattgtgtgcttatgcttgctgtttgaactctttattttctgctcatggcttttgacctatttatattgacatacattctgttgatttttatatagctctaattgcaaaaataaaaattgaacaacatgtaaaaagaaactcgttccarcattttcaccagctttccatgccttctctgttatgattggtagagctctgtgatgtcttcagcctattttcaaatttctgcgtaataaacttcattgggcccacagatctgaatccattaagttactttaagtaatcagtgtccagatccttccttatttggtcatggtgttttgcactcttattgcagtggctgcttttctggtcctttgtagaaacagagattttctggagtcatttatagtattcttgctctccccatttaatacattgggttagatttctaatttaaaaaaaagcatttcttatttcttttagtgtttttcaaaacttgctatttattaattttttggtctgtcctttctttagcctcttatcccatgaataaataagtacatatgttgaaaaagaaggaaatacaatggatttatacacctttcaaaaatttctagggctcagcctctacagactcaaattttaattaatagtttacttttttttgtgccactgaaatttactaaggcatatgtaatgaaatatcaccttttcaggaagcttccactaatggggctcagctgaaatgccttctccttcctttgggtccccagggctttgtggctttgtttattttgcctcatcttggagtaatttgtgtatagttcttagttgttttaaacagtaataataataatagcaatgattagtattgattatttcctttgggtcagatacttgatgtgtaagatcctatttatttcttacaactatcttacagcaaaggtattattatcatcttcattttatcatatgtcattttatcacatgtagaatcataaatatatatgtgagtatatatataagcagaaacaatccttataaaaaccacaattttwtatatatatatatatatttttttttttgagttttgcaatatcactataacaaatgtgtatcttggtgtactgccaggcagatgttgagtatccaattaaatattggtggaatgagtgaatggatttatataatttttcagttatatgtataactatggtttttataaggattgtttctgctgataatgagaatttgagcaaattattctgtacaaaataaacctgggttacattttccccttcagaaccttttattttcttatatctaatcctcttgttagggacatttgaaattggcctctttttggtcccttgagacttactttatttctgcttggtgcctatagaatttttaatttaatattgaagtttaataaccttttcccctgatacatggtgtgccatttctaccttactattgaattctctatttcacagaaacgttcctgtattatatctttgaatamttttctatttcatttgttcagttctctagtttaggaaaataagaggaaaatatgaaatggttagatgctaagtagatataagacattataagaagcaaagatgaaggaaatgtatcagatgtacagttcagaacaagtagtgtcgaagaggtcagarcgtctgggaaacccaatcaaaatgtttcccctgaagatctccgtattgtgtcagccatcatagactccctacaatagtacaaatagaacactgctccttcttaatcgttttttaagttagtatttaaccctcatttartgtgtctttaccatgtgctaagtcctgtaaagacaaaagatattaatgctttagtctaaaatctagatttttttccaccaactttggattttaaaaagttttaagcttccagaaaagttggaaactagcaagatgttaaaacaaatctagattcactgattactctttaaaattaaattccactgtcttctaaaatttcagcatgtatctccaaagaagatgattcatctacatagtcacagtaccccccaaaattaactttgaaagtatattaccaaaratgtagtttatattcacattttcccaattttctcaacaattttatttatagattgtctctcctaggatccaattgagtattacacattgcatttagttttcatgtttctttaacatcctttattctaaagtgtcctgatgttaacattttttagagttctacaatctgaatttttctgattgtttcctcatgattagattaggttaaatgtttttggcaagagctgtatcacattaagtggtacaaaatagtagtttatcctattctttgtaatgttatcttaaattacttagttaaggtgttggctgtaaatcttttcgttgaaaggaaaactttcctttggtaattaacaagttatctgtagggtgacactttagaccatatgagcataccgttttccaacaacttttcattgaatggatttagaaatcattaatgatccttgccagaatcaattgtattcgtgttggcaaaatggtgattttctaattctactcctaatcttcttaagcacaactatgacctcattaaggtagctgtcccaaattttctgggcctcttttttttttaaaactatctggtagatacagtgagatctcttttacaaaaaagaaataagtacagtgttaaatgtctaatgagcatcaggaacacaaaaaaattgtacctacattgacctgctctttaacttcttccaatatggaagagatagtcagtgagcacctgagtgatctttcaggaaagcaaagacaatccacgtaacatgtttgtctctagcactcatccttggatatgtctcctttccttcatgtaaacagttaagaaacacccaattgtaaatataaaactcattctgaaagaagagggggagcaatactgtaaggacttcaaatttcctactctattattggaaaatggagcattttttttttttaatcggccgcagggatttttgttagtgtttttgttttattttaattaagaagaaaacattaattctatgaaacataagccatttgctttccatatatttggcctggagtagactctggacattgataatktttcaaaacatctccaggtgattctaatgtacagccaggattgagaaatttttgaagaacaggtaactccatcttgaaagatgggtggaattaggacatgtggagattgccggaggtaactttaggtgaaggaaataacataagcaaagattaacctactgatggcaaggatttgccattcttttccacaaatgaagccttttttttctgttatgtttacctgaaaggtaattggaaaaatgatgccttaaagttcactaatttgtgagaatcataggcaaaagctttcctgtgatattagagaagagtaagatattgttcttgataacatcctgcaactcatcatttatagcataataagcccwtccactctgattctgttagacaggcccatccatggcaagatattaaacaaaacaggatttattgaaaacatgtctgataatagcaatgatattgaaaaagagcaaaacagtacaatcctggtttttatgtttctgctttgaccacaggcttaaaatgtgtatttcaagcctataaatattgattgtgagacacaagaaacataatataaatattttgaaggaatagtaattaagagcagtgagtcacaggtagctaccagatgaaaataataaacccaactttgtcagggcttcagatcagagtaaggtttcaattttgatatccacggagaagagccaaattgaagatgaatatgagtaaatattgatgatccatactactgaatttgtctggtgataaatgtttcttaggtattgcacatattccgaactcataaatacatatactacataaaaacatggaaaaaacccttcagaaatgttttcctgtattatattttcagaaagtcacaagttttagagaaatcatataagcagaatggcagacagcatgggccatatttccatgtcaaaagtaaattgaaaatctaaattagtacctgaggttaaaaatacttatgtccacagattccagaatacaaaggaaaagtaatgccagccaaatctgaaacataaacaactataagttttctttgtatttgaaaatatggccttggaactctgtataagaagatgcttacttcataaacatacatgtgcaagtgtctttttcatataatgacttctttaagagtgccctccaatgatatgacaagatgctgaccgatgttatacctcatttcctgaaagtttctaagtgctctatgatggatcctatggtggtgagagtcaacaacctttgtcataataaataggagatttttctcacaattttcgaagtaatgtgacattaaaaataaggataggaaggagacaaggaaagaagaatcagtaaagtagtaagaataattagtattgtgtcaggagaactaaattctagttgtgtctctgtcaccaactagctagaaactttgggtaaaccatcttacctattgacttcacttgcaaaatgaacattaggctgtatttcaataatttccaartgtttgaagaagtagaacctttatcaataaagtatagtatagaaaactttctttcctccacttttaaattattcctgaagttctgaccctttttcctattctttactttcaaatgcttttaatttcaacttctcccacttgctgttacaccctaatatatctaatacgtctctacaggtatatttctgtgcctttcagtagccctctatgttcatctactttttaattttttttatttcaataggattttgggaaacaggtggtagttggtkacatgcatagattttggtgcacccatcacccaagcagtgaacactgtacccagtgtgtagtcttctatttctcaccaacccccatcctttcccctgagtccccaaagtccaatgtatcattttgttttattactttttttcttaaaaatattcagatattgtatcttattactcctttaagctactcatccattctacatgttttccttataaacttttcaaaatggtagcaattgttttcacaagcagagccttatgggaattttacatgtgtggaagaacataataaatttggaatttgctgatgatttcacttttaaaaataaataaatagaacctttttctcccttgaatgaactcttacttggaatcataatatgtaaaacagatgaaggcaaagatgcaggagaagttcttgagtcctaccctttcagccattcccatccttatgagactgacatggcactgccacagacacccaagggccttgctactcaaagtgtggtccaggaatcagctgcatcagctggttagggatacagaatctcagaagcttatttgagaatcacaagctccagtgggacctactaaatcaaaatctacattctaacaggccccttccacccaccacccaccttcattcctccctaccccctttttcctcaccactatgatctggttcacactaaagtttgagaagctccgctctaaatacagatgcaactccatttgaaaagtaactactggactagttaactcatagagatgaatgatgttcattttgtcctttcacacaccacactgactgattctcagctggaagcccagtgtgcaagaagaacaagaaatagtggcactaatgccatttttagtcttatagaaatataggaatatagaatgcagggttttattttatttagtagacagtccagtggtctgtttattctacaacactgactcaaagaaagggactayatagtggcctttatgtatattagcatatcagtcagggccccagcaggaacttaatgccacactcagtgggagacttcttaacaaagttgtgggcaatcttaaggaaaccactaagggatggtgaagccctagggactagcaatggtgggaaccactaacactgtcaatcttgatggagcaagggaagggatggaacctagggaaagctttaacagtgggaagggcccactgtgggatctcttgccttaggtggragaataagccactgccaaatcacagatcagcagagagcaaaccaagagaatgaataaaccagactttctctcctctcccactctggtcacctgccatcgtttaccattggccaaacccaactggaaactagagtgcaggggaatgatttgatgcagtacagaaaagtcatcttcctggggtacagagcagggtacagaaggtggaaggtggttctgaagaggaaattcagaatatctaacatgataaatagttggatttgtaaataggaaaaaaaaggtagtaaagtaaaattctaatggaaaggtttcatttgtgcttgttttgtttgcatatatgttcatacacttatgtgtgtatgtatattaagcacaagggggaatttctaagacatagtgagatgtagcagaaaatgtgtactttgaagagactttatactttcttctgctgtagaaagttttagataagagaacgttgttaatctgtatttatctagcacatacccttttgtaggcactgctaaggacactcaagtataaaacatggtccctccctcagagaactatgatcttggttgaagggcaaaaayatcaaatatgtttataatatgcacatggaatggaatgctttatttcgttcattcagccaatatttattaagcacctgctatataccaggcaatgtctttaagtcragtcagaaattcaaaacaaattccctgtggacagggaatttgtaatcttgtttgaaaggtggactttaattayacatttcaagcatgataagtgttttgaaaagagaaatayggagttgtttaggaatttgtatcaaatacacctaacatattggggagccaaaaaagcctcctcgaagcatttaagaagtataagtaggaagttattcaggtcatagaggatagtaaggtgaagggcagctgggggcagtagagatgagggtgtttgcaggggcgtactagtagaagggcagagaagatcatgtgttcaaaaggcccagggagaaaagagatcatggcatatttaacaaagtgaaagtaatctattataactggagcagaaagtaaagggagtgtggtattgtcctttatcctacagcactagaaaggtattaaaatattctaagtaaatgaatcactccatcaaatggaaaaattatgaatataaaatttggacttctattattaccattttgaactaaaactttatgttgatgtgtttatttctaaagtttttctgagaaataagcacaagaatgaatttttctcaaaattttttccgaagtttattttttacttctaatttaagaaaatagctgaattgttcgsaattttctgtcatgttttgctgtatattaaagtaataacatcttttaaaaggaaattggcaagtgttctttattagcaattttataaagatagaaccattttaaattgattgttgccaaaagtagaatacaaaaagtatcacagaattatgtgaataattaggaaataaattttacacctctttatgtgtatgtatgtgtgtattcttactgctggaatttcttaatctctgtcagcaatagcacttactttcaaacttcttcatctactgcctcagcttactgatacttctatatcaatatagttattttgcctttctggagaaggtaaatcacaaccaatatgtatttctttgaattctagccaagcaaaaaggacatgcagagtccctcttgagctagaagcgtttatgcagatggtatcatttcatacaaacatgtattgtcaaaacccatcataagatcactgtcagaattactggggatcctgtcaatcatatgtttctccatgttattatttttccaagtatcttctttcaccactacagtagccctgatggatattaacacagaaaaaaggaatagtgccatcaatagtgcttcttttcttccaataacaatatcatcatttttggcacagatgagagataccttatttcttaggtgaatgtatagatggagggacacaactgaaagaatgacttcttaatcagcttacaatgtcatattttcaaactttatggattcagtggctcatgttaaattattttacagtagacatttatatatatatgtatataatactttaagtcttagggtacatgtgcacaacgtgcaggtttgttacatatgtatacatgtgccatgttggtgtgctgcacccattaactcgtcatttacactaggtatatctcctaatgctatccctcccccctccccccaccccacaacaggccccggtgtgtgatgttccccttcctgtgtccaaatgtcctcattgttcaattcccacctgtgagtgagaacatgtggtgtttggttttttgtccttgcratagtttgctgagaatgatggtttctagctttatccatgtccctacaaaggacatgaactcatccttttttatggctgcatagtattccatggtgtatatgtgccacattttcttaatccagtctatcattgttggacatttgggttggttccaagtctttgctattgtgagtagtgccgcaataaacatacgtgtgcatgtgtctttatagtagcgtgatttatattcctttgggtatatacccagtaatgggatggctgggtcaaatggtatttctagttctagatcccggaggaattgccacactgtcttccacaacggttgaactggtttacggtcccaccaacagtgtaaaagtgttcctatttctccacgtcccctccagcacctgttgttccctgactttttaatgatcgccattctgactggtgtgagatgatatctcagaaataataccacacatctacaactatctgatctttgacaaacctgacaaaaacaagaaatggggaaaggattccctatttaacaaatggtgctgggaaaactggctagccatatgtagaaagctgaaactggatcccttccttacaccttatacaaaaattaattcaagatggattcaagacttaaatgttagacctaaaaccataaaaaccctagaagaaaactaggcaataccattcaggacataggtatgggcaaggacttcatgtctaaaacaccaaaagctatggcaacaaaagccaaaattgacaaatgggatctaattaaactaaagagcttctgcacagcaaaagaaactaccatcagagtgaacaggcaacctacagaatgggagaaaatttttgcaatctactcatctgacaaagggctaatatccagaatctacaaagtactcaaacaaatttacaagaaaaaaacaaccccatcaaaaagtaggcgaaggatatgaacagacacttmtcaaaaaaaagacatttatgcagccaacagacatgaaaaaatgctcatcgtcactggccatcagagaaatgcaaatcaaaaccacaatgagatatgatctcacagcagttagaatgacatttttcaaatcacgaagaaacccagaaaatttgtatatagtaggctctgatcttgccaaatgtgggattattctgatacatagtttatgataaattacaccaattgctcatggtctgcggctgcttataaagatgaaaatttgtttgtccattagttattagttaacagtagatatgaataaatttatgaatatatgtatataaatttgcaaatatttgatccctctgaaattacaactgaattctacttgtttccaaaatgttttcaactttatacattttcatttattcattcatacattgattgactctacaaatattcactgaaacactactgtgtgttaggtcccatgctagacctatttttaaagttgacttttaaacagatcctgctttgaaaaagctttcagtttagaaagggggtaaggcacggagacatactacaagagacaatgtgctaagcaccaaaagaaagtcttgtgcaaagccattctacatctgagacaagtgaggttatttctacttgagagggtagggttgcacacgagggacaattttataatggaggtgacattgggaaagcatctcccagaatggataggacagagacatagcaggattggagaaaagcacatttttccagcctgtgaggaaagtattagcatrgagtgtgtgctcagaatagagaagatgcaaagcatggagtaagacaggatcttgaaaaggcttggaatggtgaccagactgcatgttctgcaaatggaaaaataaccaaaaactattattaaacataaatagcaaggggattcttctcaggaagaaactaatagtatggtggggattcatttgtttgcaggaagggaacagttgcaatacagtggtgactataaatttttatgtactaatttttcagtatacagtagaccattgagcaacacagatttgaactgtgtgggttcacttatatagattcttttttcaataaatacattggaaaatgttttggagatttgcgacaatttgaaaaaacttgcagatgaaccttgtggcctaggtatattgaaataatttaaaagttagttatgtggaaagcagtgtggtgattcttcagagagctagaaacagaactaccacttgacccagcaatccgattactgggtatatacccaaaggaatataaatcattctaccataatgatacaggcacacaaatgttcactgcagcactcttcacaacagcaaagacatggaatcaacctaaatgctcagcaatgacagattggataaagaaatgtggtacatatacaccatggaatactatgcagccataaagaactacatcacatcctttgcaagggacatggatggtgctagaggtcattatccttagcagactaatacaagaaaagaaaagcaaatattgcatgttgttacttgtaagtgcaagctaaataatgagaactcatggacacaaagagggaaacaatagacactggggcctccttgagtgtgcaggttgggaggtgggagaggatcagaaaaaaataactattgggtagtttgcttagtacctgggtgaygaaataacctgtacaacaaacccctgttacaaaagtttacctrtataacaaacctacacatgtacccctgaaccaaaaataaaagtttaaaaaaatgtagatactagtctgtttcatcatttactactataaaatatatacaaatatattgcaaaaagttgaaatttrtaaaaaaacttatgcacaaaaacactgactctacccggcactaccacttgcagttgagagaaatgtaaacaaatgtaaagatgtagtattacatcataactgcataagattatagtacatactgtactattgcaataatttcataaccacctcttgttgctgttgaagtcctattgtatcctcttaaaatggcatgtgatgctaatcagatctgcatgagcagttcatctctccagtaaattgcgtattacagtaaaaagttacctctcttggtttttgtgtattttttacagtgtttagtgcaataatgtaattcttgaataacaccatggggcccacatgaagtcccactggtgatgctgaatgtgcttccttgaggcagagaaaagtcatgacattacaagaaaaagttgaaatactttatacgtactgtatattgcggcctgcagctgcagttgcctgtcatttcagacagacgattcatcttgtaaacagacaatgtaaacttatggtattgataaatatggtacagtactgtatatgtattttctcttttgattttcttaataacattttatttttctctagcttactttattgtaagaacataatacataatataaaatacaaaatatgtgttaatcaactgtttatgatattggtacagcttctggtcagcagtaggctattagtagttaggtttcaggggagtcaaaagttatacatggaatttcaactgcatgggggaccagcgctcccaatccccatgttgttccagggccaactgcacttttttcattcttaataatttactctttttaatctctatatggtttataaaacttttcatttacataattgtttcttaaactcactcaatacaaagaatcatttgggatgcttgtaaaagatagcatactacagttattatagttattccattatcttccacagaaaatttttgcttagatttacctacattcgtcccattctttgtttcctatttttttaatcttaggttattctgggttcatttttctttgtttcagtaatgcacttttagaattttcttttgtgttattcatggagaagtctcttggtttgtgttgatctcattagcattataaaaatatagcttttctgagtgtaccacactaggatgacagttattatttctcaatccattgaaaatattattccattgtgttctggtttctattacttctatatagtgtcagtcttctctctctgcttttatgatctctgtgctatctgtggattcatgactaagygtctaattctggattttgttttatttatatttcttggtggatgctgtgcttgatatcgtgagttcatatttttcattacttcagggagtttcacaatctggtacttcaaaatttacctttccccattctctttattctccccattctctttattctctccctcaggtactctgattaatttagattttcacattctatatcatatattacttgatctcctcatattttctactctttagctctttgttctacatgttayggtatttttagatcttccagttctagtttatttactttctttagtggcatctaatattttatttaacccatctgctgttttgttttactttcaaccattttttaaaaatttataaaggttctattttcttttccaaatatccctcatcagtttttaattggctctcattgtattttgtgatgtcattctttacttctttaaatgtcctatgtatattttatattccaagtcgtaaaatctagtatttgatgcccttggtgagctaaatctattatgttttttcctacctactctcatttctggtggtaagttttattgtaaatttggtgattgttgattgttaccttatatttgactttattttattctgaggaaaactaggatgcctaatttaaagatatattccatgtaagagaaggttcatgtgtttccacagggattttggagacattacaaacctagaacaaatttagccccttccagggtttcaggtataatccaagaatctcattttcagcttatcttccttgctgctaaggtaaagctaaatctccaaaccacagtgcagagactggyatttaccctcaagctatcctatcttaagtatgcgctttcagctcatagttaagcttttagctcaacgtttatgcttttatttttgcttaggccccttggagattttcctcacctattttaagcccagcagtgttatgaaaattatattttatgcaaaatctactttttttgtttrtttttcatgaggatccttcyagcctactgccagaagctgaatgatagatattttttgcctatagcacaatgacagtctggaaattatcaagttgttttgatcaatataggtaagccaaactggaatactttagaataaacaaacaaaaatgaacttggcatctgatttgtccagtttagtagtctctactgattcttgctactttgtgctatttggatgcaacgtaaaatattgtattagtaaaatatttaaaatgagcccagatgatattatgctaagtgaaataaaccaggcacagaaagacaattactgcatgatctcatttatatgtggaaactgcaaaaaggctaatacatagaagcaaatagtagaatagcagttacaaggggttggggtatgggagaaatgggcaggtgttggtcaaagggtgcacatttgcaagtataagatgaataagttctagggacctaatgtacagcatgatggctatagttaatgtactatatatttgaaataggctaagaaagtagatcttaaatattctcgccacaaaaaataaatatgtgaaatatggatatgttaattagcttgattatggtaatcaattcacagtatatacatgtatcaaaacatgatgttgtacacattgaatatataaaatttttaatttatcaattgtaccttaataaggctgaaaaaataatttctcttttacagagtggtgactgggccactcggagactactgcatagctcttctcaaagcttctttttctttattctaatatgctttgtaatggaaaattgaagggaaagtagagaattgactcattaaaaagtctaagacattaaaagatattttgtctatttttccaatagttaataatctttacttacggttgattaagttcatataagttaaccattccattaatatctatagagtgcctacatggygtgtactgttccacatggtagaaaacatagcaaggaacatgtagatagaaatcgctactcttatggatctagcatcctatcatcatgatagacataaatgagaaaaggtagtaaaataaatagtacggtagatagyaagtgctaaggagaaaaataaaacttggaaaaggaatcaagaatggtgaaagttgttgtaatattagatgggtatatggattcactgcttctgagcattttcttaatgcattctgtggactgttagatcacaggcggaccactcccataatctagtgaacagattatttaggagagtgagtgttatgggttaactgtgtacctcttcctaagatactttgaagtcctaacccccagtatctctgaatgtaaccttatttggagataagtttctttacagataagtttctctattatttctttacagaaataatcaagttacaatgaggccagtagggtgggccctaatccagtatgacctctgtccttacaaaaagggaaatatttggacacagacacaaacacagggagaatgccatgtgtaaattagagttatgctgctgcaagccaaggaactaccagaacctaggagagagaatggagatctgtcaacaccatgatctcagactcatagcctccaatayatatggcagtaaatttctgttgtgtaagccactcaattcgtgatacttccttacagcagccctagcaaactaatatagacagcttaatagtatgtaggacaatagtaggtgctgagctaagggctctaaaattacttctagcccactgtatagctgctttcatttaatttaacaaatatataatgtttatgataaattagggactactgtagaaaatttgtaaatattaaccaatgtgcatccaaataacaattgtgttatataggttcatttattattttaaagatgtcaggaaaacattcaagcaaacattgcatggcagggcagacattcttagaccttatataggggattttcctgagggtgtcatataacacatgcacacttatgcaagtttttaaaaagctcattctctagtgatagtgaaagacgtaggcaaaggacatgctccagacaagaatacctgtatcctagtcctgcacctctgtttcctgagccgtagaccctggacacatcatttctttcagcctccatcttacacctcctaatactaactaggttactataaaattaagtcagatgataattttaaatgttaaaataaacatcaaaaagaaataaagtctctaatacatagtttgccctagagattttcatttttagagggattattccctcaatattttctcaaataatgtattaatttatacactgcttgtgaacactgagatttaagaaaccatttaaattatttagagaatacttgaaaggctttaaaaccatctgactggaatgcaaactacacatacaattactttcaaagagataaaaattgatatgaaattataattcataatgattaatgttgaacgagcataaaaccaactgcatatttgtcctttaagcaaagctttggattcagaattatagattaaaatatgtgttaatcttgggacttgcctttaattaatttatggcatagaacctaaaaatgggaagtatattaattaaaatgagagtgaatatagtcagactgggttgggaaagamtcttgatggattcttttcaccacattcttagtatggaggaggtgcgagtctagatcacatctcaagtgtatgatggagttgggggaaaatgatttcttaccaagacctggtatattagtcaaggtaagtattgctagctgctataacaaacaatcgtgaaatcccagtcccttaaaacaggaaacatttatttcttgctcacatcataggtctgaggcaggttgggtgcctctactgagcagccctgctgcgagagagactgtggaatccagtctcctatcttgtgattttaccatcttagacaagtggcctccatggctactgaggaaagagtagagagagaagtggagaatcacataggctaaactcacattccaatggtcataactcagtcagtatagctgtaacctgacaagaccctgaccaataacgttttgctttctgctatcatcatatgggcctttcttcagtgctctaagtatgcaatttttcttttccttctgggcctttgaactttcctttacccgtcttggggcacttccttgccatatcccaataacccacgtgcttttcaccagcacagcaagcttccaaggaatgtttcttcagttgaactctatcatcttgtcaaggagttttttacacgttgttcatgttcacgggaatgtctagaaagacaaattctgattatctgtgtctgagacattttgctagtgcaaagtcaaccttcatcatgatattatgatttatgtggcactttttatgctttataaaactgtttttaattgataaaactaagcagaaatgtatttatagacagttgtttccagagtttcactgttactgaaaatgctgtactgaataagggtgtatttttaatctgcattccatgcttatagctatataagctttatgaagcttatatagcttcataaaatgtattataaattcttcaacataatttcatagttaatagtttcataattaatagtacctgttggtagtatctttcatatgccagctgaataatcattatcattgtcataatgcttaataacaacaataataattgatagtagttgttgtgtacatgtatatgtgggtactggcctatgcttttgatatgtattatttcatttaaacttcattgtactagtcagggctctctagagggwcggaactaataggataaatgtataaaggagagtttattaagaagtattaactcacacratcataaggtgaggttccacattaggacatctgcaagctgaggagcaaggaagccagtctgagtcccaaagctgaagaacttggagtctgttgttcgagagcaggaagcatccagcacaggaaaaagatgtagccttggaggctaagccagtttaatatttcaactttcttctgcctgcttttattctggcagcgctggcagctgattagatggtgcccacccggattgagggtaggtctgcctttcccagtccactgactcaaatgttaatctcctttggcaacaccctcacagacacacccaggaacaatactttgcatccttcaatccaatcaagttgacattcagtaataaccatcacaagtccaccccttgtcaacttgaacccatacacatctcctgaaatcatacataatcttcaaataaagacaataagttcataattacacataacataatacaactatcctttgtacaaccagaaatgcaccaatccccaacccaagtgctatcacataaagtaataacacttaaatgctgacatgaaatcaataaatcttatgtcacatgataaaggagaaatgaatgaaatgaagatattttcttagtacaagtgtatacatgcacaaacatgttcttaacaaaataaagaggaaatactcatgacaattacactcctcatttctgcaactggtcatatggtcgtagctggtattgatgactaccttcttctactacccattctgtattccctttgccttcagcaagcacctcagcaggccatggttttttacttggtgtagtgacccaaaccttcagtcctgaaggatctgggctatttgtagtcctgcctggattgtgttcttctagtttcccattgaccttaatcacgtcacagggcatggtaatactaaaagacactctaagggatctcctgtattccacacatattcttccttacctccattttgaagtagtggactgatttcatcttgatagtccaggtcagtcaccccaacsaaacactgtaactcccttcttagcctccctaacttaccttctaaaggtaggaggagctcaaaatatccaggtggcaatcttaacttccagcttaatagaattgttgcattcttcaatactttgcatccttcaatctaatcaagttgacattcaatattaaccatcatattcatcctgatcctgttctgttaaaattatcattatcccagtcttacaaatgaggatgctaagaccctgagagaccatgtgatcagcctgtcgtcactcagccagcaagtagtggaactaggctttaaagtcaggccatttttagtttcaaaagtctcactcttttcatctttccacaccatgtatggaaagaatactgagtgagacaggccccaatcagggctctcttaatttataaactgtgtgatctctggcaactcacccaaccctcccttatcttagcttccgtgattacagtaattgtgattgtgtgttccacaccactgcaggacgataaaatgcaacaaggtatgtggaaactttgaaaattccaacatgctgtacaaatccaagggataatcagaagattattattgagtcacagattgactttgttcgtcgagcagactcttggcaaatattaaggatatgcccagagcactcaaatctccaaattggaaacaaagmaatcatataattcctcttataaaatatagcagtgcgactgaaaatgtaagggcccctttacatctctaatgttttcacgaatgttggaggaaaatcattaataaagttgttaaaacaaatactttctggagtatttgttgaaatagctctgtgattcatctttgattaatgtatttacaggctacttgatggacttgttcatgtgctagctctgggattccactgaactccacattctagtcttcattcttttgaaaacatattctggcacagagccgtctatggtgggctgtgtaggtcaagaggtcagggttcaatccttgccttcttgcgagtttgccttgtgatgtcatgcaagttgtcttcctctccatgccttcttttcatttataccattgagtggatggattggacaagatgatacttgatacaataattccccagtgtagttgatattttgaatcatgtgtaggtgttgttaaaataaaaaaattctgaaataaggccacatacctgcaatcaactgatatttgacaaagttgacaaaaataaacaatagggaaaggacaccctatttaataaagggtactgggaaaattggctagccatacacataagaatacaactgaactcctatctctcatcataatcaaaaatcaactcaagatggatcacagacctaaacataatacttgcaactataaaaatccttaaaaaaaaaatctaggaaaagcttttctgaacatgggcctagtcaaataatttatgatgaagaccccaaaagcaaatgcaacaaaaccaaaaatagacaaatgtgactttatcaaactaaaaagcttctgcacagcaaaagaaaaaaatcaacaaacagacaacagaacgggagaaaatatttgcgaattatgcctccaacaaagaactaatagccagaatgtacaaggtactcaaacaactcaacaagaaaaaaaaataaagagctacattaaaagtgggcaaagggcccgagcacccgtaggtcggattctctggataaggcaccggaagtgaccgcctcgcggctgcttcctctcctggagtccagagtctcgctgttccgccgcgatattcagtaaaccactgggagtccggcagcatgaaggcagcgcgccctcccatgactgcagggaagttcatggtggtcggcggcggcatcgcgggcgtcacttgtgcggagcagttggctactcactttccatcagaagatattctcttggtaacagcttctcctgttatgaaagcagttacaaatttcaagcagatttctaaaatattggaagaatttgatgttgaagaacaatcaagtaccatgttagaaaaacgctttcccaacatcaaggttatagaatctggcgtaaagcaactgaagagtgaagaacactgcattgtaacagaagatggcaatcagcatgtatataagaaactctgtgtgctggagctaaaccaaagttgatatgtgaaggaaatccttatgtattaggaatccgtgatacagacagtgctcaggaatttcagaaacagcttactaaagctaaaagaataatgatcttagggaayggtkgtatcgcacttgagttagtgtatgaaattgaaggctgtgaagtgatttgggccattaaagataaagctatagggaatactttcttcgatgcaggagcagctgaattcttgacttcaaagctcattgctgaaaaatcagaggctaaaattgcatataaaagaaccagatatacaactgaaggaaggaaaaaggaagctagaagcaaatctaaatcagataatgtaggcagtgcgttgggaccagattggcatgaaggcttgaatcttaaaggaacaaaagagttttctcataagattcaccttgaarctatgtgtgaagtaaagaaaatctaccttcaggatgagtttagaattttgaagaaaaagtccttcacttttccaagagaccatacgtcagttacaactaatacagagatgtggcctgtctatgtggaattgaccaatgaaaagatatatggctgcgatttcattgtcagtgctacaggagttacaccgaatatagaaccttttctccatggtaacagttttgatctaggagaagatggtggcctgaaagtggatgatcatatgcacacatcccttcctgatatctatgctgccggtgacatctgtactacatcctggcagctgagcccagtctggcagcagatgaggctgtggacccaggctagacagatgggatggtatgcagcaaagtgcatggctgcagcgagttcaggagactctattgacatggatttcagctttgaactgtttgctcatgtgacaaaattttttaactataaggttgtactgctgggaaaatacaatgcacagggcttaggttcagatcatgaattaatgctgagatgtaccaaaggacaagaatacatcaaagtcgtcatgcaaaatggacgaatgatgggagctttcttaattggtgaaactgatttagaagaaacatttgaaaacctaatcttaaaccaaatgaatctttcatcatatggagaagatctgctagatccaaatattgatatagaagattattttgactaaaaatggaatttcttcaagaatcatataaagttccaaatgacaccagaaaaatcacaagtcaataaaatgaatgactgtattgagttaatgatgaccacactgaaaattacagaagtgataatgatattagtggaaaaatataaaaacataaattctaagtttgaaatcagttcaaagtttatttatagatatatctttccaatacaacactgaccacttggataaaaatcttaagttatttatttctgtgttttaaacataaatatgtttacttgtgatttagctttggagcaaatttaggtaagttatctatttagccaaatgtactctagtagattagaaccattctttgtgaaatgtcaaaatatggctgtggtttcaggaactttaaaatcggttgtattttactttaaatagagatgtagcaatatctcgtttgctaatatttatattgatgacttactccttttttgttgaattgtacttctggttttataacctgaaatcatctacaagcttgtccaactctagcccacgggtcraatgcagcccaggacagctttgaatgcagcccaacacaaatttgtaaactttcttaaaacttgagatttttcttgcaatttttttttaagcttatcagctatcgtcagtgttagcatgttttatgtgcggcccaagacaattcttcttccaatgtggctcagggaagccaaaagattggacatccctgatctacatatttaacttaaagtatcactcagtgagcctctgtcagtgtaatattgctttcaaaaagatagttatgtcaaaagaaaaaatatagctaagtatataaaggcataaaaaacttaagacaattatatggacttattctcaaatattttacattttttgtaaactttcttaaaacatgagatttttcttgcaattttttttttaagctcatcagctgtcatcagtgttagcatattttatgtgaggcccaagacaattcttcttccaatgtggctcagggaagccaaaagattggacatccctgatctacatatttaacttaaagtatcactcattgagcctctgtcagtataatattgctttcaaaaagatagttatgtcaaaagaaaaaatatagctaagtatataaaggcataaaaaacttaagacaattatatgaacttattctcaaatattttacaattaaagggttttacataaaaatttttcccttgttttatactggaaaattatataatcgtgatctctaattttcaaacattctcaaaagtttagatcttcagagataagctctgaaaatatagatccatacatataaaatatctatgaaattcttttaaaaactattgtctaactacaaaaatagtggcatatacatgcataaaccatctttaattagaaaatttagtaacaktcatgtcaggcatcatcgatttttcttttcttagctcctgtattcttagaaccagattgctgaagcatgtttgcagccttcttctggaagttgcctgaatttttttcctccatctttttatcaccttgttcagaatgacaagtttgagacgattcagcctacaaaaaaaaaaaataacaaagcaagcaccttggtaaaaatccagctattcagttttctcatgagattaaatatttcaaaatattctttctgtatcagttggctttttaagtatacaggggtctagttttttatctacaaatttctattcaaatatgagctctattttgaataaaaggggctacattgtgagagaagttctaaagacctcaaatgtccttagacacaatggcacttgacttgacatgcttttgcagacttgatagtatttggtttaaaacagtggtttctaaccactggaacagcagaaacagacttctcaactattagtaatcacaaccaaataagagcagagtgcataacaaaattagatattaaaacagagtcctcccattccaagaaactggaaacccctagtttatgttaaaaggccagtctaaattctttcacttatatctttacagaaaactatattttctctcttccatacccagaaatctaatcagaaaactgacttttctcatgttcaactggacctaggggaatatgacagaaaagcatcccataggctttaatatactttttaaaatatataaaactgaaaattaatagccatttaccctgaaagagttctgtgtggactttgtcacttgcacagtaatagcatgtgcctcattgttcagaagattagctttaggtcctattttcaaataagaaatggtagcataagctgtaaaactgtagtcttctctgcagaaaatgccaacaataagaaagcttttgaaggaatcacggaaaacaaatttataaaagcaataactatatgcgcagtaatttttaatacattgacttgaaataataaaatttacaagaatgcaaataaagcctttaaagaaaaaaaaagtgggcaaaggacatgaacaaacatttctcaaaagaagaaatagaagcagccaacaaacacatgatataatgatcagtatccctaatctttggagaaatgcaaattaaaaccacactaagacatcatcatacaccagtcagaatggctattattaaaaagtygaaaaacaatagatgtttgtgtggatgcagagaaaaggaacacactgttggtgggaatgtaaattagttcagcctctatggaagacggtatggaaatagctcaaaggactaaaaatagaaccactgtttgacccagcaatcccacttctgggtatcattatattaaaaatgacacctgcacttgaatgttcatcacagtacctcacaataggaaagtcatggaaccaacctaagtgtttaccaactgttgattttattttaaaaatgtggtatatgcatgccaagtaatactatatggccatgaaaaagaatgaaatcatatcctttgcagcaacatagatggacctgraggccattatcttaagtgaactaactcagaagcagaaaatcaaatatcacctgttctcacttataagtctgcactaaacagtgggtacacatggacataaagatggaaatagtagacagtgggtactccaaaagcagggaaggcaggagggctctgaggaatgaaaaattacctcttgggtacaatgttcaatatttgagtgatgggtacaccagaagcccartcctcaacattattcaaaatacccatgtgacaaacatgtacatgttccccctgaatctacatttttttttcagaagaaaataagtgattgtttttatttttaggaaactaaacaaatatcattttcttctctctgatctcatagcacttgacaaacaacagggtgtagcagtccaaaccctggcactagaatctacattttttaaaaaaagtaacaattacaaataatatcttctgtatcctattccctattctccctcttcctagaatacattccaatgccttcaactattattttaatcacaaaattgttgatgacaaattgtgatattcaaatgtctttttttcattaatagaggtattactgtataacctgtgaaagaaatgctttactttgataagggaaaatgatgagtacaggagttaaaaaatattcttcttaaactctagactttttgagaccaaacctcttggaatttgtattacttattcaaattgttcagctggaggctattatcctaagtgaattaacacaagaacagaaaaccaaataccgtatgttctcacttataagtaggagctaaacgttgagtacacatggatgcaaagatgggaacaatagaaactgggtcctgcttgagggaggaggctgagaggagggtgagggtcgaaaaactacctgttgggtactatgctgtctacctgggtaataaaaccatttgtacaccaaaccacagcaacacacaatttacccatgtaacaaacctgcacatgtgctccttggacctaaaataaaagttgagaaaagaaaaataaataaacaataatagtggaaaaattcataattttacttctgtgtcatggtcaattaaaattttaatatttagcaaagcaaagaaaaaaattgttcgtatggtaatgtaaaaagataagtcttgaatttctacatraatcctaaaatttgcaaaataaataaaactaagtttagcagctctctgtatttctttagccatagactaagcaactgttctattattcctttagaaaattccttttgtactcaaattttcttaattctgcttatgcaacagccaggattctcagtatgtaacagtgggttttgccaacttgggtcccagcctaaattctagttatttgttttaaatatttaatgcaagtcagccagaatgccaaaacactatccttattactaagcaatatattaaacaaacacccctgacttkttcctcacccttaatccacagaattgaaacgaggaatggaagaacaaataaattttaacgtaaaataataataatttaatgataacataaaataatacacaaacacataataataattggatgttagtcttttttaaggctttatcagaatattctgtgttaaattggctgggtcagaatggccaataagattttacacatccaaatggctctctattacactgaggaggtttygttcattcctgtgtgacactgtgttagtgctttgtgcagaattgtttttgtaatatttccttgaaaaaagtgtakaattttctgtctttgcagaacattgaatggtggtgctatatatttattatagcttcttgaagtgtagttatatacaccagatatgtagaaatagaacccacatctcccatggkatgtgtgaatgacagtgtggtgacaaaagcaccccaggggttcaggctaactgttggttttaaagcaaggaaaacttttagttctgtgcctttaatgtgtatgatttactgattgtgtgtatgtgctgaaaaataaaatcattttcaccctgtgggaaaaaaggcagtttgtttgtgtaaggtattaaagactgcatataaatttaatattctccacatagcataaaatttaatgcttgttaagtaaaattgaataaagactctaaaagcaaaacataaacatttcatatttggaaaatttgcacaacagaatgccaaaatatttgttgatgttcttctttcaactataaagcatagacgtatttcctttaaatattatatgaatcctgctgtgatttaaaaagaaaagtggcatctaatcatggaacattaaattgacttggttatgtagtttatggcttatttatcaaaaaagaattcaaatccatttttagaatgaatttctgagatttaaagaatagaaatgaaactaaatgcaaacacacaagaaaataaaaaagcacagagataaattgtctaaaaggctatatttttggtatttttgtttatttaatgaataaacaatatgaattatacagtatctcatctcaacaaaggcaacatttcaatctattgaataaacagtagcataattagccttgagttaatawcccctcctcacacatacacttttctatggttcacttcagtaaaaaggcaaatcttttctgctttagttcctgcatatttagagtgcttaggctaggccaggtgcagtgggtcatgcctataatcccggcactttgggaggctgaggcgggtggatcatttgtgtcaggacttcaagaccagtctggccaacatgtttaaaccctgtctgtactaaaaatacaaaaattagccaggcatgatggcatgtacctgtagtttcagctactcaggaggctgaggcaggaaaatcatttgaacctgggagggagaggttgcagtgagccggtatcatgccactgcactccagcctgggtgatagagtgagactctgtctctaaataaataatattttttttaaaaagtgcttagcctagtactggctgctcactaatcaaggtagcgtgtgctgaaggttgcatggctgtgacaatttcttaaggaagaccatagtattggtaggttttagatattaagtaaatatttttaaaacaaataaatggttattataaatgcagacattaggatgatatttttttaaaaaataaatagccctatgggggaaagttggttttatttcaaagcaccttatttttttggaataattgtgtgttaagaatcaaaacamacatacacatcgaatgattaaacaaataagcaaggaaaacaaataagcaaggaaaacaaacttcttctacattatttttatttatttatgttttaactgaaagtttgtgttctttgatcaacatctcctcaatccttccatatcccagcctctggtaaccaccattttaatctctatgtctatgagtttgaattttatacttcaaatataggtgaggccatgcagtatttgggtacttgtctttctgtacttatttcactttacataatgttcttcatgttcaaacatggtgtctcaaaagacagtattttttttcttttgtaaggctgaatggtattctctggtgtatccaggcacacctcagagatactgtgggtttggttacaaccactccaataaaacaaatattacaagaaggcaaatcacacaatattttttgctttccagtgtatttacagttcttttcacactatactgtagtccattaagtttgcaatagcattatgtctgaaaaatgtatataccttaataaaaaaaaactttattgctaaaaatgctaatgattatctgagccttcatcaagtcataatcttttttgctggtggagggtcttaccttgatgtaaatggctactgactgatcagggtagtggttgctgaaggttgggtggctctaacaatttcttaaagtaagacagcaatgaagtttgctrcatcgattgactcgtcctatcacaaaacattyccttatrgcttgcaatgctgtttgatagcattgtattcacagtagtattgctttcaaaatttgaatatgtcttctcaaactctgtgctgctttatcaactaattttaggtaatattctaaatcttttgttgtcatttcaacagtgttcactgagtcttcagcaggagtaggttgcttctcaagaaaccactttctttgcccatctgtaagaagtaacttctcattcatttaagttttatcatgagattgcagcaattcagccacatcttcaacatctaattctagtgctttttgccatttctactatatctgcagtgataccctcaactgaagtcttgaagctctccaagtcatcaccgagggttgaaataaacttcttccaaactgttaatgctgaagacagcttctttaaacctcatgaaccatcctctgctaccttcaagctttcttctgcagcttcctcacctccctcagccttcatagaattagagatctaaggccgcctttctctggattaggctttggctaaacagaatgtaatggctgatttgatcttccatgcatactactaaaactttctccgtatcagcaataatactgttttagtttcttatcatttgtgtgttcaccggagtagcattttttaaaatttccttcaagaacctttcattttcattcgcaacttggctcactgacttaagaggtgtagttttctgcttatctcagctttcgacatgcctttcttactaagcttaatcatttctagcatttgatataaagtgagagccctgcaacttttcttttcacttgaacacttagaggtcattgtagtgttattcattggtctaatttcaatattgttgttctcatgtgatagggagctctgaggagagggagaagaactgggaacagctcgttggtggggcactcagaacacacacgatgttgactgattaagttcactgtcttatacgggtkyggtttgtggtgccccaaaacaattaccatrgtaacatcaaggatcactgatcacaggttaccataacacatataataatgaaagagcttgaaatattatgagaattgccaaaatatgacacagagacatgagatgagcatatgatgttggaaaaatatcaccagtagatttgttcaacagaaggttgtcacaaactttcaatttgtaaaacmatgcaatatctgcaaagggcaataaagtgaagcacaataaaatgaggtatgcttgtatataccacaatccataccacaattatccattcatctgttgatggacacttaggtttattccgtattttggctatagtgtttaatgctgcagtgaacatggggtgcagattactgtcatttgatttcattttttaaatatatactcagtagtgagattgctggatcrtatagtaattctatttttactttcttgaagaatgttgatactgtttgtcatcatggctgtactaatttccactcccaccaacagtgtacaggggttctcttttctccacattttgctggtactcattatttttcatcattttaatagccattctaacaggtatcaggtgatatctcattgtagttttaatttgtatttatctgatgattagtgatgttggacatttttttcatatttctcttggctatttgtatgtcttcttttgagaaatgtctgtattcaggccttttgcccatttaatttggttgttttcttcttagtcagttgagttctttatatattttggatactaaaacccttgtaagatatatggtttgcaaatattttcccctattctgtatgtcgtttcttcacactgttgatgtttcctttgctgtgctgaagctttttaatttgatagaatctcattgatctattctcatttttattgtctgtgcttttggggtcatgtccaaaaaattgctgttcagagcaatgtcaaggagcttttcctctatgttttcttttagtagttagtttctagtcttaaataggaactattggaactaaagttataggagctatttttgctggaggtcctagtgcaaatactccaagcttaaaggataaactttgcataatggtaaatcttgggggcaagatgacatctatcaatatgttttaaggaaaattcatattgtgattgtttaatttgggccagatataactgtcatttcatatgcttcatcatatcccagctagaagatgaatgttagaggacaaatgaattatttcgtcattaacttagctgatgtaatctttaggaaggggtggaactgcaccacatttaaatgttccttccccttttattttctggaagacactgacaaaatggtgttaattctttttcaaatagttgttagaattttccagcaaaactatttggcctgaagatttttttttcaaaaaactttaaattatacatttcatgtttttaatggttataaaatgattcagattatcagtttcatcttggttgagttttggtagtttgggtttttttcaagggattggttcatttaaactgtcaaattttttaatgtaaagctgtttgtgatatccccttattattcttgtaatgkctatattatctatagtgataacccctatcttgttccttatgttgatttttgtttacttagctgtcattttcatcagtgttgctagactttactgattttattgatgttttttcaaagaaaccattttttttkgctcattttctttattgttttcctgtttgtaatttcattgattacctctcttatggtttttgtttcctcccttctgcttgctttgggtttattttgctcttatatttttcttttctgaggtagacacttagattattgattcgtgatttgttctcgccttgattataagcactctcttcactgctttggctgcatgctacttattttaatatgctgtatttccattttgatttcattttatgcaatttaatttctgttaacaattcctcttttaaaatgaattgtgtagaaaagtgttgtttcattttcacattgttagggatttttctgttgtctttcagttattgacttctagtattatttcacctagttaacatactctgtacaatttcaacttttgaaatttattctggtgtttttttatggcctaggatttggtcggtatatgttccatgatctccttgggktttttttttttttttttttttaaagaaagagtattctgctgttgttggattgtcaaattattttagatattaattagatcgtatttgtagattttgttgtttttgtagattttgttgttaaggtatcagttttctgtggctactgtaacaaattaccacaaacttggtagcttaaaacaacataaatttattctttcatagtcctgcatgccagaagtcaaagtgtcaaaaggaccatgctatctccagaggctctggggtagaatccatttcttgcttcttctagctttttgtggctgctggcaggtcttgaggtttcttggcttgaggtcacatcactctaatctatgtctctttcttcacgtcaccttctcctttgtgtgtggtgtgtgtgtgcgtgtgtttgtgtgtctgtgtgcatgtgtggtctccctctgccttcctcttgtgaggccactcatgacgatcaaagtatcagaatgtataatattatcatatttgtctcagtcatcgcatatgatttagacaactcatgaggagaagataatctatgtatttacccatacttctagtccttctgttccttttcttccttcctggtgctcaaagatttttttctcttatctttttctttctgtttaaagacctttctttagccattcttttttattattattattatactttaagttttagggtacatatgcaccctaaaatgtatcttggagtgaattcctttgagtttatccttatttagaatccatatagttgaatttgtgggtttatgtctttcaccaaatttaagacattttcatctatagtttattcaaatactatttcaacctcactctcccctatacttttggaactcttaggatatgaatgtggatttcttttttattgtcctaaagatccctaaaactttttttcagcctattttctctgttgttcagattgagtaaattctattaagctgtcctcaattcactgattctatcctctgtcatctccattctaattttgagcccacccagcatgttttctatttttgttgctgtatttttcagttgtataatttacattggttatttttatatttctattgctttactgagattttgtgttttaaaattcatttaaaaagaatttataattgctcgttgaaatattttcttatgccctctttaaaattcttgacagataattccaacatctgattcattttagtgttggcgtcaatcgattgtcttttctcattcaagttgtgattttcttggttcttattatgattcttatgatggttgactttctattatatttttgataatttgggtattgtgtttgttaggagactctagattctatttaaaatttttattttaacagtcaattcctctatttaggtttggcatgtaggtcctggcctacttttgtgggttttagttgcaatgackgtgtaattttcagaggttatgtggtgctattttcatcttggtttatttcatgcctcatggctcccactgtccttggtaatgctgcttgagggtgcagagcaagcttctccaggtcagatatccttatgtctctatatggaggggatttttcagcccatgtggatgaagagtaattcctagctgggcatttgttgtgcaaaattactcttgctggtgactctagccatacaatttcttgagtagtgagttatggtgggtgtgagagggagaatatcaggacattaagaacatggaagcttctcagactgggcactgtctcctgcttttttagctagagctagttctttgaaagcaaatgttgctctgtgagagcagtggcycttctggaagcccctttaattattgaagcacccgggacatatcattctgtttgtgctttcataaattacattgcagggatctgaaagaccagaaaccaaatctagaagtgcccattttttgttactgaactgaattctaaagaatagtcatgcaaatctatatcagcagctacatctatatctgtagcaacaacttctctcttttcaactgcccattgtgaacatctctttaaggttgttttgccatcacattgatttatatttaaaattgtaattgcttcgcttctctctccttcaccttcaggcttctacagtggttaagagtgtttcctttggagtcagtccagtttgggtttgagtgttgaccttactgcttattagcttgtattctttacaaatctcttaacctccctaaatcttaaaactgaggatagtaatagctagcaaaagagtaaaattcagtaacaaagtataaattaagtattaattaagtactcagcacagtacatgggcaatagcaagtactcacagatgtgttgagttagctacaggcatcatcctcctcaacatcattatcatcttttccagtttatagataaggaaaccgaggctttgaaaggatagggaactgaacgtaggtcagttttcccacttaattttcaggagagttgaaattcaaattcagacctgacttcttccaaatccttcttttcaaactattatgtaacactgcatcaaatgattttcttataaaacctgaagctccatgagagcatggattaggccatgctcaagataggcaaaaatataaaacatgtaatgtgcagttatatgacctggacttactcaattctgattacttattgataacagtggtgaatattttcatagaactatctgagcattaacatgcaacaaacccccatgagatgaatttacctatataacaaacctgcacatgtaccccccaacccagcataaaagtaaaatgaaaaaagaaataatgaagatagtttaacagaacctgacaaccaaggtttgtgatagtatgatatttaaccctttactatagctcagagcaaaatactcccctttgttatgcttgccaatttctgaaatctgacaaatgttatgacaatttatttttcttatgtcttctgtgctatctcattgaaacttcaatatgatgtaagatgcaataaaaccttagatagatgtttatattttaagcaattttccacaattcttttatatacaaatatgtagttcttataatagttttgcttattgctaagttaataaatgcaaataatgatgaatttctgaagttataattatgagaaacataattcaagaaggataatttatattattttccaattaaagtaaaaatgcattggtgacagagatacaaatggtgccattgaatctgcccatttattaaataaaaagttcactgatagaaaatattgaaaaggaagttatttactttatttctttgggcttatcgtctatgaattgtttttctgtagtgtaggcaatcaacaacattttcttccttcagggtctgtttatgtagagatttcagaaaacaaactaatggccacatataaatcaaggacatatttgctattttacatttttgagacaggaatgtgaactattcaatttagactttttataaattaatatttaaaatgcattacatataggaaataatatatattaatttatgcatacatacatacactaattccacatttaaaattaagatggagatgataaaggcaaaagagaataaggtctagttgtgatggtaaatgttaaagttgatacctaggaagaaaagagaaagaaaaagaaaacaggaaccaatggaaaaaaatgagagtagagtccaagcgatgaagaagagagaccagcagaaggagagacaaacaccaaataaagagaggagggtgaaaaaagtgtaactccacgaagcaagggagaagaaagaagaaatcaagatggagaagaaaaaagaagtaattggaaagaaatgtgaagagagagagagagactacatagaagtttaaatatatgagtatcagatgttatcattgccatttaaaaatatgattaactctattaagcttatcaaggtttttgcgcttatgtcaatcttaaaaaaatttatataataatttttaaactatgggattgtacattatgtgtttcttccttaccatgcccttaagatcctaataacaagaaagtatgtattattagcaacactcctaccctaaagagcatatgaaacatatacaaacaatctgtaaatattttacaggacaattattttctttttactcaaaccataacctgtagtattttgagagcctattttaggtagtgaatttagaatgtcttcctcctcctattctctggccgatatagatttggttctccaccatactgtgatacgtttgaaaaggggaactgtattttatctttctatccttatcatccagagcagagcattactagtaaatagaaaataatcaatattttagtgaataaataagagtaatataaataaaaggatgaaatactgaactttagcagaaattttacataaggtaaagtgagcatttaattccataaaaattataacatcaagcaagattccattttattttcttatataaacaagatcttggtgaatggtacaagggagaaaagtaaaaatattaatgacttaaaaatccagatcccaatagtttattccatatttgttcagtgccaccagtttttatcaactagcttaactatttagctataaagaaaacaggaaaatacatgtattgagcacattccatgtagtagtggaacatagatgaaactgatgcacagtcccaactggtcaacttttagcctattctttctaagtaattgcaactggctttttctccaggtgtgcttagtttaaccttagtccaatccaaatagttatagttgtagccataccccagctycaccttccttttctactggtgttcattgttcatgccctctgaaggtgttcattaggctactgggcataagcttgtgttcactaagtttcccattaaatctcagttccctaaattctccagtgaaagggcatagaaaagaggaatagatttaaattactttaccctcagattctttatcatatgacccaaattcctttagtattataattattattttttcatttatttttagcttatatgaacatgctagttgagtgatattttctgataatgctagcttaatatctggtttatatttttatttttaagaataagagaactgtccactaacctaacaagtgcaatgactagtacattttaaaagtactataatagttgaaaaatgatttacataaggccaattactttgattcattttaacctcctggatttattttctgaaaggggtattattttaatgacagttaaatatagttattttgacagatggatttaccatattttcattattatttagtaggctgaaagcttttgaattggctcataaaccagtttcatgatgtaccttggagtatcatcttgaataaaaaatgttttcctgtttcatttttcactgatctcactttccatttcattattgtctttagaaagtagctgagtgagatataaaacaattgtttctcttcagaaccatgaattttaaactggctgaaaatcagatttaaatttgcttatatgaatgcagtaactcagtattgctaataaaacattttttctttctattcatcagataatatattaaattttgtgaacctactatgtgaagagtactgatcaaaattccatgttaatttcacaggtgatggaagtcaaaggacaaatgatccatgttccagaatcaaattccattttatttttgggctctccatgtgtggacaagttggatgaactcatgggccgagggctacatctctcagacatccctatccatgatgccacccgagatgtcattttggttggtgagcaggcaaaggcccaagatgggttgaagaaaaggatggataaattaaaggcaactttagaaagaactcaccaggccctggaagaagagaaaaagaagacagtggatcttctatattctattttccctggtgatgtagcccagcaattatggcaagggcagcaagtacaggccagaaagtttgatgatgtcaccatgctcttttcagacattgttggcttcacagccatatgtgcccagtgtactcccatgcaagtaatcagcatgctgaatgaactgtacaccagatttgaccaccagtgtggatttttggatatttataaggtaagggagtttagttacttacatataaatgttttttaatagtaaattgtcatgtgaattaaattgatttttttacttaaacttgatactaaataattgacaactctttaatttagaaattttatagataatacaggtatttcttctttatgagtaaactttcaatatgagttcgtttgtgttgacayagataactgtgaagaatcatgatattgctcagtaaggaaaaattctatatagctactcctctaagtttatttttattaaaaaattaaacttgttgaattctaggtaactttttaccacataattattcttgcttagaaaatggggttccaatataaactaagaattttattttgacagttaaaaacaaatagcaagttatattaaaatatgcattgtattgtcaaatatggctaatcagtattttgcactgcattattaagtgagatctctttaattctaaaaaaacctatatataaatactctagctattgctcaaatgactaatgagtttttgaggaagtaccttaattttccaagctacataatggaaaaatttccaaaattggtgccaaccaccatggttggtttgatttggtgaactccttattaatttcttactaagatcatagcaatattttgagtcatttagctccatatctacctaatcaataactctacaactttacctagaatcttacgtagattgcacaatgtcagggcatagggctttttttatatgaagggaatcaagtacttttagtataaatagttgtgagctgcaggttttattttcttctttactaatacatattgaccagctacttatttttayagtatgatcttcacataagcagatttggaaagaacttgtctgattcactttgtaaattttatattatcatccagaaggtgtttttatgaaggtgtgtcttcttggggaaakgagctctttagtttcattatgtagactatgtagccaatgttaaatattttaattgaatctcttctgagtggtaaacattcagtatgaagtatgtataagggattttccttgttacagaaaattaagttcttataaattatctttaactcccttataatttattggtatataatttacagcagtggtagccaaatgtctgattctaaaccggagagatactataatgttaaactgtcacttccaggacagaggagatcagctgaatttggcatcactttccttcctccatacttggggcactattacaccaatctctgccacaaccaatcttttccctctaaactactgatttgcagtgtttgcttcctccagttaaagcagtcatgttttttttgttttgttttgttttgttttagccctaagttcatacaactaaatgagaatgataatagataaataaattattctctggaaaaaacatgggaatccctgacaaacataagtatcagttagattttgagaaaagaagaaatgtgatgcttctgagtatgccaaaacaggttcaaggttttaaaatatgatttgatttcttagacatcaagcattcattcccttgtgagttaggacatctcacagaaaaacagtagaaatactccgtatgatcttcaaattttcctatatattattaaaccgtggacagtttcatatagtcatgaataataatcaacaagttttaacttacaaaatgtttatataaatatatatatatacacacacacatataataattctagttcacaacttttcttaaactaaacttgtttaggaaattttgcaattaattacaactaaagattccaggscttggtgttcttaacatatcttcaatgctagtgtattaatcagggttctctagagggatgggactaataggatagatgtatatatgaaagggagtttattaaggagtattgactcacacagtcacaaggtggaatcccaccataggctatctgcaagttgaggagcaaggaagccagtccgagttccaaaacctcaaaaagtagggaagccaacagtgcagccttcagtctgtggccgaaggcttgagaaccctgagcaaaccactagtgtaggtccaagagtccaaaagctaaagaacttggagtccaatgtttgagggcaggaagcatccagcacaaaagaaagatgaaggccaaaagactcaggccagtctagtccttctacattcctctgcctgcttttatcctagtcacgctggcagctgattagatggtacccacctggattgaaggtgggtctgcctctcccagtccattgactcaaatgttaatctcctttggcaacaccctcatagacacacctaggaacaatattttttatccttcaatccaatgacgtttacactcaatattaactatcacagctagtaagtacatgtatctaggataggtgtatagggcagctttggctgcttattcaggattagggaggttgagtttgggagatccagactggaaatacaatatatgctaaatccatagcagtaatggtttggccagagagggaaagacaaaatgatattagtcctgtataggataaaaaaagtacattaggagaaatgcattaggagggatataaattagaaaacttctatttgaccagcctgatttgtaatcttcataaacattctagtgtattttctagaaaatayacacagtgctattttaaaccatgaactatttgccagatttttaatggctattgaaacaaagaatcccagaggtggtagaattttttgtaaggaccacaagtcttattttatgaaatgaaaagagttttgctagattgaaagtatgtatagaatttgggtaattatgtagaataaccataccacagagaaaaataaggtacagcccaccttttatgttagaaatgtgaaaggaagccaggtaaaactaaatgccaagagaaaagaactagatggagtggcccacatggggctttcatagtgtgctacgacatgagatactagtctctaaatttgtggttgcccctctcttcttcatgtcattactccatgttttcctatcatcaggcagatgatagagtgaagaattataatttcagtggtagaattcagataaattaagacataatatgaccattctgctaaaataatcaagctatctataaactagagggttgaggaagaagctgtggattttgctgtgcatatatcaagcactgagaaaatgaaagcctttccaatgcttaactgccaagatgttacaggtgtatgaatactaagtaagagctaggcaaattgaagaaagcctgggttataattttgtttctcttgtaattagaaaggcaaattttcagtaaaagtcaacataaacaacatacgtaatattttgcttctcagattgttctcacatgaacataaagaaccagtatctaattttgtaaatcartggcatataaatagtaacaataataatggcattgactattgaagcaaattcatgtacattttgctttgttttacatttgtctttgggaaagcctttgattttagataagcagggagaaagactttgcctttctctgattccattctgccatggttgcagtgttccagtgctattttaaatacaatctttagcatccccatcttttcacctttaagcactttaacttgacttttctccagttctataccccataaaataaagatattcagtgcatcagtctcacagttacatcataagcatttcagtgagctttcctataaagagttkagaataccatctggtacatagtagtaaatgtaaatattagctgccattagaacttctcagacaggtgtatctatctagacatacagggatgtgtgttatgtgattatgtttgtgtgtgtgtatgtgtgtgtgtgtatatatacacacatacctagtaggcccagagctttttagaaaagaataaaatatgatctcatataatccctccttgaataacatgtggcattatgtacattttcggataagaaaactgagttttggaaaggttaaatccagataatgtagctcacaagtcagaatttgaactgagacttgtctgattctaaagcctatagtttttgtacaatttaggctgtgatctagacaaagatcaaatgatagaaacaaagagtggaaactgtttaaaaatgacatgacagtataactacagttattgattctgtaaagtaggagattctcccgtctgccatcttttctctttgttagaaaccagccagcacctctgtcttcattcctcctatggaaagtggcataccaaaagaggcattgtgggagcagtggtcccaggtgcaggcaataagaggtatattttttaaacagtgaagtggaataaaagttgatctggttttaaaaatcatcttacccaggtaactctaaaaatgttagtgatggccaggcacggtggctcacgcctgtaatcccagcactttgggaggccgaggtgggtggatcacctgaggtcaggagttcgagaccagcctggccaacctggtgaaacgctgtctctactaaaaatacaaaaattagccaggcatggtggtgggtgcctgtaatccaaactagtcaggaggctgaggcaggagaattgcttgaacccaggtggtagaggttgcagtgagctgagatcacgccactgcattccagcctgggcaacagagtgagactacgtctcaaaaaaaaaaaaaatgttagtgataaaatagttttctctgtcagagtaaaggtagagggggagtattcccatcacagcctctaagtgtggtttgcaaatgtccatggcattaaacattgtcaggtttagattgggaagaaggaacagtaagacaagatagggcaaccaggtaataccaggacccaaattctattacattagggaacctgatgttaaaaatctgaaaaacaacaacacaaagttcatattggcaaggaaatgtaagtattataagcctagctggaaaagcagagttcaggccaattagcaaagtaggaaatccaggctcactcacagggaatatgagtgggcccaaggggactagatgataggaactggaaaccaggcaacatgtctagatagaaagtataaatatgggtatcagtacaaactttgataaagaagcagagtcttttccctggacagaattaagcttagaatcagagggtgcacaggacaagtctacagtgtcaaaggggaactgaatatggcaacctcatcaaacatctgaaaacagatgtttctgacatagagttttagggctacacagctttatgcctcaagaattttgatttgtcttgccacttgataggaagctactaaagccctctcttcttcgctggaccttcagccagcctcyagaaaatgcagtagattctcaaggatatcacttcagcatgaaatagatttcacagaaaaatgaaatgcttcacttccaccttgttttgttgcctttcaaagtacttaggtacttaggttattgttggaattttataaatatgtatatgccattttacgtcatttgcagcatgaaatgccagttccatttagtaaagagtaactgcttcatttttccccaagatttacatattttctcttttaatgatcagtgcacacactttttaaattgagcactgtttcagatttatgttagttctcttcagtagtctccatcaacatcaacatcatttgcttttactgatattttgttggaaacaaagcaacaatgttttctaattaggaaataagaatttcttaagtcaaaaatttattcaactcattcattcactcaataaacatttacaactcatttgataaggagccatgacttccatagaacctttaaaatgttatggaaattagcatgtatttttagaacaattttaatgaatagaaaagaactcatttatatgctgtaggaagtaaggtgaaagtcacagataagcattctgttccaatagcttttctatggcaggagttatattgtcagtttcaaaataccataatgctgtaaaaattacctgaagagggtttaacctcatttatacgtttgcctttggcgagcactttggttggagataaggaagaggcaagggtaagatatgtttctttcaatccattcagacaaggctgtggaatcscagtgctatcttgagtgcactagttggatttctcatcattccacctttcatgggttatttaatctctctgcctcattttatcatctgtaaataagagactaattttatcactttatagttttattttgtgagcttttaaatgagatttatgtaaagtgcttaaaacagtgtctccttcatggtagtaaatgtacatattagctattattactttccaaacaggtatatctggtcctatatgggaagcgcgtgtgtctgtgtgagtgtgtgtgttgtatatctgcaggcatttttatgtacataaacattgtgtatccaacgcttactagaaatagataaaatgcttatttatttggatttattcttttaggttattagaattgcattgtatgccaaagactgtgaaggaaggatagagaaataaaaggagggagggagataaatagctttccgaaatgcattatttgtgtcatcttcatggggcctcaaagwttcttaaagatgcttccatctgcatactctgaattacaatatggaatttataaagatgacaatatttctgaaagccagaatgactcgtgggatgtctgtgaccaatactatgaaactgaaccccaaatgtctatttttatattctaatacggcagcctgaattatttttcttctatattcagagaacatttcttttagtgttgtggcatattctgaagacagttagaaggctaaaatacttttagttgctaagcagaagttaatattaatgatgtgtcttgctgaatttttcaaagtgttttgaggtttttgtccctatcgatatttaatttctgaagagtggtggcaactgcaaacagattggtgtttttgatttttacaaacagtrtgaactgaatatttatgaccccccaaaattcatagttgaagccctacttaatgtgatattatttagaggtagagtattttggagttaatcaagtttagatgaggtcttgaaggtggggacttcaatgatggaattagcatcattataagaagaagtgacttgagcttgctttctttcctctttgaggacacactaagatggcagccacttgtaagctaggaagagagccctcacctgggaagtgaattggctggcatcttgatcttggactttccagcctccataactatgaggaataaattcctgttgtttaagccacccagtctatggtgttttggtatagcagcctgagcagactgaaatcccaagagaaggtatatcacttctacagaaagtgtggaaatttcttcatgatacaagtctctagtaagttctcttagtagattagtccatattgctaggatttcctgtatctaataagaataaatgctaccgtcccattgatgcaaatgaaagattttcattagccttatagagttaattgtgttattgcacagtatctctcttttgtgtatcaataaactgtaaagaatttaagctgtaagctcaaactgctcatttatctttgccactaccacttcagcagaacagtatgaacaacttgcctttagtttatacatagggtgagtttactaaaatggaaattcattttctaggcaggaccgctatctctcactcacctgataggatagccttaatgcaatctgcaaatctcactgaactgaggtgtttctattacctttttaaaacaaacaaacctttaattaatgcttttatgtagtagaaatgctgtaaatacttctgccactatttatcacttaataacagtgatttaaaaagtgaaaatttctgaaagcaaaatgaaactaacagaattcacatttacttgtattctcagtattaagtgcttaaactgtgatatttcacttattttccagaacaatcctgtggaataggtgttatgatgtcccttctgtgtttttaaatttttatttcaatttttgtgggtacatagtaggagtatgtatttatggagtacgtgagatgttttgatacaggcatgcaatgtgtgataatcacatcatggaaaatggggtatccattccctcaagtatttactttttgtgttacaaacaatccagttagacccttttaaaatgtacaattaaattattattaagtatgatggctctgttgtgctatcaaataataagtgtcccttttgaagatgagtttagtaagttgcagatgctacttgaatttagttctgatttagttaaaagctcaaattttagaaagcaatggtttaaatcattcatgtgtcagatagctagtgtttccaattacctagatggagaatcaggacaaaaaaattgttctggcacttacatactataggttagtgcaaaagtaattgtgggttttgcccttaattttaatacataaaatgagatattcatttatcaattggtacggtctctccaacaactttgacaaattaccagagttcatctttttaaaatgaaaacaatagtatgtcacaggactgttatgaggctgaaaagaactatgagccaaaggtccttgttacaaacatgaggccctcaatgtagtaattagaagatgaacatgaatttgtaaattgcaatttgaattctaccctagaggtaaaaatataactaggtttccttttttaaggtattcaacaaatgtgcactatttttgaatatgtgttggatatcataaatacttattctctttggctcccggaggttaaagaggatctttgtacaaaagttaaaagaatagtttcagcacagtagaagatccttaagaaaaaccgtgtttctaacagtgaaatagactggcagaagcatatgctctgatcacaggagtgatatgccacaaccttttggtggagcaggtaggaacaactttcagtaggtcccctgattctatgagattcttttttttttttatactttaagttctagggtacatgtgcataacgtgcaggtttgttacatatgtatatacatgccatgttggtgtgctgcacccattaactcgtcattttcattaggtatatctcctaatgctatccctcccccttccccctaccccacgacaggccctggtgtgtgatgttccccttcctgtgtccaagtattctcattgttcaattcccacatatgagtgagaacatgcggtgtttggttttttgtccttgcgatagtttgctgagaatgatggtttccagcttcatccatgtccctacaaaggacatgaactcatccttttttatggctgcatagtattccatggtgtatatctgtcacattttcttaatccagtctatcattgatggacatttgggttggttccaagtctttgctattgtgaatagtgccgcaatgaacatatgtgtgcatgtgtctttatagcagcatgatttataatcctttgggcatatacccagtaatgggatggckgggtcaaatggtatttctagttctagatccttgaggaatcgccacactgtcttccacgatggttgaactagtttacagtcccaccaacagtgtaaaagtgttcctatttctccacatcctctccagcacctgttgtttcctgactgtttaatgatcgccattctaactggtatgagatggtatctcattgtggttttgatttgcatttctctgatggccagtgatgataagcattttttcatgtgtctgttggctgcataaatgtcttcttttgagaagtgtctgttcatatccttcgcccacttgttgatggggtggttcttttcttgtaaatttgtttgagttctttgtagattctggatattagccctttgycagatgagtarattgcaaaaattttctcccattttgtaggttgcctgttcactctgatggtggtttcttttgctgtgcagaagctctttagtttaattagatcccatttgtcmattttggcttttattgccatagcttttggtgttttagacatgaagtccttgcccatgcctatgtcctgaatggtattgcctaggttttcttctagggtttttatggttttaggtctaacatttaagtctttaatccatcttgaattaatttctgtataaggtgtaaggaagggatctagtttcagcttcctacatatggctagccagttttcccagcaccatttattaaacagggaatcctttccccatttcttgtttttgtcaggtttgtcaaagatcagatagttgtagatgtgtggtattatttctgagaactctgttctgtaccattggtctacatctctgttttggtaccagtaccatgctgttttggttactgtcaccttgtaatatagtttgaagtcaggtagtgtgatgcatccagctttgttcttttgggttgtcttggctatgagggctctcttttggttccatatgaactttaaagtagttttttccaattctgtgaagaaagtcattggtagcttgatggggatgscattgaatctagaaattacctcgggcagtatggccattttcatgacattgattcgtcctacccatgagcatggaatgttcttccatttgtttgtgtcctcttttatttcattgagcagtggtttgtagttctccttcaagaggtccttcatatcccttgtaagttggattcctaggtattttattctctttgaagcagttgtgaatggagctctctgtttttctgttattggtgtataagaatgcttgtgatttttgcacattgattttgtatcctgagactttgctgaagttgcttatcagcttaaggagatttggggctgagacaatggggttttctaaatatacaatcatgtcatctgcaaacagacaatttgacttcctctcttcctaattgaataccctttatttctctctcctgcctgattgccctggscagaacttccaacactatgttgaataggagtggtgagagagggcatccctgtcttgtgccagttttcaaagggaatgcttccagtttttgcccattcagtatgatattggctgtgggtttgtcataaatagctcttattattttgagatacgtcccatcaatacctaatttattgagagtttttagcatgaagggctgttgaattttgtcaaaggccttttctgcatctattgagataatcatgtggtttttgtctttggttttgtttatatgctggattacatttattgatttgcatatgttgagccagccttgcatcccagggatgaagcccacttgatcatggtggataagctttttgatgtgctgctggatttggtttgccagtattttattgaggatttttgcattgatgttcatcaaggatattggtctaaaattctctttttttgttgtgtttttgccagcctttggtatcaggatgatgctggcctcataaaatgagttagggaggattccctctttttcttttgattggaatagtttcagaaggaatggtaccagctcctccttgtacctctggtagaattcggctgtgaatccgtctggtcctggactttttttggttggtaggctattaatgattgcctcaatttcagaccctgttatgggtctattcagggattcaacttcttcctggtttagtcttgggagggtgtatgtgtccaggaatttatccatttcttctagattttctagtttatttgcgtagaggtgtttatagtattctctgatggtaatttgtatttctgtgggattggtggtgatatcccctttatcattattgcgtctatttgattcttctttcttttcttcttttttagtcttgctgtgtggtctatcaattttgttaatcttttcaaaaaaccagctcctggattcattgattttttgaagggtcttttgtgtctctatctccttcagttctgctctgattttagttatttcttgccttctgctagcttttgaatgtgtttgctcttgcttctctagttcttttcattgtgatgtagggtgtcaattttagatctttcctgctttctcttgtgggcatttagtgctataaatttccctccacatactgctttgaatgtgtcccagagatgctggtttgttgtgtctttgttctcactggtttcaaagaacatctttatttttgccttcatttcattatgtacccagtagtcattcaggagcaggttgttcagtttccatgtagttgagtggttttgagtgagtttcttaatcctgagttctagtttgattacactgtggtctgagagacagtttgttataatttctgttgaggagtgctttacttccaactatgtggttagttttggaataactgcgatgtggtgctgagaagaatgtatattttgttgatttggggtgtagagttctgtagatgtctrttaggtccacttggtgcagagttgagttcaattcctggatatcctttttaactttctgtctcgttgatctgtctaatgttgatcagagcgcctctccccctccaaaggaacgcagctcctctccagcaaggaacaaagctggacagagaatgactttgatgagttgagagaagaaggcttcagacgatcaaacttctccgagctaaaggaggaagttcgaacacatcgcaaagaagttaaaaccttgaaaaaagattagacgaatggctaactagaataaccattgtagagaagtccttaaatgacccgatggagcagaaaaccatggcacgagaactatgtgatgaacacataagcttcagtagccaatttgatcaactggaagaaagggtatcagtgattgaagatcaaatgaatgaaatgaagcgagaagagaagtttagagaaaaaagagtaaaaagaaatgaacaaagcctccaagaaatatgggactatgtgaaaagaccaaatctacgtctgattggtgtgcctgaaagtgacaggaagaatggaaccacgttggaaaagactctgcaggttattatccaggagaacttccccaacctagcaaggcaggccaacattcaaattcaggaaatacagagagcaccacaaagatactccttgagaagagcaactccaaaacacataattgtcagattcaccaaagttgaaatgaaggaaaaaatgttaagggcagccagagataaaggtcgggttacccacaaagggaagcccatcagactaacagctgatctctcagcagaaactctataagccagaagagagtgggggccgatattcaacattcttaaagaaaagrattttcaacccagaatttcatatccagccaaactaagcttcataactgaaggagaaataaaatcctttacagacaagcaaatgctgagacatcctgaargaagcactaaacatggaaaggaacagctgttaccagccactgcaaaaacatgccaaattgtaaagaccatcgatgctaggaagaaactgcagcaactaaygagcaaaataaccagctaaattcataatgacaggatcaaattcacacataacaatattaaccttaaakgtaaatgggctaaatgctccaataaaagacacagactggcaaattggataaagagtcaagacccatcagtgtgctgtattcaggagacccatctcatgtgcagagacacacataggctcaaaataaagggatggaggaagagctaccaagcaaatggaaaacaaaaaaggcaggagttgcaatcctagtctctgataaaacagactttaaaccaacaaagatcaaaagagacaaagaaggccattacgtaatggtaaagggatcaattcaacaagaagagctaactatcctaaatatatatgcacccaatacaggagcacccagattcataaagcaagtccttacagacctacaaagagacttagactcccacacaataatagtgggagattttaacaccccactgtcaacattagattctatgagattctaatattctaaattcttagtgttggagctatatgtagtttgctaggaaaatgttttcaaactgcaaatcaatgctgctgcctccctattaataagttttaaatgatttgtgtttatttttgcaaacatcttttaaagtggaaagatgagaatttaactctgtcatcttaaatttgggttaaaatggatataaataagttttgatgcatttttcaagctttgaaatgggtaacatgactttcaagttggaaaaagataaatcagttgaarcaaaatcgctgtgagactgctgatttagctgtgagtatgtgttgggatggagggcatgcacatgcataggtgcacatgtgttggagtctatgaaagctgtctattaagataatgctgttcttaagattgtccaaagcatttttaatgttatattttcctgtgatagtcagagtttaatattggatagctttttatgctgtcatcaaagggcaacttcgtgcttctctctttttcccttaccaaattccataattagtgtcatcgcctcatatcyagtcgggcatatttcagccctctgcttaatataaggtcctttgacgatcagagagagcccagatgaggactgttgtagttgcctatgacagtgcaatggtagctaaatgtaggggaaagggtattgaagataaagtctgaaaacctgattttaattatatctttgtcacataactgagtaagtcacgtaacttatctgtgttcagcttctgcatctataaaatgggagcagtattataggtctcacatatttgttgcagttgacacaaaaaacttgttcagcaaatgattgtttggaatttgtctattcatmattcaaaataacgatatatatgtggaaaattgttgtaaattaatcaacagtatcagcaattgactccatctggagttattcatatgaaagaagaccaagatcagagagaatgtctttaggaatttgctatgaaagaagggacagggactgatattagttgaatgcctaatatgtgctaggtaccatgctaaattttttatatgtttattcattactttcattttcaataaataattaycagtcacatactgtgtttaagtgctaatctaggcattgggtaataacactattgagatatttattttattagatttggattttatttattggattttatgtgtttatccagcttttttgggttatattaataattaaataaaaatagtataaatttaaggttgacaatgtgacaatttgatatatgcatagattgtataatgattattacaatcaaattaatacatagttgatctattatcagacataattacctttgtgtttctgtgtgtgtgtgtgtgtgtagtgaggacatttaatatctactctcagcagatttcaagtataaaatacagtattagttactatagtcagcatgctatatggtagatccccagaatgtagtctttataactgaaaatttctgccatttgactaacatcttcccatttcttccaccctcaccccttggcaaacaccattctactctctgttcatatgagaaactcagagagttatttggattccacataagtgagatcatatagtatttatctttctgtgtctggcttatttcacttagcttaatktcctccagattcatccacaaatggcaggattttgttctttattatggctgaatatttctttacatacatctgtgtgtgtgtgtatcacattttcttcatttatctgttgatagacacaggttgatgwtacatcttggctattttgaataatgctgcaatgaacatggaagtgcagatatctcytcaaaatcctgatttcatttcctttggatatgtatccagaagtggagttgctgaaaattataattttacttttaattttttaggaacctccattgtgttttccataatagctgacccaatttacatcctcaaaaactgtgtacaaatgttcccttttctccatacactaactggcatttgttatctcagacttttgataatcatcattctaacaggtgtgaggtgatatctcgttgtggctttaatttgtacttcccttatgattactaattttgagctgtttcatatacctcttggccatttttaggtattctcttgaaaactgtttattcaggtcctttgttcatttttaaattgggctgtttgttgtttttgctattgagttgtatgagttctttgaatattttggatattagcccctcatcagacctgtgatttgcaaatattttctccccttctgtaggttgcctttttcattatgttgattgctttttttttgctatgcagaatatttttagtctgatgtaatcccacttgctaatttttgcttttgttgactgtgttgttgttgtatccaaaaaactcattgctaargccagtgtcacagagctttgtccttatgtttttagctaaaagttttacagttttgggactcacatttgtgtctttattccattttgagttgatttttctgtatgtcataagagaaggatctaatttcatttccccaaccctatctagctgcccaaccaatttattgaagagaagattcttcctccattgtgttttcttggtgcccttgtaaaagattgtgtagatttagttctgggatctcattctgtcccattggtgtatgtgtctgtttatatgcaatcaccatactattttcattacgattctgtagtgattagtttgaaatcaggaaatctgacggctccagctttgttcttcattctcaagattattttggatattgtagttatatatgaattttaggattttttttctatttctgtgaattttgatagggattgcattggaatattgatagagattgcattgaatctgtaatcacttcgggttttatggacatttttacaatattaatttttccattccatgaacagatatttttccactgatgtgtcttcaatttctttaatcaatatattatagttttcaatgtacacatcattcacatccttgatgaaattaattttaagtagtttattctttttgttgctactttaagtgggatcattttcttaatttctttttcaatactgtgttgaataggataggcaagagaaggcatccttgtcttctgctgcttttcaaggagaatgcttccagcttttgcccattcagtatgatattggctttgggcttgtcatttgtgatgcttattattttgaggtatgttccttcaatacctattttattgggagtttttaacatgaatggatgytgaattttattgaaagcctttttctgcatctcttgagataatcatgtggtttttgtctttagttctgtttttgtgatgaatcacatttattgatttgtgtatgttgaactaaccttgcaacccagggataatgcctacttgatgatagtgggtaagcttttttttttttttttttgagayggagtctcactctgttgcccaggctggagtgcaatggtgtgatctcagctcactccaacctctgcctcctggattcaagtgattgtcctgcctcagcctccccagtagctgggaytacaggcacccaccactgagcctggctaatttttgtatttttagtagagatggggtttcactatgttggccaagctggtctcgaactcctgacctcgtgatctgcctgccttagcctctcaaagtgctgggattacagacgtgagccaccacgcccggctgatagtgggtaagctttttgatttgttgctggatkcagtttgccagtattttgttgaagaattttgcatcagtgttcatcaaggatgctggccctaagttttttttctttttttattgtatctctgccaggttttggtatcaggatgatgctgcccttacagaatgagttagggaggagtccctcctcaattttttggaatagttttagtaggaatggtaccagctcttctggtatgaaacgtaaatgagtttagtataagatatrtaaaaaccaaattttattggtgttctaaaggaatcaaatgtattattctgctgaggactggggatactttcagaaaagatgtggcatgagaggtggacttggaagcatgtgacaaatttgacttctgraagagggactaggggaggccttttttaaatctatatttattctgaaaataaaagatagtaattccgtagatatataaaaattgtaggatttatgggttaagatggtctcctttaaraaatgaattattgaggggtggatcaagatggmagaacagaagtttccactgactgtctccttcacagggacaccaaattcaacaagcacgtgtgcacatgcacacacacacacacaaatacctccataagaaccagaatcaggtgaatactcacagtatctgatttaaacttcatatcgctgaaagaggcactgaagactgtgggaaagacagtcctcaattgttgacactataccttcccaattccccctgtagtagctgcaaagcatggagaaatttgtacactggagagaaggagactgcagtgattgtgagactttgtattgaactcagtgctgtcctgtcatagcagaaagcaaaaccaggctgaattcagctgacactcacacagagggagcatttagaccagccctaggcagaggggaatcacccatgccagtgttcagaacttgagttctgccaaaccttgccaccatggactaaagtgctctggagtcttaaataaacttgaaagtcagtccaggccacaagtactgcaagttttagtgctgagctgggcctggagccagtggacttgtgggagacacaacttactgagataccaacttgggcagctaagggaatgyttgcagcacccctccctcaaccccaggcagtgcaacttwcatctccaaaagagacttcttcctttcgcttaaggagaagagagggaaaagtaaagaggactttgtcttgcatcttggataccagctcagccacagtaggatagggcaccagtcagagtcatgaggcccccatktcaggcactagttcccagacatttctagacacaccatgggccacaaggggaacctactgtattgaagggaaggatccagtcctagctggacccatcmcctaaagagcccttgggccctgaataaccaccagcgatacccagctactattctgtgggccttaagcaagactctaagatgcactggcttcaagtgagactcagcaatctcagttgtggaggctacagtgagcgacttcatctggttgagaaaagcagaggggaaagtaaaagggcctttgtcttacaccttargtaccagctcagccccagtaaggtagagcaataagtaggccattgaggttcctgattctaggccttgctcttgtgtagcatttctggacctgccctgggccagagggcagcccattgccccaaaggataagccccaggcctggcagcattcacgcaagtggactgaagagcccttgggccttaagtgaacatcagcggtagcctgtttgatgtccctgtgggcctatggtggtggtggccacagggtgagcctcctctgcctgtggaaaggggagggaagagtaggaaggtgtatcatggtttcagggccagctcaaccacactagaatagaaaaccacgtagacttccaagtttttttattccagtccttagctatcagatggcatctctgggccttggggtaactcactgcagtgaagcaaaggatacaagcctggctaactttgccacctgctgcttttagagcccaagggccttaagaaaacaaaggcagtagctaggcagtggttacagcaggtcttgagcaagacccagtgttgtactggctttaggtctgacccagcactgtcctagtgttggtggccacagggttgtttgtgtccctctatcccaagccccaggtggctcagcacagagagagagactcccattgtttgggagaaagtaagggaagagaaaaagtctctgcctggtaatccagataattcttctgggtcttatccaagaccaccaaggtggtacctctatgggtgtgtaaaaaccacagcattactgggcttgggtgcccccagtgcagagctaatgcaggtggcattagatctagggcttagatcacaacaccgaggccctttcaaatacctggaaagccttcccaagaaggacaagtacaaacaagcccaaactatgaagactgcaataaattctgaactcttcatgcacagacacaagtgaacatcaactagcatcaagatcatccaggaaaatgtgacttcaccaaatgaacgaaataaagcaccagcgactaatcctggagaaacagagatatgtgacctttcagacagagaactgaaaattgctgttttgaggaaattaagaaatctgagataacacagaaaaggaattcagaattctgtcaggtacatttaacaaagaaattgaaataattaaaaacctcaagcagaaattctaaaattgaaaaatgtaattgacatactgaagaatgcatcagtctctttaatagcagaattgatcaagccgaagaaagaattagtgagcttgaagacaagctacttgaaaatacacagtcagaggaataaaattaaatacctagcaatgaacttgaccaaataagtgaaagatctctacaatgaaaggtatataacattgattcaagaaattgaagaagacacaaaaaatggaaatatatttcatgttttgaagaagacacmaaaaatggaaatatatttcatgttgatggattggaagaatcaatattgttaaaacatccatactacccaaagcaaactacagattcaatgcaattcctatcaaaataccaatgacattcttcacagaaatataaaacataaccttaaaatgtatacagaatcacaaaagacccagaatagctaaaactatagagcaaaaagaacaaaactcaaggaattacaatacctgacttcaaattatactacagagctatagtaaccaaaataacgtggtactggcataaagaccaacacattgaccagtggaacagaacagagaacccagaatatagccatacatctatagttaactcaattttgacaaaggtgccaagaacatacatttgggaaaggacagtctcttcaataaatgatgctgggaaaactggatatgcatatgctgggaaaactggatatgcagaagaaagaaactagaccactatgtcatcatatagaaaaatcaaattaaaatgggttaaagacttaaatctaagacctcaaactatgaaaccactaaaagaaaacattagagaaactcttcaggacattggagtgggcagatttcttgagtaacatcccacaagcacaggcaatgaaagtgaaaatggacaaatgggatcacatcaagttaaaaatcttctgcacagcaaaggaaacaattagcaaagtgaagagacaacccacagaatgggagaaaatatttgcaaactacccatctaacaagagattaataaccagaatatgtaaggagctcaaacaactcaataggaaaaaaaaaaatctaataatctgattttaaaatggacaaaaggtctgagtagatatttctcacaagaagagaaatggcaaacaggtatatgaaaaaatgcttaatatctttgatcatcagagaaatgcaaatcaaaagtacaatacaatagcatctcacctcagttaaaatggcttttatcccaagagacaggtaataataaatactggagaaaatctggagcaaagggaacccttgtacattgttggtgggaatgtaaattagtacaaccaatatggggaatagtttgtaggttcctcagaaaactaaaaatagagctaccatacaacccagcaatcctactcttaagtatatgtccaaaagaagggaagtaagtatatggaagagatacctgcactcccatgtttattgtagtacccttcacaatagccaagatttggaagaaacctaagtgtccatcaacagacaaatgaataaagaaaatgtggtacatatacacaatggggtactattcagccataaaaagaatgagatcctgtcatttgcgataagatggatggacctggaaatcattaggttaactgaaacaagccaggcacagaaagacaaacttccttctttttctcttgttctctctttctctttttcccttcccttcctttttctttccttctgtctctgtctctctctctttctctatctttctctctttctctctccctttctctctttcctttttcttgctgcttttatgctaagggctggcattctgattgctcttttttcaggtttaatccttattttaataaagttttcaagcaaaaaaaaaaacaaagtaaggcaaatttcccacgttctcacttgtggaaactaaaatgtaaaaaattgaattcatggagatagacagcagaagggtggttactagacactgggaatggtagtagggtggtcatggcgaagtggggatggttaatgggtacaaaaaagagaaagaatgaataagacctagtatttgctggcacaacaggatgactatagtaaaaaataatttaattgtacatttaaaaataactaagagtataattatatataatatatactgtgtacccacaattaaaaataaaaaattaataaaaaagaaaccaccacacaaaaaatactaaaaaaatgaattcttaatattttcacttgatatgctaaattgggtcacaggatttacttttgtgacatcaattaacattacttagcactccttatgtgtttattcaaaatatagcagacatttgccattctctggggatatatttaaagttctggtaaatcagaaatccttgaaaaataatagactcaatattattttctaaagagtgagtggatgaactctaggtagaataataacattgagtattaatatggtggtgggaggtacagaaagtttgcaaaaaacattgagttacccattttgattggaacatggagtcaattacagtggtagaggtggatgaacctgggaaactggagccctagtgttgaagatcttacaggactgtcagaaagaaattttgaattgcccacatctaacaatgatttagaatgaaattttgacttgatattttaatgtatttctcttccctaacatgcttcagtattcaatatcctttatgataaacaacctgggaggtagaaacagtattttccacacgatggacattcctgtgcaggaattggaatgcacattgaaagacctactgagagttttatcaggaggagagctttctgtgatagacagtcatttggaatccattttccttcatttgggagtagttcccaggccaaatcactgttctatttatatccatgacctccttttcaacactgtaccagctgagcactgtgtagagtcatccttaaaagcagccgtatttgggtcaaaaatgtcaaccaaaatgagtgtaattagacaaaaatttttttttaaagaaagaatgaagaggctgttttgtttttgttttgtttttgtttttgtttgtagccttgtcagtaaatccttaaacctgtttccatttgaattgctaaatcattatgtacaatgagcttgggtgtgtttaaytgagctcaacaaactttctttggatcattgaatgcctactgtgccagattctcagcatgtgtggtgtgtacgtgtgtgcatgtgcacatttggactggttgttgtagtctgcactttcaacaaacaaggaaatatctggaaaagtttattaccctatggatggagtggagaacagagaaggagtacatgggaatagctggggtcaggttagaagtgcttttctcctttctgaaagccactgctctttaaaaaaaaaaaaaaggtggatatcggggtgaatattgtactatttttaactcacttcatatacagaagtcttcagactttgggaatcatttaaaacaactgaagcttgtgaatgcagatagctggcccttatatccatattttgattcagtaaatccaagtggagcctgggaatctaatttttaacaaataccttctgggtgattcttatgcaggttgtcctgaattttgcaattgaaaacttgcttaagggccacttctgacccctaagtgtagaaattgaatgcaatttaaagcatttaatagaactcttatgggcatcctgatactgtactcaggtccagggatataaagttaagtaaatatctagtaggcggagaggagtataaacayacacacacacattaacatgatacatactgtgagagtgatagaaatttgtccatcaggtatggttgtaagaaagttacagatacccccttgccaaacaaaaagaaagaaaattacagatccagaaatcaggaaagaaaagttgaaaatcctgagggctgagtgctgagatagactttgcctagtttgcagctttgtttgggatgtgccctgaaaaagtcgtatactcagtgaagtggaaacggtttttctctttgcatcttctcctttaaaagtaatatgtgcatccatgaggctttcaggggcctttagaaagagtaaataagcctagtttcaatccatcgtctccgttagggtctctgagaatcagactgtgaatttaaagctgtactggagaaaaaagctacccacatctaaaaatgatggtgggcattaagagatgagatgaccttttattttcctgagcctatgcaaggagtgggtacctatgtacacagattcttctctctgaagtgcctgtgtaggttaatgacaatgccagctgaggactttcagttcttcatatgacagattaatgcccatagaaagttagaggtattatgaggttactttaatgactctttatcacaccttagttctgtagatattacccatgacttcacatggaggacaagtacggagctccagcctctgcaacattaatctcattaatatacaaaaattattgctagaatattaatctttcgcatcataaaataagatcctataatgcagatcttcatattgaatgactacaaggttacttacagaaactaaaaaaaatcttaataactttcctttttggtaatcacatttatggggaaggataaaattaaaatgtggaggtagaatcacaatataatgtctgattaaaatgcttatgcttatgcccagatgccaaagaggtagaggctgcttctttgttccctatgggaggtggagcccctttttcctcagttttgtttatctcttgttctggtcccagcaactgggaccaggggcactccctcctctagagctagggagaccgaggtatggcaattttcaggctaccccaccctgccagtcatcacctgtgatgacttagttttctactggcaccactagtcttggtgagcatcctgctttcaggaaggagtgccctcttaacccccataaatactgggagaataacctacagggttgtggctggcaccgggactcaggcaatagctggtatgttgagttggctaaaaaagtgacaactgaggagtgtgccattttctcaataacagcaggaaaggggaggaaagcagcggaggtggtgggtgaaaagaaggtggagagatgctggtggaggaagaaatgtaggttgaagaagagttgatgaagtgatatccatgtagagaagagaggaaatgatgaaggaaaataaagtgacagagatgaaggaggaggcaaagccctggcctctgaatgccacggactttctgaaggctggagctggagacagtacctgcacaggctaacaggggcttcctccagctggagcccaagtttgggtggatatggtgacactgagatgagaccacagattcatcaaacaaaaaatatcccttctgggatgccaccttttgaaaccacccccacccaaggtcatgcgtaggggccaaggtgcagatttgctgagggccatctcaattaagaggtaaagagttcagacatctaacgacatgctacatgttcaaaatctttttttgaacaaacctctacttcagaaacaaggtaatcattaaacaatatggggttagatcctctggacaagtgggatttcctttcattccagtcacwtggcaaggatcccatgccccagtcctgtaggagcaggatatcacctataggttcttcatctggtcctcagactgtagccttccagaacctgataagattgctgttatttttaaagggatctctagcccaactcctgaaataccaactgtcatgtggagggaaagccaggttaccttcagcagggcagcccatggagatactcaggctgttctggtatcagtgtagccaactcctacttttggaagttgcccctgctccagatcatctgccatctattgttggacctgtgcttggccaacagtgatgtctatgtgctgacctccttgcatcttggcttctccggacttttagtgctcccagcttcaagaatgtggcttttatgaacatgcccatcactttgtctaagccaggaaaatggtgaaaactgcattctttcatctacatggcttgaacccttgtctgtgtcagggccttcctgtctctctttgatgtaggtctttatgagttatcttcaaagagggtcagtgtatctttaagaaccgcaacctcaggaacaacgaaaggctgggttcaaggctggtggcaagctggttatcttcgagtatgtcccatgggcgttccatggacctaatacctttgcttgaccacaatcacgtagattttcatctttggttaagagttcacttcagccaccctactgagtatctggcaacacagggacataaacagtggcaagttgctgtgtatgtctgaagtgaaggataaaaagtagagggcctcttaatgtacccaagaccatagtttttsctgctcttctgttactagtaagtatccatgaaagtctgggctatggttttgtgtgtgtgtgtgtttgtgtttcctggccaaccttttggatattcttgtgcagaccgccattgacctcattgttcagtttctagtcaccaaagacttccacaactgcttatggactcagactcttggccaaccattggagaagccctctactatgccccatcctccctgtcacccaggaaccacaacaaatgtcagctgattgggctggcaggtgtggcccagttctctcagcaagggaaatatggcatcctttctaagaaccaagcattcttggtgacagccaataagcccatgaagaatatgggacatttaccagtcccctttcacccacctgagcatgatgaggtgtccaggtgctctgtgagatactaagagagaaaagaaagcatttctcatctttaaagtttatctatatctgtctgcctacatcttattccaatatctcttctctctctgtctctttttaaggcaccagagcaccctagaacacaaaacggctggaaagcagactttctaatttgctgcttctcttgattgtgtcctgggaagattgttcagtaatgtagactctgaacctctgctcttatgccccatagaaaattcaaagaggcacagacctaggactgtcagattgaaggactgaggtggtcaccagtcccatggaacagggatggttaattgcctaattgtgtacattgttctttttggctaatcttatcctcaatactgaccccctcaccccgacttctttcttccatctgtgcccaaatatccaagaagttcccagatatttcttaagtattagcctagagggcaaggagaaaaatgttatgggaatgaaatttaattaggagctaaaagaaattcttttaaatgatctaaaactaaaataaacaaacaaggtaaatgggatgggcgtggtggcttatgcctgtaatcccagcactttgggaggctgaggtgcacaaatctcttgagcccaggagttcgagactagcctgggcaacatggtgaaaccctgtctctacaaaaattaaaaaaaaaaaaaaggcaggcwtggtgacatgcgcctgtagtcccagctacaagggaggctgaggtgggaggattgcttgaacccgggatggaggggttgcagagagcccacatcatgccaccgtactccagtctaagtaggcagagtgagaccctgtcttaaaaaaacaaaaaaacaaggtgaatgcayagctctaatatatttatttacaccacctttatttctggaataatgtaaagattttgattctgaagttttgagaaaagataaactgagataggcaaattcttcaaagttttataaaagcagctatagtaatatgtaagggagcagttgtatgtatttttagtacttaagcctcctcttctatgttcagaaaataatgtaagttttttcagacatttgcataagcattatcttttccccatctccatgcttagtttagccatctttattcttacccagtgccattcacgaacaggtgggagatggtgaaaataaatgaaatgcactattttaaactgtgtctgttgtatttaaactatataaaaacactgaggcaattataaaggaattcagaacaaagtcaacttttagacagtttttctttttttttttttttttttttgtagtctgtttaccatgtccacttgtttcattttggtttagctcaaggaaataaactcaggagcaatggaattgatacatgacactttcacttttcctgctcctcatgaagcaaaacccactaattactttgaaggaatccactaacacttccacatatatttaattttgctaaacttgtatagagctgccttagaggaagagagaagagagaaaaatggagcattcctggaaagctgcattaagactgttgtgtttctgccaatattcttaaggtgccgaatatatctggaaagaaaaaaaatcacaaagatatattacatacactttacttaatgtatatgccaattacttaaactttccagacattttgatattagagaatgtgtgattatttattcattcatgcagtacacaaggtagtttggcatttcccattctctatacattaagcatagccatgtaacttgctctggtcaatgaatcatgaaaagaagatatatatgtcacatctgggaggaagctttaagagctcctgtacaattgggtcagaacctcttttcctttgctgtggcgactagttcccgacgtggaggttctgttagcattgttcctggagtgaagagatgtggcacagtttctcccctccaccccaatcccttaatccaaatggatatgtagaatgaatgagaaatacactgttgctaatttagtgcattaagatttggaggttaaattgttactgtatcataatctaacccagcctatgaaaacattttttaggtttctgtatgttggatatttatgaataattgtgagaatttcatttcctaatatgtgtcactgtttttttgatgtctgtgtcttccctacctctttggtcctattgtttctaatatttggaaactaaatatatatatttagtttacacacctatggagagaaagagagaaaggtctcgttctcgctttgtcacccagtctggagtgcagtggtgaaatcatagcccactgcagccttgatctcctgggctctagcrattccaagtagctgggactataggtaaggtccaccttacctggataatttttatttttgtaaagattgaggtctcactgttgcccaggctggtcttgaactcctggactcaagcagtcctcctgccttggtctcccaaaatgttgggattccaggtgtcagccaccacgcctagtcttaaagttttatacaatcatgtacggattgtaatatgaatttgtcatatttacattgtgcccacatttattttctacttcattcatttatgtatcagttggtaacatattggtctaacttttctatgcaattagagtacatactcctaaggagaaaatgcaacatataactaactaatctccatgtattcttgtgcaaattctagtcatacatatttaatggaattcaatgcattttttttttctgaaaagataattgagatgctgatgaggatgatgatggtgatagacatttcaggaagtgattgtgctctaggaacttggatgttcagagctactgcaaagcattttgatttgtgcaggcaatttactgactatatgttctgatatctgactaccagaaataagttttgaagtacacagctaatagcatcatagatagattttcaaagtgtatacaaatatgaacgggtgggataatgtgaagattagcaaagaacattgtcttattaggggtaaaatggtaaataggcayattttagatgtttattctttgatgggtgtcttcctcagtgagaattatttccaggaagtatattttagtctttggaataaaacttttgccaactcatattgcattgtctttctattcttatagtataattttattttcatttttctkgcatcagaaaacaggtcttaaagtgaaatttttgaatataatgatagatctgggggtatttgaatcagttttaatgcatatttcctgatgatcaagtgataagttttgcactgttggtctcatgagcttcttaagtgttctcataatattccctaaattagtgctcatataatttcatgcagtatatctttttaatattgtagtgttggaatgcttttacatggaaatttaatttttgatattaaaaataacagaatattttataataattcttggtatatttawgctggaagcatctccatcactgacgcatatttttcctatacagatctacatagcacacagatctagatggcgctcataaaatgaatggtgaaaataagcaaacagtgaaaattacttattgtgattatggttagcatggttgattgacttattcatttagcaaatattcaataaatatgagatatttaataaatagctatattatagacattatgctaagctctgtgaatacagagatgaaaaaaacatagtcccatttcttttttttttgagatgatggagtctcgctgtgttgcccaggctggagtgcagtggcgtgatctccgctcactgcaagctccgcctcccaggttcacaccattctcctacctcagtctcccgagtagctgggactacaggtgcccgccatcatgcccggctaattctttttgtacttttagtagagatggggtttcaccgtgttagccaggatggtcttgatctcctgaacatagtcccatttcttaaaagctcacatcgtagccagggatatgtattgactttatatagatacatattgattatagcttgtgctgaacgttaaagcagaaagatgtggaagtgctgtggaaacagaataaagaaaggattagttctttgagaaattatttgataaaaactaaaggaaggaacatggagcacatcacagaaaaagtgacactggaattgtgcatttagtacaatttttcatcacttcagcctaattaataatattaaaactattgaggattttattaggttggtgcaaaagtaattgcagtttttgccattaataccaccatctctattgtggataattagagagcttttctctaaagtaatagaacttttattccatgttctatgctttggaaatttgggagttttaacctggggtaaatatttaaaatatttattaacagcaatggacattcagaatggatgtgacaatagaattagaagagggtctggaaagacccctacggtagctgttaactctcaattatatggttatggatgggcctctgcacctcaatttttcatctttcaaatgtcactaatacttgtttcttcctttttttaaaaattatactttaggttctggggtacatgtgcagaacatgcaggttttgttacataggtatacacgtaccatggtggtttgctgcacccatcaacctgtcatctacattagatattctcctaatgctatcccacccctagccccccaccccccgacaggccccagcatgtgatgtccctgtccctgtgtccacatgttctcattgttcaactcctacttatgagtgagaacatgcagtgtttggttttccgttcctgtgttagtttgctgagaacaatggcttccagcttcaaccatgtccctgcaaaagacatgaactcatcctttttcatggctgcatagtattccatggtgtatatgtgccacttttttttttttttttttttgagaccaagtctcactctgtcaccaggctggagcgcagtggtgcaatctcggctcactgcaacctccgcctactgggttcaagcgattctcctgcctcagcctccctactagctgggaccacaggcacgcaccaccgtgcccagttaatttttgtattttcagtagagatggggttttaccatgttggaggatggtctcgatatgctgacctcgtgatccgctgcctcaacctcccaaagtgctggggctacaggagtgagccactgcacctggcccaatacttgtttctttcatgtaggatatttgtgaagataaaatgagacaatgtacataaagtggttgacgcaatggtatggggtatgaatatttaagaaacattaggcgttacaatttttaagagtaagaaagaacagacctgacgaaaaattacagatatatctaaaagtgtggaacaattttcttcaggtggaaaaactgggraaaaaatgctttccaaaggaatacttgaaagttggaaggagatgaagggatggctctggaaaaggcgattatttggaaattatctaggcaaaatactgacagtcctgttttcgtgggggataattattttatattatagttgttcctaatttcaatgatcatctctagtgataatgttawtgaacaaccctggagtgagatgtcagtatttgactgtggctgtttgcaaactctgctgtgattataaacagtagtctaattgcttaatttattgatgttttgccgacatgtttttcagcaacatttgtgattgcagataactaatcatttctctttgggctcattatcatacgtttgcatttgatttgtctgattgctgcaggtggaaacaataggtgatgcctactgtgttgcagcagggctccacagaaaaagcctctgccatgctaaacccattgctctgatggcyttgaagatgatggaactttcagaagaggtgctgacacctgatggaagaccgattcaggtaaccctcccaacaatctagtttgagtagtaagtgcaccattaactggaggaggcaaataattcccttccaagttctactttttgtaatttatagatctagacaagttgggtgcttaaggaggacaaggagtgactagagataactcataaatccaggaaaagaacaaatggaataggtccaagataggaaatggtttgtggaaggcaaattactgtggaggaaagaaagagctaaaagattagacccaagggaagaacttactgtcagtgaccaggtcacgaaatccaagcaagaatgatgatgatgagattcggagttttagaggtaatccaagaagtaaaacacaaaaaaagcaagaaaatggaggacctgcgcaacttcctgtagatagtatacaggtattccttgtgaaacatcagacctcagagttacttctggagtttttcttgtggcagagtttgaagattgcagcctgtgaaaactttaaaaacagtggaaagtccagatcctggtgtgttgtactcttgggtctgatggtcttctgcaatctgaggtctacctctgggaatgaagaatgaatgaggtcatctaccatatttctgcttgagcccagtgatggatcccagaagtgtcattactttgaaatcagaaatcttatatttggggaagtaaacttgtattcaagtccacccttttataacagcttaccagctaagagttaagaaaacacgggggcgggggggcgggcacaggaaatggctaaaaatatgagtaccgttctagttctggcattatagcagattggggacactgaacaatccatctgattaaaattatgaaaatattgggttaaatatattaaaaaatatttttaaaaaactattaggcacttctctgagctcacaggaacaggaaaaacatgacaattacactacgtgtgtagattgaaaaaaaaaaacgtaattggtgaatttaacttaagagccctgttattagcaatgatagaaggaaactgggaaatactattcccccctggaggatgccaacttcaatcctatcctcaaattatttccacagattccatgtgttgtaaaaataaggtcctagtttgtggttgtatttttatcttttagttgttcttgataaaccagaaggtttaattttaatgttttaaatgatacatattttcttttataatttgtaaatttttgacctgaccagttcacaaaaaattcttcctgacttaagtcagaatttcctaatgataaatttgcagtttcatagtatgggtttttacatttaacccacctggaagataaaggttattaaaacgagtaataaaaaagaaaaaagccacacacacatgaaaacaaagtactatggggaagaaccgggggaaattatagatgtgaaaaaacatacctgggatgttttcagatatcaaacttatcagacacagaattaaaatgacaatttttaacgtaactataagaaataaaaagagctgaaaactgtgagaaagggacaagacttgggaaagaatcagagaacttctaagcaatcaacacgatgcttaagaaaagaagagagaacaaagtggacaagtttaaaagcagattagacatagatgaagcaagagcttgttcactaaaagaactgaagaaattatcaataactaagttcagatatttaaaaatggggaatatgaataagagaatgtaaaatataaaatatgtgggagacagggcggagagagtggaaagatgtaatatatattcaattgaggttccaaatgaaggtaacagagtgaatacaaaaaagagaattattttcaggaactattaaaagatgtcaatcagtacccagacacagtaatcagcacccagacacagtaattccaaagaattctgcaaaagttaaaccataggaatccaaaactaaacccatcttaacgagactgcagggcatcagagaaaaagagcaattgataaattataaaagtgacagcctgggcacggtggcttacgtctgtaatcccagcacttagggaggctgagagggtggatcacaaggtcaggagttcaagaccagtttggccaagatggtgaaaccctgtctgtactaaaaatacaaaaaattagccgggtgtggtggcgggcgtctgtaatcccagctactcaggaggctgaggcagagaatggcgtgaacccgggaggcagaggttgccgtgaaccgagatgcgccactgcactccagcctgggcgacagagcgagactccatctcaaaaaaaaaaaattataaaagtgacattgattggtgtgaaaaggacaaggcattcaataaatgcttgggggactmttggctattcatgaagaaaactaattgaaattggtattgtactttatgaatctttatataaatcaatttttggtgtgggaggtaaatgtaaaaattcatattataaaactataaatttgtcattagaaaattttgacaagtagggaaggattttttgtgaacttatcaggtcaaaaatttgcaaatcataaaataaaagtttagaacattaaaattaaaaccttcctgttaagaagaactaaaaaattaaaatacaactacaaattaggagaatatttttgtgacacatgtaatcaataagtatctagttaaccttgtcagtaatcaaattaatagaaatttacaacactatcataagcatttctccctactagtttgacacaactttgaaagtctgacagtgccactgttggtgaggatctgtagcagcaggaaatctcacccatagctagtggaagtataaatggtacaatttacttggcatcacctggtaaagtttaacttttgcatgtcctacaacccagcatttcctctcctagacgtttacacatgtacaagggaagtacttgtgcacgtgtagcaaaagtcacacacaagaatagtttttgtaacagtctcaaactctagctaattcaaatatccatcaacagtaggatagataaactgtgttatatttataccttggtataccatatagttgggaatatgaaagacctcagctactgacatcaacatggatgaatgtcaaaaacataatcttgaacaaaagaatcaagtcattaaagaatgctgtagtattattccacttaactaaagtttaaaactggaaaaatggaaacaattctatttagaaatacttgcattgatggcaaaaagtgtaaaaaawaaaaggaatgattaacacaaaattcaagctggtgcttatctctgagggaaagatatgggaagtaagaggatacaatagggaagataaacatagtataaaattttttattttattactcttctttaatatgcacatatatgtttatatttaaccatttataagtggaaagagagttttctaaccactcctaccagtgatgaaaatgggaaaatatggagcattaaaaataaaatctagtttaagttccctcagggaataattattgaatggtacttctaccatgccaggaaaacaaacaaaaggaatactgtctcacatttgctgcacactgcaaatatagacattccagattgaactaatcagttcttaaattttcaagcctaccagctgggcaggcttctcatttgggattgtttttgatgttggattttcttttatggagagtatgtttgtattgaatttagcattgtcatagcacagttaaattacccgagaacaaaaccagggaattgtgttttacagtgtgttcatcaatattttcatttgtgggatttaatattagctctttcttatgaatcagatagtcttattaaatcagaagaggaaatatccataaagatttaataagaatgcagaaagagaattcaaaataataaaccaccttagtaattttagcttccttactaatttatagtatttgcatgatttgggattatttttcatcatattaatttgattttaaattgccttctagcttggtgctgtgggaacatttccaaacttattgagagaatcttttattatgaaactgctggggtgttgtagtagagttgatatgtgatagcttactgtttacctcaaattatgtaagtttttaggtgatttaaattacaagttattataatagcaataattgactaaaactgaatccaaactttgaaaagtaaattgataatttgtatatggatttatgaacctttgaggcatcctgtaatgatgggaaataggagccaaaattgtcatatacaattgcttggaaatgattggtaatgcccttgactcactaattgtaaaactgcctgcatttatttttttttaattttgaaaataaccagagaatgtagcattttgttttttcagcctataaatactcaagtaaattattgttcaataagtactctaatgaaactcagaggctacttctggactatatctataaagcattcataaatatggtctatctatacaatacattctgaaaaatcagttcatgttgactttaattagaactgcttttataaaaagtgagtagaactttttcaccctggatcaatatgatatttcttctgctggctgaaaatatggaagaacagcattatgactgtttcctttttattcttcccaagggagaatctgattttcttkttttttttcctcaagacacagggtcttgctctgttgtccaggctggagtgcagtgtcaccatcacagcttactacagcctcaacctcctgtgctcaggggatcctcccaactcagtctctggagtagctgggaccacaaacatgtggaaccacacctgactatttaaaaaaaactttttagtagagatgggggtctctctatgttgcccaagctggtcgtgaactcctggcctcaagcaatcctcctgcctcagcctcccaaaatgttgggattacaggcatgagccaccatgccaggactgaatttttaaattttaaacagtagacaattgaaaagtaaaattatatttgtattctctcttccttgtttgcactagctatattgtgaattcaccagagaaatgtattactttagttctctaatcttgtgaacccaaaggtattttgaatagtttttagtgctgactggctaacttacactaatagtttaaccacactttgattaaaataaccaaatatttattactgcctatgacttattctttctttaaaaaacactgttgatagggaaagggaagttgggtcaaggattaactagagaatgtacctagggtatatgagaaagacaaatagcattttcacgatttaaggcttttgaagaatattgagtatgtccaaatgtcttttaattctgtacttagtttaaaaactattttcattaaattttatctcataggcatacaaattcaaattttcttcattagttcaaagacagtgcattttatataatgaggcaagtatgcaggaaacattgtgaactagagttaaacaatgtgtaatcatgttgtaatactaatgtgtttagcaatctcaattgcaaatcagggaaatgctatgagaaaaagactcacagcattccctgatttgcaattgagattgctaaacacattagtattactgcctggtgcaaaagcaggaatattaatgtgcaatttacatgtattgtaacacattaaattacagctccttaagcttcaacttttaatgagcttacaggattttttgagattatgcaataattgttctctaattaatttttaatttttagcttcaacttttaatgagcttacaggattttttgagattatgcaataattattctctaataatttttaatttttaaatagtttttgctatttccagaggaaacctgatgttgttattttaatatttggagggatttgggttttggaaatattgcaatatttaattaaccctatcagatttcagcctgagactgtatttagaaaaaagaaaaactaattacagttggcactccatatccatgagttctgcatcctccgattcagccaactgtgggtcaaaaatgtaggtaggccaatgatagttgcttcagtattgaacatgtatagacatttttttcttgtcattctctaaataatacagsctaacaactatttactcattatttacaacacgttacatattataagtaatctacaggggatttaaagatttaaagaatgtggtaggatgtccataggttgtatgcatgtacaacactacttaatataagggctgcaagtctcttatattacttataatacctaacaaaaagtaaatgctatataaatcattgtaatactatatcattttgtttgtagtttttaattgttgaattgttatttttgtttgttatattttttttattttttaatgccatattttcaatccacggttggttgaacatgcagatgtgaaacctgtggatacacagggtcgactgtatttggtaacctaattaattttctaagattctttgataattatttatttataaaactcaagttagtactttttaatcacattgagattraaaacatataaggagaaaaacctaaggggtcagaaaaaactacataggcattatataaaattactgttaagatactgatcccagttatcctcatttctcacrtttatcaattaggagtatttaaatttgcttttaatctcctagataatgcatatagtggcagttttcataagtcagtgttctattgtaacagtaatatggaaaaataccgtataatgttactggtgaaacttaggactagatagatatattttccgatagatttatcattttgaatagtaaatttatttgtaactataaatgtgtttgtttttaaaaagtatttatttaaagtattaatatttgtgagtgtaccagcaaagttatgagtctcttctgtagtttgcttccttttaataatcaatgcctcattctacatactctccttagatctattttccaacttgccaatacttccctcagttggttgtaaaaattattgattaaactcatccacttgatgcttaaatgctgattataccagtttatagtgttttgcagttccatttgtctgacaaaatttttcataccgtttttatttattttcttgaataaatcatctgtaatgattgtaaatgcttctcctggtaagtcagtctccaraactcctgcagtctattacatcatttgttctttcacttaattttcagtcatgttacttgtttcctgtgtgactaattacacttttttttgtttgaatgctggagattgtatatmaaatattatagaaataatttaagacttaggatgattttgcagggaaattttagtgtgcttcttgaaagagactaggggctctagcagttagcgatcaggggatttaaagctgggttttggtctctgtgaggacctgtctacttctggttcacctctatgttttggtattacccttakacctgtggtcatgttcccatctcaaagtggggagggctttctaaggtctttgccctaggaattcttaggctccagtttatgttctcttggccctggctgtcaaaaatgctgctcagcttctcaacctttccattaccttttctggagccagaagatgcccacaggataaaagcaccaccaagtttacttttcacttctcaggtttatcttctgccatatcttggtacaataatttttcgttactttgttagctgaccagcatagggtaattcaaatgatataacctgctattttatatgtatatatgctaagtttcacaataattctgtgaaggaattattgctattatttccagtttgtaaatgaagaaaataagcataaaaaatagttaaccagagcttctaatatatatactgtgtatacattaaataaaagcatgttaaataacatttatattgtcaaatcttcctattgccttgaatattccattaaagttagacttttcatggctttagtcttcaakaaatttaaatgtatgttagatgtcctctttgaaaaagtagaagtaagttctctattttaaaggtattccatccaaaaataaaataatttgtttttaaattagaaagtaagagacattctagctgcatgtggtggtaggggggcatacctgtagtcccagatactcgagaagctgaggagggaggatggctttaatccaggagttagacaccagcctgtgctggacagcataacaataccttatctagaaagagagagagagattgacattgattaaattcagttatgtgaaaaaaatgagtgttattctatcaatcattttgtaaactgcaatcactggccagattgggtgggggatgtattagtcatgatgctctgctttttttctatattttccccttgtttattgtttgttgtggattgtaatgcagaagctacatatttaaacgttttatatttacattatttcatagggtagtcattgaatttaaagattaggtcatattctatttaattatttttatttattgagcacatttgttttaagcatagaattactcttctggcatgatgctatagtgctgaactttaatacacaaatttatttatagacagatctacttactgagcacattatttgttttaattatagaattactcttctgacatgatgctatagtgctgaacttcaatagacagagcatccttaataccttacaattcctctgtaagatatcagcataatgatttaaaacacaatattgtgtctgtgatgtgtatgtcaatgagacagaattccactgctagtttattttagcttttatctgtaatcatgaaagattccaattttatataatcacagaattttaatcatattttcagactataaaatagtctatcaggcatacatttctaaaaatgctagtcttactgaaaagttttattatgatatttgtcaaacagatttcccaagcagtccttttgtgaagatatttgcatatttatgctacaagaaagaatagttaataagttagtgaaagaaaaaacaaaaccaagtgatgggaaaaaaagctaaactgattcacatgaaactgtgcatgcaaagcacaaaattgcttagtttgattttgtgcaacagtcttgactttcacatttttggaagaaaaatacattctttagtggagacatggtttgagtattttgttagttaaatattatcatcactatgaggataactacctttaaataagttataatctatttcatgtattttattcctgcctcttgtctccagtgtcccactaagactactgatacaatgtccatagaagaggctaaaagttatattagcaaagtcactcatttttatttgatttttgtgtggtgtgctttagaagtgtgagacttccaagcagttaggaagctcgtgtttttatttatctgacgtttatgtaaagaataggaatctccatctgccaatattttttccctggtagagacagtaaatgtgatttcatcaacccatttagtaggttagcccattatctttagcatatggtccctttcttaggtgtttttgaatgggtttttaatcttttactgacacttcagtctcttttaagcctatatgcatataggccaacatgagtagcctaactcttacaatatgaaaaatgatatgaaaatagcaagatacaacacataagacagtaatgtgctatctgcatgctaatcacactattgatttagttagttagttagcttttacgtttttgacctgttgttttgagatctcatatctcgtttcaaataaaagtttaaaaattatttaatctctttatttgttttctaaaattacaaaaaaaagatctctgaaaactagtattacagaagatagttaaaatcacctataatttaccaaccaattatagacatattttacatttttatgtatctttaaagtctttttatatgcaaacattcaatacaaacacatagaaatagaaggtatggacttaaaaagtagattattttaaaaactgaataagcttcattcaacttggtaatatcatgacacacagtgtaccaaagatgcagagaaatatgcagaaaaaacttggttagccctaggaagaatctttcattattattaactcactttggttttgtatttttctgttcctacaattgaatttttgagacactggaaggtaactctttaatcacctgagttgcaaatgtggtactaacaattcagtgtcacaagtgcttttcaaagtatgttaagctttttgttgatgtcatgtcaggcatatggtaattgtctgggtcaccactataatattccttatttggaatgtggtttcctagcaactcttgctttttcctaatggctgaattgatttctggacatttgtaatgcttcctactgcatcagaaattgtcaccttgtgtgtaaatgttacaagaccaaatttacatgtagattccattttaagaaattattttgctttatcacttgcctttaatgtgtttgttcagaggttaaaccaatcaatcataaaaaatgaatttagaaaacctcattaattcagactctttagggaaatatggtaattttgacaaattccaaaatatatgcaaatagttcttagtggggaacctcctgaagttgaagaaacagagtaattttgatggtcaaatgaccatgtaatcaggaggttgttagaaacacaggtccggagtatgcatggggtgtcccaggggagaaaaggcttactttggaggcttgctgtttcaactcacatgaagcctgattctacatgaatctggttggagccttgctggcagcgacttttactcatttattcaacaaatgttttttgaatgcttatgattttctaaacaattggttaggtattagaaatgtgagggtaagcaaaccaggtacatccctgatcctcccacgaattacagcctatggaaccaacaactagaaattactaacttggtgaggaaggagaaatagactcagttttctctcaatactctttccaccttaacatcgagaggtttgggttaggcttttaggaatataattctttgtagagcaaatattcaggatgtcatttacattcagacctacattattttggtgtttttgtagatttcatatgttcttagggaagtgaggttgaaaggcattaaaaaccaactatgtggtaggggttagcttgacatttacatattatctcacttaatctacacaacaactaagaagggcatatatgcaatttttatatacttaaaagataaaaaaagacattggggttaaaaatatgtacaagattatagaggaaaaaatgcatactggacactttccagatgtcagacttgtgccatgtctttatgcactatttattcctgccccccaacccccccccaaaaaaatctgcaaagtaagtttcgttaatcttattttacatttaaagaatttgagatttagaaagtttatataatttgatcaaggttatgtagctagccaattgcagaactaaatttgaatccagatatatctgtttggaaaaaagaaaaaagctttgctttttttcaktataggaaactggagaatgcccagagtagaattttattacctgagtacttaataacaagagttacttctcacctagtgcttactacgtgctcagcattatgccaagctagagtgcgtgagcactctctctcttacatgtcctctcccttcctaatatatatgcatatacacatacacctgtataattatttacatgtatgtgtatattttaggcatattttcatatttgtgaaatatgcctgtactgtatatacataattattacaacaatcatggaccatggattagatgttatctctatttataaatgggaaaaccaagactgaaaggttaagggactttttgtcaagagtaaataatattactaagtaagaattgattcggaattggaattcaaatctgtttgacttcaaagtccatgctcgtaaccattaccctatactgccactcacaatacaactggaatgtattaatatgatttctaatcttatgactaagctaataactttaattttccttaaaaaattattgctattccctgttccttaagaaagaagtgtgaagacgtaatagcagtgcaatgtcttgaaggcattctaactcaaggcaaactcacatcgagatgttgaaataatgaggacaattatgtcgacatttaacagaatgagttgaaaattgatagttctatagaatttcaaaatatctgaagaaaaaattaagttgggaataatattgaaatatacacttctgtaatattagctttttataaaaaatagaagaaatgaactttttgtagaaacataataatccaaaaactaggaaagcagaaatttaaaaccgtatcagagaatccaaaaggcatatttgcttttttggacatattatcttccagatggtatcagttgatccttttggatattgttatctaagattattttttatttacgtaacgaaaagcactgattgattgaaaaagaaaaatgtagtcaaatagtttgatcagtcagcctgcaagcctttactgaatttctctcatgtgcaaaaccacataattgagttgcagactgaactgcatgagtgccaaatactaatctgctttttttcttggctctcaagtcaaaattctgtatacacaatacccaaacatctggtcacttaaatccattcagtcaaaaattcaattgaccgcccagattttctgattctaggattccattcaacttgtttgccttaattagttagtttatctgaaagctatgtcaaataggtaatagcatatatttagttatttcaatagtacttggcatcttacatatgaaaaggtacagttatggagggaagaaaacacaggttctrttcctcccacctccatcaagcttttaacagatttaatgttgttttctgccttctatactgtttgccttcctttttgaattggtctcacccatctctcactgccccccactctcgggacccctcagtctccatttctctctcaatttcctaaaagtgacatcaattttccatgaattacctaagaacgacttaccaamaaaaattacattgttatgaataatgtacgcaaaactgttgatactggctaacttaggggaaagagstttttccatttttaatcttacagttttatatctgttcacattttccaaatatacgtatgaattatttatgtattgccttttagtatccatagaaattatatgggagttgccatcacggaccatttttctttccttctttaaagtttcctatacttaaaataactcataaatataatttctaaagtaagcacaaattctcacttatatatttggttcacaggaataatcagcaggcaatgcctacaactgcacagaataaaaatttttattggctaaaaattagtgggagcatcaaatgtctttgacaaaattacactgtgaaacatttggccagcctaatgagggtttatagaaataatgaccataaaagaaaactatactggcagaaattaatatgagcaaactactgcttaatgagtcccaaatcatcactgtaaagtttcaatgggaaagaattcatgccaattaaaatattttcagagggacacaactggaaatgtaaaatattagaataaatgtaaaatattagaatcaatttatatgtagtatacagaaaatagatcaaggaattaaattgacttaatagcatttagtccagaaaataattttcttcataataattcttcagtattattawatttcattcaatctttgtactcctttgttggggtgcaaatgtcttgaactataactgttttattagcctaaggaattatttgatgaattaacagaagctgtatcatggttctagacattcatgctcaataaactgaattaaatgttaccaactggtaggagaaagtagagaactttatttagttgtggcagtgatagctattatatctttggatgattatagtttttatctctctgatcctttgctgcacaagtaagtattcttttatatttgcaactttttgccatgtcttttacctcacatataaataagtaaatacattgacttccaggtttttaataaacttatagtattctccatttcttttattgtgttttctcatctttctcttactctaaattgcatattcataatcttgtccttttgaaaaatactaaacttakcccatgctcatattttaccccagcactcaaaatacaaattagtaattttgctacccaaagtataatgaagtaaagtagacctgcctcattacaccagtgagaatacctattatgaggttatgattagtgatcacactgtgctctatgcagcgcagcatcctgtgctatattaaaatctcttcactagttgtgttactgtagcacactatatccaaacattgttctgtgttatttttctcttcattttaactgtagtttgtgaaaactcttactttgtggttaagaaggcctgtccagggaagcaagagtcataccatattttaaaaatatacagtttatcagagctctaagcataatgtatcagccacaaacaatcatggcaaagcttcccttttaaacttggtgcttcaagggttgtttatgccttcaaaaatttgctccaaaattactaattcctrttttacactgggaaagttattagtgtgttcaagtagattgatatttagatttaaaaattatctcaggcaaacatatttctatccatctctatggcawtgttttgatggccaatttatgccagattctagagccaaatgtatttgcctgaggtctccagatgttttctgacttgctgctggtgtctgaaaaaacgttgcaactatgactgtaaattcaccctttttgctttactgaactggggctaagacacccatcyttcttttcttgtggtttagcttagccagaaatgcaccagagataatttacaaaaggataattatatagtagcttaggaaatttggttgtgaataactaacattttgtaagcttttaaaagttggaaatttgaagatcaactctcatttcatacatgataaaaagatatcaaaaaagtatttgattatacttaagttatctaactagttagcaataggatctgaacatgtgaaattcaccagggaagctaatgaagaagataaggccagaagaaggagaaataatattgtagttttkctttttctgkcaattgttcatcatgatagaagaagtataatttggaaagtgtgttttgaggttattatatgaaagaggtggaaaattgcacaaatctgtggcagaaggtccaattatcttgacctcttgagtgtcatttctttattatcagagtattactatttttactgtttcctttttaatcttttaaaactattaattctttcctcagttcctgtcttccttctgtgagagcctctcattattcatatagaatttagccaaagttgacgtggatttttttctccttttaacctttagtattttctatggaaatgatgggccagttatttgttagcttgtaaaaggaggaaaaaacaataaatgtgtacctttatatccccacacctcttctgtattatctctcagaacatattaattttttgaaaataccagatctttaaaaatagtggtacatcttcaggaatatttattttttcatcatttcttctatttgttaccatcctcaagtatgtcaaaaaattagaataaaattattttacctactttgtccaaatatcaagttgtaaatactattcatgtattaaaaagtgaaaaactatgactgttataaaaaatatatgctcacataaacgatcgttttatgtatcattccttgaagttcggcccactttagaaattcacatatagccatgcctccaaactcatcatagcttagaattgttccaactacataatctcaactccaaatgtcttttcatagtcacattacttgttcttctgccactttctattctaccattctcactcatcactgtgatgtataagcctttatccattcttaggtttccagtctattttgagtatattagttttctatgyctgacataacaaagaaccaacaaactaagtggcttagaacaacagaaatttgttgtctcactgttctggaggctagaatcccgagatcaacgtgttggccgttttatttgaagacatgttttatttgaagacactagggaaggagctgtccaggtctctctactattactagattctgrtagttccttggcagcataaaatccaatctttacatggcattctccctgtgggcatggatgtatctgtgtccagatttctccttttcgtttttttgagacagagtttcgctcttgtcacctaggctggaatgctgtggcgcaatgtctgctcactgcaagcttcgcctcccaggttcaagcaattctcctgtctcagcctccccagtagctgggattacagacgcctgccccaacgactggctaatttttggtatttttagtagaaacagggtttcgccacgttgggcaggctggtctcgaactccttacctcaggtgatctgcccacctcggcctcccaaagtgctgggattacaggcatgagccatcacacctggccatttctcctttttataaggatactagtcatattggattggggggtcccccctactctggtaggaactcatattaataattttcaatttgaytaattatatcagcaattaccctacttctaattaatgttaaattctgagatactgaggattaggaactcagtatatgaatttaagggggtagggcacaattccatccataataccttcttatctagaaaagaagaatcccattatctcctatctcaacatggctcctatcacccttctaattttattcttgtcttccatcatacagagctacctaagtagaaaattcttgctctggaattgatggacattactggtgaaaattacataatcatggtaataaaatacccattaagaatgcatatgttttgaactcaactgggccttaaatctgtagggatcttgtttcaccatcccctagctatgactgttgcaaatacttgcttttttttttttcaataatttcaacttttattttagattaaggggtacatgtgcatgtttgttacatgggtatgttgtgtgatgctgaggtttgggatacaaatgatcccatcatctaggtagtgagcatagtcactacatttgtttgacttttaactttgctactcttactccaaacagacccctcctttcctaactaaatgaaatgctagaagacatcaatatgaataaatttgacattctttccacacccctccccaacactattctttcttcaaatatcttctctgcctttcatctctcccctttgactggccccagtgtgtcaacaaaayctcctctgtaattaatgcaaaaatgtcattttctttgaaagcttccctctctaactatgctacatgctgctgctttgtttatgatcaaaaaataatggaaagccactctgttgactcttcattgcctaggaaataagaactaaatcctaatcagtaagtacctttaatgtgttctcaagctagttgttgaaacctatattctggtgagctttcaagatggccgaatagcaacagtggtggtctgcagctcccagtgagatcaatgcagaagatggatgatttctgcatttccaactgaggtacctggttcatctcattgagactggttggacagtgggtgcagcctatggagggcgaaccgaagcagggcagkgtgtggcgttgcttcacctgtgaagtgtaaggggtgggggatttccctttcctagccaagggaagccatgagagtctatactgggaggaatgatacactcctacccaaatactgcacttttcccactgtgttcgcaaccagcagaccaggagattccctccggtgcctggctcagtgggtcccacgcccacatagcccagcaagctaagatccatggacttgaaattctcactgctagtgcagcagtctgtgatcaacctggaatgctggagcttggtgtggggaggggcgtccatcactgctgaggcttgagtaggtggtattatgcccacagtgtaaacaaagctgccagtaagctcgaactgggtggagcccaccgcagctcagcaaggctgactgcctctctagattccacctctgtgggcagggcatatctgaacaaaaggcagcagtccagtcagggaattatagataaaaccctcatctccctgggacagagcacctggggaaaggggtagctgtgggcaaagcttctgcagacttaaacatccctgcctgacagctctaaagayagcagtggttctcccaacaccacattcgagctctgttaacagacagactgtctcctcaagtgggtccatgacccccatgtagcctaactgggagacatctcccagtaggggctgacagacacctcatacaggagagctctggctggcatctcatgggtgcccctctgggacaaagcttccagaggaacgatcagggagcaatatttgctgttctgcagcctccgctggtgatacccgggtaaacagggtctggagtggaccttcagcaaactccaatacacctgcagctgaggggcctgactgttagaaggaaaactaagaaacagagaggaatagcatcaacatcaacaaaacggacacccacaccaaaaccccatccatagtcaccaatatcaaagaccaaggtagataaatccacaaagacggggagaaaccaatgaaaaaaggttgaaaattccaaaaatcacaatgccttttctcctccagaggatcaaaacttcttgccagcaagggaacaaaactggatggagaatgagtttgatgacttgacagaagtaggtttcagaaggtgggtaataacaaacttctccgagctaaaggagcatgttctcacccaatgccaggaagctaaaaagccttggaaaaagatgagaggaatggctaactagaataagcagtttagagaagaatataaatgacctgatgcagctgaaaaacacagcacaagaacttcatgaagtatacacaagcttcaatagccaaatctatcaaacagaagaaaggatatcagtgattgaagatcaaattaatgaaataaagtgagaatacaagattagagaaaaaagagtaaaaagaaattaacaaagccttcaagaaatatggkactatgagaaaagaccaaatctacgtttgatcggtgtacttgaaagtgacagggagaatggaatccagttagaaaacactcttcaggatattatccaggagaaattctccaacctagcaaggcaggccaacattcaaattcaggaaatacagagaccaccacaaagatattcctcgagaagagcaaccccaagaaacataatcgtcagattcaccatggttgaaatgaaggaaaaaatgttagggacagctagagagaaaggtcgggttacccacaaagggaagctcatcagactaacagcagatctctcrgcaaaaaccctaaaagccagaagagagtgggagctaatattcaacattcttaaagaaaagaattttcaacccagaatttcatatccagccaaactaagcttcataagtgaaggagaaataaaatcctttacagacaagcaaatgctgagagattttgtcaccaccaggcctgccttacaagagctcctgaaggaagcactaaacatggaaaggaacaatcagtaccagccactgcaaaaacacgccaattgtaaagaccatcaacactatgaagaaactgcagcaatgaacggacaaaacaaccagctagcatcatgaggacaaaatcaaattcacacataacagtattaaccttaaatgtaaaagtgctaaatgccccaattaaaagacacagactagcaaattggatgaagagtcaagacccatcagtgtgctgtattcaggagacccatctcatgtgcaaagacacacataggttcaaaataaagggatggaggaaaatctaccaagcaaatggaaagcaaagaaaagcaggggttgcaatcctagtctctgataaaacagacttcaaaccaacaaagatcaaaagagacaaagaaggccattacataatggtaaagggatcaatgcaactasaagagctaactatcctaaatatatatgcacccaatacaggagcacccagattcataaagcaagtccttagaaacctacaaggagacttagactcccacacattagtaatcggagaatttaacaccctaatgtcaacattagacagatcaaccagacagaaaattaacaaggatatccaggacttgaactctgctgtggaccgagtggacctaataggcatctatagaactctccaccccaaatcaacagaatacacattcttctcagcaccacattgcactgattccaaaattgaccacataactggaagtaaaacactcctcaggaaatgtgaaagaacagaaatcacaacaaactgtctctcaaaccacagtgtaatcaaattagaactcaggattaagaaactcactcaaaaccgcacaactacatggaaactgaacaacctgctcctgaatgactactgggtacataacgaaatgaaggcagaaataaagatgttctgtgaaaccaatgaagacaaagacacaatgtaccagaatcactgggacacatttaaagcagtgtgtagagggaaatttatagcactaaatacccacaagagaaagcaggaaagatctaaaatcgacaccctaacatcacaattaaaagaatagagaagtaagagcaaacaaattcaaaagctagcagaagacaagaaataactaagatgagagcagaattgaaggaggtagagacacaaaaaaaacccttcaaaaaaattatgaatccagaagctggttttttgaaaagatcaacaaaatagacagactgctagcaagactaataagaaaagagataagaatcaaatagacacaataaaaaatgatacaggggatatcaccaccgatcccacagaaatacagtctaccatcagagaatactataaacacccctttgcaaataaattagaaaatcaggaagaaactgataaattcctggacacatacactctcccaagactaaaccaggaagaagtcagatttcttaacagaccagtaacagtttctcaaattgaggcaataatagcctaccaaccaaaaaaagtccaggaccagacagattcacagccaaatttaccagaggacaaagaggagctggtaccattccttctgaaactattccaatcaatagaaaaagagggaatcctccctaactcattttatgaggccagcatcatcctgataccaaarsctggcagagacacaacaaaaaaagagaatgttaggccaatatccctgatgaacattgatgtgmaaatcctcaataaaatactggcaaaccaaatccagcagcacatcaaaaagcttatccaccatgatcaagtcagcttcatccctgggttrcaaggctggttcaacatatgcaatcaataaatgtaatccatcacaaaaacagaaccaaagacaaaaaccacatgattatctcaatagctgcagaaaagaccttcgacgaaattcaacagcccttcatgctaaaaactcacaataaactaggtatcgatggaacatatctcaaaataataagagctatttatgacagacccacagccaatatcatactgaatgggcaaaaactggaagcattccctttgaaaactggcacaagacagggatgccctctctcaccactcctattcaatatagtattggaagctctggccagggcaatcaggcaagagaaagaaataaagagtaatcagttaggaagagaggaagtcaaattgtctctgtttgcagatgacatgattgtacatttagaaaaccccatcatctcagccccaaatctccttaagctgataagcaacttcagcaaagtctcaggatacaaaatcaatgtgcaaaaatcacaagcattcctatacaccaataatagacaaacagagagccaaatcatgagtgaactcccattcacaattgctgcaaagagaataaaatacctgggaatccaactttcaagggatgtgaaggacctcttcaaggagaactacaaaccactgttcaatgaaataaaagaggacacaaacaaatggaagaacattccatgctcatggataggaagaatcaatatcgtgaaaatgtccatactgcccaaagtaattcatagattcaatgttatccccatcaagctaccactgactttcttcacagaattggaaaaaactactttaaatttcatatggaaccaaaaaagagcccacatttccaagtcaatcctaagccaaaagaacaaagctggaggcatcacactacctgacttcaaactatactacaaggctacagtaaccaaaacagcatggtactggtagcaaaacagatgtatagaccaatggaacagaacagaggcctcagaaataacaccacacatctaaaatcatctgatctttgacaaacctgacaaaaggaaaaggattccctatttaataaayrgtgttgggaaaactgactagccatgtgtagaaagctgaaactggatcccttccttacaccttatacaaaaattaattcaagatggattaaagacttaaatgtaagacctaaaaccataaaaaccctagaagaaaacctaggcaataccattcagacataggcgtgggcaaagacttcatgactaaaaccaaaagcaatggcaacaaaagccaaaattgacaaatgggatctaattaaactgaagagcttctacacagcaaaagaaactatcagcagagtgaacaggcaacctacagaatgggagaaaatttttgcaatctatccatctgacaaagggctaatatccagaatctataaagaacttcaacaaatttacaagaaaaatacaaacaaccccatcaaaaagtaggcaaaggatatgaacagacacttctcaaaagaaggcatttatgcagccaacagacatatgaaaaartgctcatcatcacttgtcattagagaaatgcaaatcaaaaccacaatgagatactatctcatgccctcatgcctgttaacatcatgatcattaaaagtcaggaaacaacagatgctggagaggatttggagaaataggaatgcttttatgctgttggtgggagtgtaaattagttcaaccattgtggaagacagtgtggtgattcctcaaggatctagaaccagaattaccatttgacccagcaatctcattactgtctgtctacccaaaggattatamatcatgctactataaagacatatgcacacgtatgtttaytgtggcactgttcacaatagcaaagtcttggaaccaacccaaatgtccatcagtaatagactgcataaagaaaatgtggcacatakgcaccaaggaatactatgcagccataaaaaggatgacttcatgtcctttgcagggacatggatgaagctggaaaccatcattctcagcaaactatcacaaggacggaaaaccaacactgcatattctcactcataagtgggagttgaacaatgagaacacatgggcacagggaggggaacatcacacaccrgggcctgctggggggtcggggcttgggggaaggatagcattaggagaaatacctaatgtaaataagttgatgggtgcagcacaccaacatggcacatgtatacctatgtaacaaaactgcatgttgtgcacatgtaccccagaacttaaagtataataaaactatattctattgaataaacctttttgaaccataatatggcattaaacattccagattattgccattctgtacattgctatctctttaccatattcaccaagtttaccttagccatgttgttaattggtttgttatatttatattaggttttgttacgtttatattttgtttattttcttattctatccatctttcttggccagctcaaatcctaagaagtcatctccaacactcactatctccttagtagcaattacttccttcttccttaggaaactgataactttgtcacaatttactgttggtatttaacatattgtaacttgcaaataaattgtgtgtgtaaattcctgtgttgtatgtactaggctgtgagaactttcctgtttgggactatgtcctgttcatctttgtatatcatagtgcaaggaatttattatttgtgaattaaacagatttatcaatgtagaaatatataaaattctgcagcaaaatatggaaaattatatcctgatatacgtttgttaattctttwttcatttttcatacattggttttacatataaaatattatcaagacactaccatgtgcttaatacaaggtactaaataaactgaaatttattttataatttaattctacaaataaatccactctggtagcatttggggamtataatattgactttatattttaaaataaaaatatgaaagtttattttattttattttattttgagaaaatactggcaaattagaaaatactggcaaatgtttttgcacgtggtctcttaagaaccatagctcagaaccctgggatgtgatacagtactattcacatcagtactactcagacacattgaaaacctggtcctgtgtcaagtcccatgaagggaatccctaagggaatagagaagagaatgctatttaatgatttgatgcatgatagtaaccacaggagaataaaacttcgaaagagtctttataaactgggtttaatgaaactgatcatttccagttctattgtatatcatttactgccttagctggcaagactctagaaatagaaatagagaagattcttccttctcatatgtgtacattttaatatcttgaatatagaggactacttatagaattcagtgaagtcaccaaaggttgaataattagctatttctgccctttactagttgttagatttawcattatcaacctttgcagtgaaaagtagaaaaaatacaaactgcaccaacagttgggctagtcatacattttacacagtgacaatatcccattaaaatggtattcttaaagaggagatgtgtgaattaatatgcagtggcacatagaattaaccaggcatcatcattttatttcagaagcactcatatgattaaatttctgagctaaaaattcatccttaaaagttatactttagcagaatgactgattttattttatagctgtcaatttgattgacaagtaggatccatcaagtgtgtttctattcttgtaatccagggacaccttgaaaagatttcgcaagagaaaagaaagaaatattatagaaaaaaaaaaggaaatcgcatgtctaattaagagcttaatttgtgatgaaaatacataattttttttttacatccactatggtgctaaaacaactacactggaaaaatcccttagttatggggtaattggtatgaatcaaatatctttcttatttagaaaccatttatagtgctgaattcatttcatttatagtagtgtcattttgtatttttatgcagtttgaattggtactgttttctaattgcagcaaggactttactgcataataatttaaaattttagctttgtaatagctcatgaaaatattcaatattttgttttgttgtgatggttaatattaggtgtcaacttgattggactgagggatgcctagatggctggtgaagcattgtttctgggtgtgtttgtgagggtattgccagaggagactgacatttgcctcagtgagctaggagaggaagacccaccctcagtgtgggttagcatcatccaatcagctgccagcatggctagaataaagcagggggaagaaggtgggataagctggcttgctaaatctgccggctctttttcttttgcctgttttggacacttgcttccactcttctgcccatagataccagactccatgttcattggcttttggaatctgtgacttgcaccagtggcttccccagggctgtcaggccttctgcagcagactgaaggctgcactgtcagcttttctggttttgagtctttccaacttggactgagaaattataggcttctctccccaacttgcagatagcctatcatgggacttcaccttgtaatgatgtgatccaattctccctaataaactctctcctatgtatacatagatccaattgtttctgcccctctggagaaccctaatacaatcatatttactggtgtatttagtgctagatgtttacatgatataayggtgtgagttctcaagaatctgagataaggtcttgggtgtaggtagtttacttggaaggagatcccagggtcaggaatgagagtgaagagtgagaaggaggaaagggcaatgtacgagtacgttttcaaggtcatgcctctgtgagcaatgtggactagattccactggggattgctcctaagaggcatagagaatacctcttaaattatctgtctagggaagagcaggcaagaacatatatccactggttcttctatattggttaacactccaaggacattaactccttctcacttccaggctgcattaacttacctcaaggcaaaaggtgatcagtatagaacaagcctaaaagctcctaagaacagtccagtagctatggctgaactcagaggtgggtgcagaggctgtgaggtggagcagcagagggattctgttaggcaggggttatgtaacatgattgattccgcagcccaaaggagaacttgacacccaaatagcaccaaaaacaatagatttcaaatattttctcttgtggacaatacatacattacagttatttatgtgtcgyttaatgacagggatatgatctgagaaatgaatcattaaatgatttcatcattatgcaaatgtcacagagtgcacttacacaaacctagatggtacagcctgctgcaaatttaggctayctgatacagcctagtsctcctaggctacttaacctgtaccggatgtgactatactgaatactgtaggcagttgtaacatgatggtaagtatttatgtatccaaacaagaaaaggtatagtgaaaatacagtattataatcttaagggattgcyattgtatatgtgagcccatcattatccaaaatgtcattatgtgacacatgactgtatatgattctactgggcatacagagacaaaaatttatgaaataatacccttgctgtgcacaatgaggtctgatgttttctattctgttctacrctgtgttattctgttctatttaattaaacactgctcttcataactccctaaagtaatttttaaatccatggtttggaaaacattggccgaaaagataattaatttacctaagaaggtaaatattagcgtattaaaaataatggaaatcatgtaacctaagccatatacagtgagatgtttagaaataaaggtcatagttttaaggtcaagaaagactcaattcttaagaaattagaaaatagagtagcatggtttaaatgtgtaccatggttctagatttcatctgtcagtgtttcagaatctgcaaatggataaagaacatctagctccctaagagaattaacagggagggaacacagaagggctgaaaaatgaggtgctgttctccttcttttacctcagctgctgtgattcctgctatcccaattcatatacatatagtgaggagaattcgtatatacagcctgtataagtatgtgtacatatacacagccagctagatgttaccctataggtagagcttcctagtgccctatctcaggatccttttgcatcttatgtttgtttcaggtttattgttttgacagttgtcacttttaagcttcttttctcttttcatagagaaagagctttcagtctcctaagaggatagctctattatcataatcaccttttagaagagaaaattacctgtaatttttatgctctgaaggtgtgtcatcataattcagccacccactttaccctcaaaatcaaatggatttttttaaagaaacttctttattctttcttattgcattttctttggaggaaatgagagcttaagaatatgggaaatcccatcaagtttctatgagctttgctgcctctttctactgtcagctgttgtgtttaaggatatcacagccacagtgatctgcaagcactgctgttgtaagacttgtctcaacagagtacagtttaaagagtaagtgaacaagtaagggaatagtaaccctcgcacaagccataactttccatcagatccctcatgcttacaagctccacctttgctgttgtgtacacagctcctcctrgaagcccgacctccccatcccaccccagcactcctgtaaatctgtctcatgggaaagataacacaggagtgtgtgctcacaggttaccaatcaatatcaatatttcaccaaatctcagttgtaattgattatcttccagttattggagaataaaccccaaaaggggtggataaagggaaaaaatgcaaaaacccagaatgtcatgtgccttttgccagctactgctggatgtgttctacaactgagtacacagctgtttctaataaacactattagtactaatccttaagcagttattgccttctcctcattgcagtagatcctccagtatagcaatctgaaaaactgacctcattgtcaagtcaattggtgtcttgtgaaatgacaatttggtggtaaagtaactttcgcaaagtgttgcctactacagattctgaaaagtatcaaggttaaaaaatttatttaacttttcaaacctagaatttctcacatttattatttcatgggccgggcgcggtggcttacgcctgtaatcccagcactttggcaggccgaggcgrgcagatcacgaggtcaggagatcgagaccatcctggctaacacggtgaaactccatctctactaaaaatacaaaaaaaatagctgagcatggyggcaggcgcctgtagtccgagctatttgggaggctgaggcaggagaatggcgtgaacccgggaggtggagcttgcagtgagccaagattgcgccactgyactccagcgtgggcgacagagcgagactccatctcaaaacaaacaaacaaaaaaaacccacatcttttgattcttaaaggacagtgactatttgcacaactcagtatggaaaataaggttttgcccagcgtgccattttttatcacgtgggtgcctttacactcctttttctacgatgctttctccaagttcccttggaatattctctcatcccttcaaatgacagagcttcctatgccagataatttttttattgtaccaccaatgtcaacctcartgacattggccataaactacaaaatcatggctatatgtatatgcaaataaaaaatgtcacagtactgattttttatttttgtcccttgattcacttggtgtctcggtgtgacttttcaagccccagaggagtgaactccttttctcctttcctgtttccatccagctggttccagatcagcatcaaagtgaaacggatttgggtactgaaaaggtaatgagcttcacttatagggagaaggaaaacagaggatacagctatgcatattggttattacttacttccttgagtataatccttattcatttattcaaatatcatcatcatccttttgtttgtagtagtactggtagtttgttgagactctactttgtcccaaatattatttagagcatatgtaaatgttaattttttcagtcctcacagaaaccctataaagtatgtctcacattcttcactctacaaataaaacaggccaagaaaaatgaagacacttgccccagtcacatggtaatatatggcagaaccaaaaatcaaacttaggtcactttagttcaaagcttttttttttccctccactatgagctactgctctccaggcttgatcatctcttgggtgctagccactgatatgctccccagattccagtggctttcattcatggcttctacttcaccaggaagtgcctgtcctttagccaaagagaaaatacttttgtttttgccccagtttttttgtcctggtagtggggctaaagatggaaattcgccatttgtttctrtaatagatactgataaggaccaccaaaatgatggaaaatgtgcaagcttcaaagcaaaagcctacaagaagggagtataaactgaaaaagttacattagatagcacagatttgctgggctcaaaatatatccctctggctgtcattagcacagaactatagtaggatttaagaaatgtttgaagaattcatggcaaaagataaaatgtgttatccagttgcaagacatcatagagaccatgagggaccacatttgcaaatatagttcattctgacaacagttgtgtgtgcatcttaggacagtcattacatatggttagtcattatttatggaatatctattgtatacagatgggttggtagttaagaaggaaatattctttagctcctgttgctacaaaataaacattgatcagtgtttacaccatgccaagaaagtatttgaatattaaaatctcaattcactaaatggtggtatgtggcaacaaatggtaattaaaataaatatttgataggtttttattgtttaaaatgggaggcaatttagtgagagttataatacacagtggtataataaaatggctaataaatttcactgttttttaagaagtggagaaccaattagacaaagtacttctcatttattttttaagagagaaagagagtgtgtgggtgtgtgtccattcacacatgtcactacacattaccctagaacactgtggggtttagtaagacccttttaaatatagaatgccattaaataaaaatacagaaactagttttcagtctaaatatagtaatatagtaactgcttgttgcacttattgtgaatatttcagaggataaaccatggcaaatcgttcaatcctttccttttttctgtactttgttaactcatggtaaatttaacctgtttttctctcttaaatctaataatttttattcttttccttcataattaacagtgttttagatagtattttaaataattttmtacaaagtagtttacactcacaagattttttttaaaattcaaaatatttgatgaggcagccttttcagaaatgtcaaagtagtaatgcttaactaaagtatatagcagtttaaggacaaagagaagtcaatcattatccatgttgacaacatgagtacccaccaaaatataatttttaatgaggtacacaattagctgcttttatatggatcataatataagttctgccccatcccccactccatcattctatgatgacaaattactatttttgaatgttggggaagcgctagcaagctctttctttgttcactcagtaaaacaggttttatatggctcttcaaataactcctaaaacaaacttattataagacatgacaagtaaaccttcctgcttattanntttcataagcacatcttcaaaaatgtccaaaaaaatgtaaggtcaaaaggataagggtggggaaagcttgtacaagataaaagttaaattctttgggaaggcaaccattccgatgatttaaaaagcatttaygtaacatggtgaaaccctgtctctactaaaaatacaaaaattagccgggtgtggtggtgggtgcctgtagtcccagctactcaggaggctgaggcaggagaatggcatgaacccaggaggtggagcttgcagtgagctgagattgcaccactgcactccagcctgggtgacagagcgagactccgtctcaaaaaaaaaaaaaaaaaaaagcatttatgttgatgattgatgagacacagaaagatatttgctatactagaagtttacagagtttctcatatcctcctcaactttcttgttttcagtactcttttcaattaggaatgataggaaactgtatttcttttccttgatggagtaacaaagggtgataggaatactccttatttaataatgatgtatgttatacatccatggtcttcttggtcgttcattcctgagctagtttctaaattagaacttgattcatctaaaaatggggtggattcttaaactagggacttacaggaaaaggcaaccttttagttttctgcatattgtattcaactctggaatcttgtgtccagttctgggcatgttcatagatttaattcatgtcaacaaatatttactcagtgccactttatacataaaacactaccctaggactttggttgtccaatcaagatcctatcacattctatattatgcaaataactagactttttacaaactgaatggctttccctggcctcagtgtatttacaaactagtagaagagacaaatacagaaacacataattaaaatacagaaaaataaatacaaaattagtatatggatagcatatgaaaggtaaaggaggtcccaatcccgccctctagtcatggaaaccacgagttcgttattaatacaaagtcaatggagggtaattgagtgacaggaagagagacaggtgctgggcagaaaccacatcagtgcacttgtgacattttatttaatggtaaattctatcatattcatggtaattgcctgtgactgcaaaatgaggaaaggttacatgtatttgtcttctcatcattatcaccactgtaaacttttttctaaatacccatatgtgggtggagctaatagaagccccacatttttgttagaaccattgtggtcacctgagaactcgtgacctttttcaagcgggaaggtacctctctggtagctttatgtattatgaatttgaagggacaagcttgggaacagaaagatcagttaggaggtgaccataggagtcacgtgaaagctgacaaaagcctgagctcaggcagtagtgttacagataaagaagaagagatggagcaggattcaaaaatatatatgtatataaacttacttgattagatgaagtacatgaaggaataaaagactactcttaggattatagcttgggtagtagcaatttagtggtgtggtactatgacattaatgggaacccactgaacatcaaaagaatatatttatacttttccatattagcaaaacctaaagaagactcagattaataggcaaataccaaacaaaaaaatgaagagggtacttcagaagtacctgtttacttattgaaagtagtatctgtttactcattgaaaattcatccatttgaaagcgtttacaatgttggtgggagtgtaaattagttcaaccattgtggaagacagtgtggcaattctttaaagacctagaggcagaaatatcatttgacccagaaatcccattactggatatgtacccaaaggaatataaataattctgttataaagatacatgcacacatgttcattgcagtactattcacaatagcaaagacatgtaaccaacctaaatgcccatcattgataggctggataaagaaaatgtggaacatatactccatggaatactatgcagccataaaggggaacaagatcatgtccttttcagggacacagatggttcctggaagccattatccttagtaaactaacgcaggaacagaaaaccaaataccacatattctcactcgtaagtgggagctgaatgatgagaacacatggacacatgaggggaacaacccacagtggggcccttcagtgggtagtgagtggaatgagggagagcatcaggaagaatagctaatggatactgggcttaatatctaagtgatgggatgatctgtgcagcaaaccaccatagcacatgtttatctgtgtaacaaacctgcacatcctgcacataaaagttggaaagaaaaaaaaagaaaattcatccatttgaaattcatgtgctacttttttctccccacttattatttgattttgttgagtgtattttgataacaacatgaactgtgaataaaatggcatgcaattgaaaggcagtaattgctaggtaagtaatactaagtaggtatagtggggtcatatttttaatcaagtgataaatagttggagagaacaaaaatgaacagccttgttatacatgcaaatgtcataacttcattcagttttatctgtctagctgtatgcactatgtggaagtgaatgcaagtcaaattcatgaagtaattatctagattaagaactaaaaggattcagtrcacttgattgttgacattttatttaatggtaaaatctatcatcttcatgataattgcttgtgactgcaaaatgaggaaaggttacatgtatttgtcttctcatcattatcaccattgtaaacttttttctaaatatccatatgtgggtggtgctagtagaatcaccacacttttgttaaaagcattacgtttgctttctccaggataattctgacaacaatagtacaaaacttatcatcttttattttggtcccttacctcctctatttccaataatttattggtgtctaatgtaataccataacctgttctcccaagctccatttctgtggttattttctccttttccttcttccttctcctttgatacacaataccatcacatgttgctgatctttccactgcactgccttttttgttcaataaaaatgtaaggtccccagctcacatgtatgcttcagtgtgcagctccagagctgctgtccaatatggtagccactagccacatgtgactattgaatactttagatatggctagtcaaaattgagatgtgctgtaaataaaaactacataccagacttgaagactttctccaaaataagaatatttaaaaagtcattaatgatttttaatttgattacagtttgaactgataatactttgaatgyattaaataaaatgctatttaattagttggacttttttgtttttaacatgcctattagaaattttgaaattgtgtacatctcctacatctgaggcctacattgtttttctattggacagcattgcaataaaggacactagagttaaagagggcatgctctctgctccaagacygtgcagctagactaactataatatcataaattggagccaggcttggtggctcatgcttgtaatcccagcactttgggaggccaagacaggtggatcacctgaggttgggagtacgagaccagcctgaccaaaatggagaaacgctgtctctactaaacgtgcaaaattagccaggcatggtggcacatgcctgtaatcccagctactcaggaggctgaggtaggagaatcacttgaacccaggaggcggaggttgcagtgagccgagatcacaccattgcactccagcctgggtaacgagctaaactctgtctctaaatacatacatacatacagtgatatggtccataggagagtgtaaagagaagagtgagtaaacatttctaacagggcatttgaggaaagatccatggaagaagtgatattgaatcatcatagaaggagggcaatggtgttagcatttcaagtacagaagacagtgtaagttaagtcttggtgacaagaaacaggctgctgaaacagtcacctcaaatattattttatcacatcactgctctatggccaaccatagaaaaataaaaatctatccagaaaatattttaagcttcttaccagtttttcttaaaagcatctgtttctacttccttacctactcccactgagaaaaaaaggttcctctcaggccgggcatggtggctgacacctgtaatcacagcacattgttgggaggccaaggcacgtgggtcacstraggtgaggagtttgagaccagccagaccaacatggtaaaactccgtctctactaaaaaatacaaaaattagccggacatggtggtgggtgcctgtaatcccagctacttgggaggctgaggcaggagaatcacttgaacctgggaggcggaggttgcagtgagctgagatgtgccattgcactgcagccggggtgacagagcaagactccatctcaaaaaaaaaaaaaaaaaaagtgcctctcaatgaggtgtaaaggtagtggtacttacggcagactagaaagatgctatgtcagtcgtgctgctagggacctctgaggagctaaactctggttttagctactgaaatgggaaagaagtagctcgcctgtacccatgcttaactccaggagggaggggaaacacaagagtaacacttcccaatagtatgtctcctgagaattgggatatcttatggttcaccataaagtatctgttgagtaaggaaacatgaacaaaggaaaaagaggcagatagaaatgaagaaagtagggaaaatcaattctaaaagacatgttttatagataataagaaactaattaggagcataaaagagaattgagggttatagctcaggcagtgcagtatcctccacaggtttgaattcaggcactggcctgtgctgcccttaggttgtaggcaagctgcttaccctctctgactttcaattccctaatctgtaaaaagtaaagtctaagaattagaaacaaggtaaaacatagtgtctggcactctgyaagtgttaaataaatgttaattttatgttygaccactgtttgctaaataattttgaaatgtatccttttttggttgattccctgggaattcagttaggaagagaggaagtcaaattgtctctgtttgtagatgacatgattgtatatttacaattgtctcggcccaaaatcttcttaagctgaaaagcaacttcagcaacatctcaagatacaaaatcaatgtgcaaaaatcacaagcattcctatacaccaataatagacaaacagcgagccaaatcatgagtgaactcccattcacaattgctacaaagagaataaaatacctaggaatccaacttacaagggatgtgaaggacctkttcagggagaactacaaatcaccgttcaaggaaataagagaggacacaaacaaatggaaaaacattccatgctcgtggataggaagaatcaatatcatgaaaatggccatactgcccaaagtaattatagattcaatgctatccccatcaagttaccattgactttcttcacagaattagaaaaaaactactttaaatttcatatggaaccaaaaaagaacccgtatagccaagacaatcccaagcaaaaagaactaagctggaggcatcacactacctgacttcaaacaatactacaaggctacagtaaccaaaacagcatggtactggtaccaaaacagatgtatagaccagtggaaaagaaaagaggcctcagaaatattgccacatatctaccaccatctaatctttgacaaacctgacaaaaacaagaaatggggaaaggattccctatttaataaatggtgttgggaaaactggctagccatatgcaaaaatctgaaactggaccccttccttacaccttatacaaaaattaactcaagatggattaaagacttaaacgtaagacctaaaaccataaaaaccctagaagaaaacctaggcaatacccttcaggacataggcatgggcaaagacttcatgactaaaacaccaaaagcaatggcaacaaaagccaaaattgacaaatgggatctaattaaactaaagagcttctgcacagcaaaagaaactatcagcagagtgaacaggcaacctagagaatgggagaaagtttttgcaatctatccatctgacaaagggctaatacccagattctacaaagaacttcaacaaatttacaagaaaagtacaaacaacccatcaaaagtgggctaaggacatgaaagacacctttcagaagaagacatttatgcagccaacaaacatgaaaaaaagctcatcatcactggtcattggaggaatgcaaatcaaaaccacaatgagataccatctcacaccagttagaatggtgattattaaaaagtcaggaaacaacagttgctggagaggatgtggagaaataggaacacttttacattgttggtgggactgtaaattagttcacccattgtggaagacagtgtggtgattcctcaaggatctagaaccagaattaccatttgacccagcaatcccattactggatatatacccaaaggattataaataattctataaagacacatgcacatgtatgtttattgtggcactgttcacaatagcaaagtcttggaaccaacccaaatgcccatcaatcatagactggataaagaaaatgtgggacacatacaccatggaatactatgcaaccataaaaaaggatgagttcacatcctttgtagggacatggatgaagctggaaaccatcattctcagcaaactaacacaagaacagaaaaccaaacaccgcatgttctcactcataagtgggagttgaacaatgagaacacagggacacagggaggggacatcacacaccggtgcctgttgtgagggtggggagctaggggaagggtagcattaggagaaatacctaatttagatgatgggttgatgggtgcagcaaaccaccatggcacgtgtataactatgtaacaaagttgcatgttttgcacatgtaccccagcacttaaagtataatttaaaaaaagaaaaagagatggtccactctaagagaagtggagccaccaaatctaccttaaaaagaagtaatcaaaaacctcaaatgaataagcattctaaagtggatatactatctaaagccatacaattaactagttaactatcacgggggagccagagtaagtatgttaagttctcttctattcattaaaccactttgagtgtaccatctgtttcttgctgggatactgagtgataaaactgataaatttttgttctttttttgtacttgttttaaaaatcaaaatgtgcrtctacaatgaaaagcaatgacagtttgagttaccaaagtgctaagggatttgctactaggatgggtaccaacaatgttagtaaagtcagtggagctgccctctgtaggctagtcctgccctccatagacaaaagatactgctgaaggactggcttccctgagagcaatgtggtggtatgctccccagatgaaagagactgtctggtagcacctgatcatcagaaacaagcaaaatgcaatgatcactgtaagtgtcacgtttggagataaaaggcaatcctgtactttctacctttaaaaactacagactttaaaaaaaattgaagacacacaagaaatggaaagatatttaatattaatggatcrgaaggatcaatattattaaaatgttcatactacccaaagcaatctacagattcaatgcaatcactatcaaaatactaatgacattcttcacagaaatagaaaaaataattctgaaatatatatggaaccataaaagacccaaaatagccaaatccattatgagcaaaaagaataagactggagaaattacattacctgacttaaattatactacagagctatggtaaccaaaacagcatggtactggcataaaaatagacacataggctaatagaacagaatagagagctcagaaataaatttatacatctgtagttaactcatttttgccaagggtgccaagaacatgcattgaggaaaggatcgtctcttcaataaatggttctgggaagactggatatccatatgtagaaaaacgaactggaccactgtctctcaccataggcacatcaaatcaaaatagattaaagatttaaattcttagacctcaaactatgaaactactaaaaggaaccattgtagaaactctgcaggacattggagtgggaaaagaktcaattagtagtagctcaaaaacactggtgaccaaagcaaaaatggaccaataggatcacatcaacttaaaaagcttctgtacatcaaaggaaacaatcaaaaaagtgaagatacaacccacagaatgggagaaaatatttgcaaactatctatctgacaagggattaaaaaccagaatatgtagggagctcaaacaactcaataggaaaaaaaactaataatttgattaaaaaatgagtaaaagatctgaatagacactactcaaaagaagacacacaaatggaaaacaggtatatgaaaaggtgctaaacatccttaatcatcagagaaatgcaaaacaaaactaccatgagcatctcaacctagataaaaatggcttttatccaaaagacagatgacaatgaatcctgctgaggatctggagaaaggggaaccctcatatgctgttggtgggaaaataaattagtacagttctgttggagaagagtatggaggttccccaaaaatctaaaaataaaactaccatatgatccagcaatcccactgctagttatataccccacagaaaggaaatcagtatattgaagagataactgcactcccatgtttattgtaacgctagtcacaatagccaagatttgcattcaacctgtccacagacaaattaataaggaaaatgtggtacatatgcacatggaatactattcagccatgagaatgagatcctgttatttgcaacaacatgaatgaaactggaggacattatgctaagtgaaataagcccagctcagaaggatgactattgcatgttctcacccatttgtgggagctacaaattaaaacagttgaactcatggagatagagagtagaatgatggttaccagagactggaaagggtactggaaaggagagaggaaaatggggttggctaatcggtacaacaatrtacttagatacaatgaataagatgtagtatctgatagcacaacagggtgactagtcaggaataattttttgtacattttagaataactgagggaatacaactggaatctttataactcaaataaatgattaatgtttgcagtgatggatatctcatttaccctgatgtgattattacacattgtatgcctgtatygaaatacttatgtaccccataaatatatataccttctatatagccataaaaataaaaaattaaaaaaataaaaattaaaagaaaatactaggagagtattttattccatcaattctaaaacacacctttttccttcctgttgtttaaaatcactgaacccaggatatgtcttaccatatttgaagaaagaccatgggtcctagtgattgcaaacattcttttgctcatcttccgctaaaatcgagatgttccaacctcaaagcctgaagagtgaaacctcttaagaaatattcttgatgtcccagagaatgaaacaggtgggaaaacatggacaacaatacctccaacttgaaaagtgattcagaagagttagaccctgaaaatgaggaactttggcaataacttcacagcattattgtgcttatattttctttttatgtgtgactagaatgaatataataaaaaatatatctaaatcagtcaaatattttagcagttgttaaaggaaatactaagatatgmaaacatgtcatggtttaattttttcctggtggtacacaaaatactcataccttttgctattgatggagtcttacattctatgaaatacatttatttttttcaaacctattgtaaaagggtacataaaagataggacagagcaacaccctcaagtttgtaggatattcttatatatccttaggccaaggcaggctaagggcagaggcatgaggtaagcaaaatatatctttgattttgactttctgttctctctcaagtagagagaagcaggtcagtgtaactaaagggcaaagaatttggagtgcagtttagttcttgctccagtggttgctggtatgtggatgtgtgtgggtcatgtcaactctgtgttttttctgaggatactgataaggttcattaaaagtgtatttgaaaggtgccataaaatactattaaatcattctttcttytttgcctgttttacaaacagaaaagaaactcagtatagtttgtctcaagggagattactatattgttacctattcacatccacagtcatacactgtgactaaccagttatagcctacagtctacatgtggccaaatgtttcagagtctctaggagatagaggaatgctcccctaggaggagttgaggaatgcattttcaagagaggactgataatatttctaagagagattccctgattgccttcgatatccaagtttgggcatctcattgccaaggttccttctcctggcctgcttcctcagtctttctccccagctgttgagggctgtattccctgtccaagctcctcctcctttccaaattagttccaatchgttcccctggcctrtccccaccactcggtcagctcgctcagtacttctaaacctcatgtgtctgctccgtatctctgttcttcagagccagtctttctgtatcttcagtctagtaagtgctgctttcataaactagacttaaaatttcatcgcattttaataaaaagtaattactttatatatgatctttaagcagctattctcttaaagaggtactaaatggtgagactttctggtaagggaagaagagagaatgatgccttgaccagtgtttgaggagttaacttcttgagaaaatattgcttacagtctggtaccaacatattattggcagtaatattcattaaacattgttagcatattcgtagtctctaaacaatggctttcaaatattttgactacaactcataataaatacattttacatcctgacccagagcacacatatatgtttatgtatataaaaagtacatctaactaaaaaagattcatttaaaaaaataaaactcctagccttacaactcactaaaagattgcaaccagcagtttaaaaaaccgtgatacataacatgtccttttggcaagtttgaacagsaatgtgtttggtggtttatgttactcgctggaaaacaagcrtttttgaaaccattatagtgttgaaagaaagtataacaaataatcttagattacagttgtctgtgattattccaaatctgaattttccattcctgtgttatttttctcagggactaaatttctaaatgtgattttgtagcagatgaatgagacagggaaagtaaggctattgtttttatgaaatctaggctacattttattccaatcttgtttctgatatcttttctcttaaattgatgttatcattcagcttccattaagaaatgacttctgcatccatttgccttgtgtgtatatgttcacaaatgagtcaatcatatttyattccttaatttctgtagtgagaaaaactgtccatcctaaaggaagaacttgaagaatttcttgctctcctaatggtttttcactaaatccaattctactaaacatgtcattgttaggaataacattttgttttgttttatttcaaggatatgcttcatcatcatcattaccaccatctaaatgcattgttggcagtatggaaaggcaacaataatctttaacattyaaatattttctagtaggttacagatgcattaaatattccattttgtcttagtgaacaaattcaataaatgaggctaaatgtcttatgaagctaactttatgtacttaaaattgaagaatatgaatataaaaatatactatatttaatccatctttagttaatttttgtaaggaagaggtctagtttaagtcttctgcatatrgctagccagttatcccaacaccatttattaaatagggagtcctttctctattgcttgtttctgtcgactttgtcaaagatcagatggttgtaggtttgcggcctgatttctgggctctcttatctgttccattggtctgtgtgtctgtttttgtaccagtaccatgctgttttggttgctatagcaggtagtgtgattcctccagcttggttctgtttgcttaggacttccttggctatttgggctctttttggttccatatgaattttaaaatagttttttgtaattcagtgaagaatgtcattggtagtttgataggaatagcattgaatctataaattgctttgagcagtatggctattttaacaatattgatttttcctatccatgaacatagaatgtttttccatttgtttgtaccatctctgatttctttgagcagtgttttgtaaatctcattgcagagatcttttacctccatggttaattgtattcctaagtaggtagtttatttatttatttatttggtggctattgtgaatgggactgcattcttgatttgggtctcagattggatgttgttggtgtataggaatactattgatttttaaatattaattttgtatcctgaaactttgctgaagttgtttatcagatcaaggagttttagggtagagactatggggttttctaggtatagaatcatattgtctgaaaacagggttagtttgacrtcctctcttcctatttggatgccttttttttctttctcttgcctcattaccctggccaggacttctagtactatcttgaataggagtgttgagagagggcatccttgtcttgttccggctttcaagggaaatgtttccagcttttgcccatgcagtatgatgttgattrtggatttgtcataggtggctcttattattttgaaatatgttcattcaatgcctagcttgttgaggtttttaacatgaaaggatgttgaattttatcaaaagccttttctgcatcttttgagttaaccatgtggtttttgtttttagttctctttaggtgatgaatcacattaaaggcataaatgtataacctaaaactataaaaaactcaggaggataacctaagaaataccatttcagacataagactgggcaaagattttatgaggaagatgccaaaaacaattgcaacgaaaccaaaaattgacaaaggagatctaattaaactaaagatctgcacaccaaaagaaactatcaggagagtaaacagataagctccagaatggtagaaaatataaggtctaatatctggaatctgtaaagaacttaaacatatttccaagccaaaaacaaacaacttcattaaaaagtgggcaaaggacacaaacagacacttttcaaaagamgacatacacatggccaataagcatatgaaaaaatgcccaacatcactaatcattagagaaattcaaatcaaaaccacagtgagataccatttaacaccagtcagaatggctatkattaaaaagtcaaaaaataacagmtactggcgaggttgtggagaaaaacgaatgcttatacactgttgatgggaatgtaaattagttcagccattatggaagacagtgtggtgattcctcagagacctaaagacagaaatatcattcaacccagcaatcccattactgggtatatacccaaaggaatatacattgttccattataaagacacatgcatgtgtatgttcactgcagcactattcagaatagcgagatatagaatcaacctaaatgtccatcaatggtagactggataaagaaaatgttgttcatatataccatggaatactacacagccataaaaaaagaatgagagcttgttctttgaagcaacatggatggagctgaagccattattgtaagtgaactaacacaggaacagaaaaccaaatatcacatgttcactctcacttttaagtgtgagctaaacatcatgtacatacagaggggacaayagacaccagggcctactttagggcagggggtaggaggagagtgaggatcaaaaaactacctatcaggtactatgcttgttacctgggtgatgaaattatctgtacaacaaacacccgtgacatgcaatttacctatataacaaacctgcacacttttaggtaccgctgaacctaaaagttttaaaaacagtatatattatatactataatatatatatatatatatatatatatatatatatatattccatgctgattaaagaaagcagttttgtcattaaagaatgacatttttgcttatcacttgagaataatgtgcctgtttatgccaatgtagaaaatagactctaatttttcattcaacctatgcattccacaaagataattcctgagkgttagaaatgtacatagacacaagaagattacaatcaagagaggaaacaggtttataaaaaataattaaaatacaatgtgatcccttagctagaccttgaaagacatgtagaggggaaattattccaaatgagacagcagttgtgagaaacaatatcaagatattttcactctttctagcctggcataattaattgtgattactctggcaagtatgacatcttctaaatttacaaaaacagctattttgtcattgagggaatcattttttgctgtgctgatattacaataataagctggcttgtgtcattgcagaaaatggtctgtaattaaatcttcctgaacttctaaagagcagtttccacaaaatggctgtatcttctaatttcctttccattttctcagcaagacatagtccctatgacaaaagtaagattttttgaatatatttctcagtttcctggcaaagttgctcatttgcaaagtcacacacccagcccacagaaatttaaaaaaaaacatattttagtcattcatttggcaatgctttttacacaaacaggtaattaggaacactgaaaagacttaaaagatcctcaatctgaagtgataacgctcagagtatgtattggataayggcagtaagacagcagtccccaccaattcttccttctagcttcaatccccatatcttcctcccacctaattccttcccaggttttaaaaagaataaaagactttaaaaaatgaatttgtggcagtatggaatttttatttatttgcttatagcatgtctccattactttaaataccataaaagcagacatctcatctgtcttatttattcctctatacctagcacatggaacaatataaagcatgtattacaaactcaacaaatatttggtgaatgaatgaataagtgaaataaatcaatattaaatgaagtaaatcttctccttggcaatcatacttttcataaatatgaagacattgtcacactgtcattcttatcaaaagtaagggagagggaaatgagcattttgtgattgtttaaacattgcagtcaacacttattgaacatccactacttcttacataaagataaatagagatagtccctcctctcagagtgtagatttagatggggttgcaaatatgcaaacagataagtgtcataatattgatcttcggtaattataaaatttacatcttcagttttaactattcagaagtgatctcagagtagttatatatagtaaatatatttttgcctaagcatgcatgcatttaaatcacccatgctgcaaggcttgagtagagagctagtcagtgattttagattagtgttcaccatctgcacatccacatggcttgtgttctgtctcattcttagataaacattttttgggaaaaatgatttgatgctgtggcatcatgaattcagggatttccaaatatttgtttggagttccaaagaggtgtcttctctatctcttcaggagaattgtcagagtctactatgatatatatgtactaaaatacaggaatgtacaagaaactgggatagcagagaggatgggatgataaactgtggctagtaaagggtgagagaaaggagggcaagaagtcaggagatcgtttgctgagaagttgtatgacacgagtgttgaagattaacagatcgaataggaaattgttaggtaattaaggtaggtaggatggtgcaagaagaagaaatagcatgtataaaatcccagaaatatgaaattatttggggaatttagtaaacaagaaggcatgcggtgttttaagagaaacagttataaaggtgggaggagcatcagatgaaatgggacatttacgaggagccaggccattaggcattatgacttcctttcacagggatctctagatattattagtgggaagttgggagccattgggagattctaatttgggagaaacctgttcagatgaatgtcttagaatgttttagaaagaaccatttggtagctgtgtattggaaatttgaaggggaaattggctggagtcaggtggagaaattagattagtgtgattggccaggtaagaggaggaaaatccctgctaaagtaggaacagtaggaatggagaaaagcagaaaatatggagacatttagaaggcaaaattggcaagatacttcctaagcgattttagtgtacaaagtctagtttctgaatataagttgtttttccttttatttttaagaaacctgtgattttttttccataaatgtrtatatcttttttcactgaattctttttaaatgactggagcaaaggagtccttgaaaaatgtgacctgagtacygtgtttagtagattgaaaattcttcaggggcataagaaattaagaatgtggttttcttccaagatcaagaagctaaggtcatctaatggagaagttcatgtcatccatcacatgttctcatcttgcagatgtggaaaaatgccagtggctggcttctgtttgacagattcagtgagcctgcttcagaggactctgagccaggaaactctcaaggtgggctgcatcccacaggacagctcttgaatttggacagctcttgaatctggtctcatgttgtcaggatgacttggctcaccacaacgtggatgtccttctttgtagcttccttctttcttcagaccttacacaggccctgctatgggaatggctcctgtcctaacagatttgcgttgatatcaaggactccttttttccacactttacctcatacttcaacacttgacttcttgtgcatctcttgcttcctagttttgttctgccattttgttctgaccaacagtcccaacctgttggctctaaaatttcacactcttcacttggcttcaggtcctcggttttaccccgattacgaatcttttaaatattcagttccaaaattattcatccagctctttttgtttcccatgccacatactctttggtaagtccgccacagccagaacatccagaaccacctcaaagctggtatctctcaattcagatttaactcttccattcaaaattatttcacaatctgccaccacctttatctcacccaaagggaacttgttaattttcctttagctcttattccaatccatgacaccaacccactaagccaggtttgggacacccttctttgtaatgctatctcttgtctttaatatccagtcagtcaccaagtcttatcaatttttctcctacatgtgtctctaatcagtctccttctttccattaccattaccacttaaatgtcactaaaaacttttagcctgtagtgtttcctgcccacccgcctaaggtcattctccatcctgtagcccatattaatactctaaaacagaaatacaatctgtcaatgtgctacttaatttttgcttgcttacccaatatatatacacttattgatctgtttttctgtggtttttgtttttgttttgttctgagatggagttttgttcttgtcgtccaggctggagtacaatggcccggtctcggctcactgcaccctctgcctcccaggttcaagcgattctcctgcctcagccccccaagtagctgggattacaggtgcccgccaccatgactggctaatttttgtgttttttastagagacgaggttttaccatgtcggtcaggctggtctcaaactcctgacgtcaggcaatctgcctgcttcagsctcccaaattgctgggattacaggcgtgaaccaccacgcccagcctgatctgctttttatgtgtcaggcactgtgggaggatgcagtgttatcacaataaataaaatatacttagtcaatcttatactcttgatgcctttcagaatctgttaaaagcccttacagttcataaaatcctagtctgttccagcctaccagctgaaaaatggggtattgcaatgggtaagatctacttttcctcgtcctctccctgcccccagagtactgcacagtctgtggatgggtatataaaaggaggaaaaaaaaaaaagatctggagtaagaaactagagtccactgctgtcattttagtagtcactggagagtcaagcatttaattaaacatgcaaatgcctgtcactgactacttttaagctcataatttaccatttcaaacatttggctcaaagtactctgaaatattactaacctccatcaatgggaacaaatactttattaatattgtgataaaaagtaattacatattaaaatattaccatatactatacatgatactctaccatggcttcatttttgttttgataatacctttacgtgattaaattaacttttaaaaatatatttttaaattgaactatttggtataattctgataattttagaatatgtatactctcctaaatatacaccatgaaaataaatatcacagttagaattttagccaataagaatttatgtcaataagaagatacatagaaatatcataaatatctgagttgttctctaccaaaataaaggatttcttaaataattcagtctgcaatcctaattatttctgcacagtgtaattaaatttctattgtgaaaattaatattcttaaaaagtaataacatcaattgttgcaggcttctttttaataaacatctacataaggtgtctgtatacttggagatatgcttatctgagtaggagaataagatttggtggtaaagctaatctagtaaatgaaatcaaatgagataatagatgcgaagggcttgacacagagtgttgcacactctaagtgctcagtaaaatgccagagatgatgaggatagtgatgctcacatctgtattgtcaggttatctcgttatcctcattttacacatagagatatgaaagctgcgagagtaacaatgactcactcataagggcaggcagataatatattgcataaccaggagtgaaacactgatttttcaaataggcttaaatccaagactcttaaaccatgctttgagcaagaacttctcaggatttgaaaaataaaaagccttgataacccagtgtggttggaataagcactcaagagcaagagagccacagcttcctcctgtgtaaacaggataaaggcacttaagggcaggtgaccagagagagtgagatggggccggagggaaggatagggtgatcagattcagggattggagccaatttttgtggatctagctacgtgacaatatgaaaaatgaacccaggtcaacaaaagttccttactgggttatagtactcttcttccttttaacttgagaagtagaagggtctgacaaattgagtctgatgaataaactcttgtgttggccaattctgcctgccatgtgcccttagactgcttgcaggrctgaggcccacagtagctgtcctggccttttgctgtgttactggttcctggtgtacatctctgaaagggctcaggccacccttagataattccacaaggcaggtgccatggcttggatacactcacttgacccaagttagcttgttctgtttattcatgtggttgtttttaacttggtagaaaaagtaaactgaacgggaatggaggaataccttaagcaagtttctgtcaaattattatttacttaaattcattttttaagaaactccctctacgaggtgaaacagttgaagaaaacaaaatacatttcaaatatctaatttaaaaagcatattaatttatgttcaaagatgttttaagaagtggtttaaattcatatttttactttttttttttgagatggagtttcgctcttgttgcccaggctggaagtgcagtagcatgatcttgactcactgcttcctccgcctcctggattcaagtgattctcctgcctcagcctccaaagtagctgggactacaggcatgcgccaccatgcccagctaatttttgtacttttaatagagacagggctttgccatgttggccaggctggtctcgaactcagcctcaggtgatctgtcctccttggcctcccaaagtgatgggattacaggcgtgagccactgagcctggccattttttacttaaatattgagtcactgctgtgtaccaggaaggttctggtgggtgcttggaatattacagtgagaaaaatgttgttatatctttgttttcccagaagtcagtactaagcaaaggagacaggtaatgaaaacaaaacaaaacagtcaaaataaagtgtaggaaatgttaggagagaagaatcgtgaatacagttcataccagggattcctaagttcctgatgaaaggcttcccaaagtaagtgacttctaagctgtggtctgaaaagtgagaaactatccagctagatgaagggttgagaaaaccagaggaaacaacttatacgcagacatggagcagggatgatggctaagctgggcctctgtggtgatgagaatttctcaagagaagtgttggggcacagtcagaggaaacaatcataaaggatcggggagacaaacagcttgctgtgttttaagatatgcagttgactttgtatcataataaaatatatcaaaataactattttaatagtcctataaaattacacatatataaacatataaataatagtgataaattcatttgctattgaagatattgctttggttaaaactacatatttcttattctgaatttcacatgtctgggggaatggggtcaaaacaaaacaaaccagtgctaaccattctggttctatatgcaaagggattccttaaaattgacattgtgtgcacacacacacacacacacacacacacacacacagaactggtctttgatgactattttgtataagttcttcatttagcaggtgctctttctgaaaaagaaaatttcctatttttttttcttttgtttgcttgaatgggatcgatgactggctaatcgtaaataaatactaccaagccttttatttcaaacttcagagctttcttctcaaagcccaggttaaaagaagagtcccagttaaatcaagtgacatattctagtccatagatttactggttcatggttctattattcttttattttgtactaagggcactatcaaaataaataaaaacatcacagctgtactgaaacactaaaagaaaaatcttgaattttcagtagtgattttagaccccactaccaagatttttttttctttttgcagccattaactagttttttaaaaatagctaaatttgggaggatctcaacatacaattttagaaagtctagtctgagattactttatcagttattggaataatctgacaagcagaagtaggactaggaataaagcattgattcaagatttcttgtttaaatggtgcttctcattctttgtttgcaaatcttgaggaatacaaagatgaatgagcatccagtccctttggtgtcaaaaatatcatgctgcaagtatttagaagagggaaagaggaacatttgtgcctggcatagcatttcctttcattttcatttattcttctgcttattaattcacttattcagtcaatcaacaaacatttaaagattgcctactcaatacaaaatccactagtgggtgttgatgatgcagcaatgatttggcactgaaaagaaacttaaggtaatggttctcaaaatttgagaaatctgtgaacttctttgaaaaggtgataggtactatggrtgcaacataggcatatctgtgctcataacttcagtggggctgaggaggatgccttgaagcccaccattggattccttgggacttatgaattttgcttagcaatttcttaattacagttttgttcattgtttgaattttgccatccaatccaaagcttttatccttattataaggttgatttcgttttcataattaacccctaaaagtaatattgggtcaaatcttaaagacacttctccagttgagagacctactgctgacgttaaagaaccaacctgctcagtaaaatgaacatgagcgccatctaatgcccaaacagaataaatgttggtaacaacattaatacacagaagattagagtatggggtgtatgtacaaaggaattaactttgttatcggttggttgactcatttctaacacttgttaattattttttgatattatcattttcaattattttatttcacataacagtcccttactgtctgaatttgaagataagaaacatttttaacaataagaaacattttgttggccaggcgcggtggctcackcctgtaatcccagcactttgggaggccgaggcaggcagatcacctgaggccgcgagtttgagagtagcctgggaaacatggcaaaaccccgtctctactaaagatacaaaaattagccgggcatggtggcgcacgcctgtagtcccagctactcggtagattgaggcaggagaattgcttgaacctgggaggtggaggctgcggtgagccaagatggcaccactgcactccagcctgggtgacagagactctgtctcaaaaaaaaaaaaaaaaatttgcaaatatgtcctttttattggtggagaagcatatgacttacatttttaaataaatttttgattttagaatgtttttcgtttttcagaataatttgcaaagatagtccatagaatacccaagtatcccacacccagtttcacccagaactaatatggtacaattgttacaattaacaaaccagtatcaatacattattattagctaaagtctacaatttattcatattttcttaattttcccctaatgttcttttatgtttcaaggtcccatctaggacaccacattacatttggtaatcatacctccttaggcttagttatgacagtttgatttacatttgatattgtatgtctttgaattttattttagctttctgttatttttcaaaatcttaaaacaatttaacttttcagaaaacactttcccttgttctgttcccttgataacactgcatgactatttaatcagttttataggggtttgtataaacatacattatcattatgcatcgttcatctctaataatgaaaaaaaagggttaagaaagaggattatcaaaatgtttaacttgccaagattgccaatataatayaataaataaatgatgggtcagattccaaagcctatgacaccttccaaaaagctaacacatcttttggcrtgcataagcttaaaatgccctccaccccagcaccatgctgctgcaagggcttctggaatgaccaacgcccaagacaaagtcgtttgcctttggagtcccattgcccctcacaagcactttttattttatataaaaagtttatataaaatgctctataaatgagcctgggttgccacccaaactgttttgtgtttgccacgaaaacagatgtgctgaggtctcaaggaaacttctgtcttacactaactggaatgcattaagtctgaggagggttcacagttctgtcctagttgctaatattttaattaaacatatatttttgtggcctttaaaagccatcaggagatataaaggaatatttttttgataacttcagtgtcctgggagcaaaatggaatattgtgtttcctaattgaagaagtagtatatatgtgtatatggatgtgaaggaatttatagaatgctggcgaaaatgatttcctgggcaaacagtagaggtatataaattacttggatcctgcagtattgattatttgtgaatatatctgtaaaacattaagtgatttttgtacactcatagatttcaaccttggatgcgtattagaaaccctagggagggttaaaaatcccaatacccaatcttcattccaaaccagctaaatcttactctccagtaatcaaattcaaaacagcaattttaaagctccccagttgattccagtgtgtagccaagagttctacattgtaactcaggggtttaatattgttcctgtacttttattctgcagcataaacttagctatgctatttattcttatttttaaaagaaggtatggcttacgaaagatgataagcattattatgtttaacaatcaaactcattattaaaattcctttttttcttatacttctgtcaaatgcattgttttttctctgagtaatttagatgaatgaattaataactgataaacacacatgtaatactatgagactcctttcctaaatccttttatctattttcaaaggattttatttctacatatttaaagttttttaaatcattttttaatttgtgcttctatgaaatttttttcttcctagaaattttattccggattatctgttaagagctgcattttgacagaaaatgattttccttattaactgagtgaattgataagtaagtaggaatattttccagtggtagtctcaagatagaaacttctaagagctttgaagttttagcaattaacagactttattaaaaatgaagccactaacaaggatattaatacaaggtagatttcaatctgggcaattatacaatatagacgtctttattactaactaaaatatcacagaatgatttgattaatgctataaatgtgattagtagaataagtgtatccttagtsccattggttagatagccaaagactggatgtcagagaaaggtttccaattcttttctacatatgagaatcaaaatcaaattatagaaaaaagtcacaattgttttcttgaattccttaaatatgtttttcatccttgaattctgctattactcttcattatagtggtcagtttgtgtgtgcttcaagtatgtcactatgttgttaaatatgtcagctgtctacatttctaacacaaaatgatcttttttttcaaccgctaagttatatgctggttatttctaagtacatgcatattcaatctaagtatctcagttgatttaaatcagtttcttactttgaaaagatttttaagactttttttgcacagaggtaaatttcagattcagcttataggccttaataataacactcctacagactgagtcaaatttaaatatcttatcaggtattaaatatatttaaataaaaacatacacattaatgagtgccctgtgagaaagtggtggtgaatttgagccatattgctatatccccacagcaatatctgacattttattcagtgccatcagctatatgattctagacatgccctcctaatcagtggtttgtagggttttatccttcctcatcagaaaatgtaaacaagattacaaacccactttcttccccaactgtaaaatattaattatttaaaattttaccgtgttttattttatacaagtgataatagctcatattatatggtctgaaattaccagtgatgagaataattatttggtcagatactttctgtaaagttaaatttatctatgaatggtgcttctgtaatgttgacagtaaatacagtaagatattttgcccaaagtgctgtttgtcttagtgtattacttgatgtgacattctgacaccatcagactggaggctgagtcctctgataaaaagaaaaatgccacatagccacagaaattatttcaccctgtttccttgcacatctgggaaataagcaaaaattgtaaaagctgctagagtgagctgattgttttcttcctaagaatcttgagctttcaaaatttgaatttaaaataatggactttcttgtcagaaaaatattgattattaagaaaagaatgagacaaaaatgtaaaaagaaattttacttacctaattttattaaaggagtatttaataaaactttatgatacattttaactaattctggtgaaaggattaaatatttgtttcacccttacctcacaatgtgcacaatgattttaagctcctttctgttaaagcagttaaagacttttccaaagtctaaaatcttaatcacataaatctaaaagcaacacttaaatgcaaacatgagtgaagagcttacgggctttttctactaaaagactttcttctttttctattatagacctatttgaatttggacatttttcttgcacaaataagactgtttcaatacaaatttgaatgtattaacttgctagctcataatgttactcatggtttcagtttgacttgcacattccagaataaatctatttacttaattataaatgggtgtgtgtcattgtccttgacaccatgagaaatataatggctatcaggaagtgggggaaaggaacttagatcttttcgaatgtctactatgggcctgttgtttctctcagttgattctgctaacagcccacctaagaaagtattaatcatgccaagaaggtattatcattattatcttatgaatgaaaacttcacagaggtagctgaatgcctaaaattcacacagctagagtatcttttaagagtccttcttttgcaagtgacaaaataaataagctggcataaacaattaaaggaatccactgactcaaataacagaagcccagaagtaggactagctctctaagaggmtagatatagctgcaaaattgatattaccatgaacttggcatctctgttgttctctttggtttcccttcccagcattggccttatcctcaggctctacaagcggatctgctgcagccccagtccccctcactctgacaactatggtgtcaaattggctctagccgttcactagaacgctgtaccgtgttcacaaatgtatcctgcactagctgggggaaaagaggatctctccttatagctctcttataattcctgagatttactctttttttttttttttttttttttttgagacggagtctggctctgtcgcccaggctggagtgcagtagcgtgatctcggctcactacaagctctgcctcccgggttcatgccattctcctgcctcagcctcctgagtagctgggactacaggtgtcctccaccacgctcagctaatttttttgctaacctcggggaactgtcatacccttgccagtttgggtctgttcctggacctgggggtggcgtcagtcccaccaaacctgcggagctgagaacgggagaaagcgaattgcctaaagaaaatcacaatgctattggctggaaaatttctaccaccgttaagtagtagagccaggattggatataaagtctgcactgtgtccgttatgcaacagaactaacaggacataacttcctccttctgtttacaactggcatctagtggtcagaggccagggacagtaatcatcctataatgcacaatgcaggccacccacgaaaaggcattatccaacccagaatgtcaatagtgccaacactgggaaaccctgtgctatatgatctgctgtggggcatattccctcagccttacaaactgcctccctcccctcttctttaagcagcagctaccttgaggggcctcctttcagttacaaaaatgtgccaaagctcttcaggctttaggatctttgaacattattttcactttacctggatgttctcctcccacccctctgactacagctgcatcattctttccaaacctagccaaaggtggggaagcattgagctcaaagagtattttcttgagaaagactactgattctccagagtgggtcatccccacccacctgtcagtagtgccctgccctcttttatactttaactttgtagcaatgatcataatttcaattagctattgtatcttttacagcaaatgaaaactctaaaacaacaaatgaagacttatttctgtttatactctgagcacttagaacagagtctgtgattaagattggatgtattttagatgaggcaatcaataasagtaaaagctcacaggcttgaatgcagcaagcagtttagggagtgtgctgagtagagcagtcaggaaatatttagtgtagaaaagcatgaacagtaagatggagaagggatggaaggtttctggtgytggatttaataattgtgtaactagtattttctgagtttcaattggaatatgctaactcttctgtgtagatgaagtaggtaaaaccagattaaatctgattttgtttatctgattaagtctgatgggcccagaagaaacagcctgaggcatcacttaaatttgggcattttttataatgcgctgaactcggagccaagtgaactaagatctagagctgagcctaacactaatgtaatgttttcattgtgctcttttgagcttcagtctatttgtaaaatgagggagctggactaaaggatccgtgccgccctcctaatccaacactcctcctttactaagctaaaagagagttttggcttgctgagatggaactgtgcaagcattctacttttaaaagttgcaggaggaattttttttaatgcagttgtttgtgaacctggtaataaagaagcagaatattgtgagaataactgaatcttttgataattggggactttaacgtgtcccagagttttgcattattttatacattgaatatataaaagattgggtgatagatagcctaacctcacgatatatccttaagtttttgtgtttttcaataaatccctaggacaaatattttttttccatgaacactctcttaaaataaagtctagtatgctttgtcaaagctttgatcagatgaaagcatttatatttctgtttatcctcgtttaccaagattaataggttgctagaggtctgagtacagagtttctcagtcttggcactgttgatatttggggctggaaaattcttttccagggctggggagctgttacaggaatttctaactctaacagatagatgccagtagcacctctccctcccagttgtgagaatcaaaaatgcttccagacattgccaaatgtccactgaggggctcagatgacctcaggtgagaaccattggtttagtgcaaagtaatctcctttaactagagcatactggccagatggatgcaaatattactgcttggttaacccatttaaacaaagttaaatcttgcccaaatgaatgtaaagccctcattgatagttaaatgtatctcactgtttgtcttactgctagatactcttggcacattctgaatgagggaatcagtgacttccttatataggcaacaattcctgggaaatctcaataaattatcagaagaaatgcaaaagaaaacagtctgctgattcagcttgtaagtttccagtggtatcgccttacttcccaaactaaataattctctgagtcctgttccatgataggatagtgactgtgggtcagtgctgtttatgtggttgttgatactcttgtgcctcttttagatagttttctaagagacaagacttttttttttaatgactgttcctctctatgaccctctgccccctcaaggatatcagagtttttgtcttcagcatttttcgggttataataaattataattctaaaaattaggctgaaaagaaagcctcaggtcttttgaaaggaggcagaaatagaactagataagcctttcaaatagttggtatggagtatggagtttgttttttttttttaacagaaagaraaaaaaaagagtgtaaaatgtgtcagtgtaatactcacttctgctctcctcctgcttgaaaagatcgctgtagtaattagaatctcaaacggacagtcttagcatctaaagtttgggtgtacttctagcaaacatgcattgcacaagataacaatataaattggccttctgaaagtaaacaaacccaaagaaatatactaatgttgggctgggcgcggtggctcacgcctgtaatcccagcactttgggaggtcgaggagggcagatcacaaggtcaggagatcgagaccatcctggctaacamggtaaaaccctgtctgtactaaaaatacaataaattagctaggcgtggtggcgggcgcctgtagtcccagctactcggaaggctgaggcaggagaatggcgtgaacccgggagacggagcttgcagtgagctgagatcgcgccactgcactccagcctgggcaacaggacgagactccgtctcaaaaaaaaaaaaaaaaaaaaaaaagaaacatactaatattgtagtgtgctttgctgattttagagaaaggtgctttacacttagtttgtttaagaggaatactgctactcagcatgttttgctttcagtccaaatagagaatccctcatcagaaacaggcttaagtttttcaaatagtttactttttttaaaaagtaggtctcacttctgcttccagccaatatggagtacagtgactagatttgcagtctcatctttaaaaaaactttttaaaatcaggacaaaacatacaaaagaacagttttcatgacagtggacattagacaatggaagatagtgattcctkagagataagaaacaaattaaatgagccctatgattgtcctagctaaatgccttgagaggcatccaggctgtggctcagggaggggcaaaccaggagatacccaacaaacttcttgagttgaagagatggagctgagagtcttgggagaccaaggaggctaaaggtcatagacagagtatcagagaagtaagagttgcaaaaagaccctctgacatcttccaaggatcctcattaygtattctgcagggtagtgattagtgcacatatgtgaagaaactacttgagccctggtgtgagggagatacccaaaagatcagatggaaaagcacctagcacttatacaggacttggaaaacaatgcctgtttccatcaggcagaatggaaaacctcataaatcaaggacactgcagagagtactcaaggttcttgccttagtaagggagggtaattagcccttcatgaaacactgttccagtcttgcctaacaaatcttaaaagcaagacttgaaaggaacaaattttttccaagtcattaaactgcatcccagaacaaagctcaataatatttatgagattataaaaatatccagcacttaagaagtcaaatttatgatatctggcatccaatccaaaattactagacataaagaaaatctgagacatgggactcataatgaagagaaaaattaatccaaatggataggtacagagctgaaacagatcttagaattagcagacaagggcattaaaacggtgatttttaactgtattccatattttcaaaagctaaattgatacctggaagatttttaaaaattccaaattgaacttctatagaggaaaattacaatgtctgagatgaaaaatatgttgaatgtgattaataacaaattagacattgcaaaagaaaatattataaatttgaagacatagcaatagaaattatcccaaataaatggagamaattattttaaatgaatagatcatcagtggactttggaagtaattcaagctcctaacatatgtgtaattggaatctctgagagggagaggtagacagaaaaaaatattcaaagaaatagaaaattaccaaatttgataaaaactataaacccacagatccaagagctcaacaaacccaaaacacaagaaaaaaacatcaaggtaaatcataactaaattacctaaaactgatgataaaagaaaaacttaaaagcaaccagaagtaaaagatatgttatatatagaagaattaagataaagatgatagcagattttttatccaaaatgatgcaagatgggagccagtggagcagcatctttaaactactgggggtaaaaaactctttaaacctagaattcaatatgcagtgaaagtatctttcacatatgaagacaaaattaagacttttaaacataaaaaagcagagggaatttattatcagtgggcctacagtataagaaatatttaagaagtcctgtaggaagaagaaaaatgataccagatacaaatggatctacacaaagaaatgaaggtcactttaaatgataaatttgctatctttccacatcccatgagttggaacatgagggtgctctggatatgtgccaagacatgaagaaggaccaatgaaaaggaccaggtccttgaattactgaggggaatagagcagcctggcaatctggatgacccatctaggaactattattgaaagacaaataaaagtctatgttttcaaagtatctatattttgcagttttactgatactaccaattgtttcttaattaatacaattatttttaaagctgtgaagttatgtctgctacatcaagatctttaatttacttggaatgttttttccacataaaacaaagttgatccagagcattctaataaaaaagacatctttttctcacttatctgaaatgccaactcttttataaatctagcacctacatatgcatggcagcctttctgggttaaatgctccatttgtctatttgtttatatgatgctatccatgcactaattagatatgtttatggtagggcaaatactgtaacttgtcatctttctcagatatatcttgactctttctaccatactgaattttcaaataaattttagagtcaattttttaaaagtaggtgaaaaggttataaggggatgcagctaggtcacattagyttcaacctatctttttatgagttgatatatgcagaagtctccagccccaatacaagggttgttctcagactgacttttttccttacaaccagagtggcaaagagagcctggtggtgaaggggtgatatttggctacttggtaggcatctaggggtcaggtttcctccctccaaggaacactctacattcccctagaactaaggatatcatctcccacttgttatccattcgcttcagttatttggtgtagactgtgtcagtataaccccattactgttatcgtgtttaattatataacaactgtacactgagagctttttcaaggcatggaccagacagactaatcagagagtaaatacacagcacttaatttactcttcagaatttttaatcaatgcctattgactgtctcaagggttgaagtctctattttaactccattttaaaatggagttaaatggggaattcagccaatttattcaacatttatcactaatgttgaatacctgctttactctaggtactatactaaatgtcgaatattcagcagtaaagaaatatatatactatatacatgtatataatatataactatatattatatatataactatattatatacatgtatataatatatacactatatattatatataaaaatatattatatacatgtatataatatatataactatatattatatatatatamctatattatatacatgtatataatatatataactatatattatatatataactatattatatacatgtatataatatatatactatatattatatatamctatatattatatacatgtatatattatatataactatatactttatacatgtatataatatatataactattatatataactatatattatatacatgtatataactatattatatataactatatattatatacatgtactatatattatatacatatagttatatacatgtatataatatacataactatatgttatatacatgtatataatatacataactatatgttatatacatgtatataatatacataactatatgttatatacatgtatataatatacataactatatgttatatacatgtatataatatacataactatatgttatatacatgtatataatatacataactatatgttatatacatgtatataatatacataactatatgttatatacatgtatataatatacataactatatgttatatacatgtatataatatacataactatatgttatatacatgtatataatatacataactatatgttatatacatgtatataatatacataactatatgttatatacatgtatataatatataactatatgttatatacatgtatataatatataactatatgttatatacatgtatataatatataactatatgttatatacatgtatataatatataactatatgttatatacatgtatataatatataactatgttatatacatgtatataatatataactatatgttatatacatgtatataatatataactatatgttatatataactattctatacgtgtatataatatataactatatattctatacgtgtatataatatataactatatattctatacgtgtatataatatataactatatattctatacgtgtatataatatataactatatattctatacgtgtatataatatatactatatattctatacgtgtatataatatataactatatattctatacgtgtatataatatataactatatattctatacgtgtatataactatatattctatacgtgtatataactatatattctatacgtgtatataatatataactatatattctatacgtgtatataatatataactatatattctatacgtgtatataactatatattctatacgtgtatataactaactatatattctatacgtgtatataatatataactatatattctatacgtgtatataatatatacacgtatataatatataactatatattatatataactatatattatatacacgtatataacatatatttatataataatataatatattatattattattatatttatagaataatatattattatatatattaaatatataataatatatattattatataaatatagaatatatattatatatatacttatatataatatatacatagtataatatataatttatataatatataatatatataatttatatatattatataaaatatataaatttatatatatatttatataatatatataaatatatataaatataaaaatatataaatatatataaatttwtatatataaattaatatatttatatatattatatacaatatagtatacaattattaataactatatataatatacatgtatattatatatagttatatataatatatagttatatatattatatacatgtatataatatatataactatatccttctctgatgggaaaatccaacatttaaacaaaataaacagaaatataaatatttaatttataattatgtttaatgctatgaaaggaacaaataaggttttatttaagaataactggagggagaaagtggagaaaaatatacttttcaagttagaccatattacatacaratgaaatctgatttaacctgtaacataaccagatttatgtagcaaattaaacataaattttttcatatacttaatctatttatttgtgtattcaatagcatttatcttctttgagccctataatgatccagctattaggctcacaaaaatgaccaggactcagttcctgtctttgaggagctcatagttttttwttattattattattattaattagcagtgcctttcattaaaataattgcataccaaatggaaacaaatatgttccttttcctctttcattcttctttagatgaggataggaattcactcaggctccgtgctggctggagttgttggggtgcgaatgccacgttattgcctgtttggaaataatgtcacactggcaagcaaattcgagtcgggaagtcaccctcggcgcatcaatgtcagcccaaccacttaccagtaagtgttctctggcctcctccttcctgtcttkgcctttgttttgggctgctatgctgtcatctgtgagtccctgttctttttcttgatcctgtcattctccaagatattatgagtagaactgcccaaacccaaaagatagatagtaattgtgacacaaacttttatttgcactctgtgagagtgcatgaaaaatctgacatgactgagaggtgaatataggtttgtcatttcccacagtctctgtccttcttaagtatacctgtttaaaatacaggagagcaaatgttcttaaggatctgcattataatagaaatctcaatattttcaaaatgtttctgtttataaaaatggaagaaatacaatagaaaaggtggttggactgtttttttgaataawtaaataaagtctttaaatttatatatatataaattataccttactcaaaatgcttgggaccacaagtgttttacggtttgaaattttttgagttttggaatatttgtgcatattacctggtgagcatcccaaatttgaaaatctgaaatccaatatcttccaaagagcatttcctttcagtatcgtgttggttctcaaaaagtttcagattttggagcattttggactttgggattttgaatgctctgctataccaggtacagagtaaaacattaaattctttttatcttaaagrtaatctttgacaacactacacatttttgcctcctgaattcattcttattttgtgtctggtagaaatttcccctattagatattaagccctgtatatgggcagcgactgtgtctctcacagtcataatgatgagtttggctcatcattatatccccaaacttataaaaatgtctagcccataataagcactctgtaaatatttatcaaattaatgaataaatacattgataagatggacattttcaaaattaacagcaaagaaaagcatgaaaatgtcttactttatcacactttggctttattctgggcattactgtacagctgcttaattaatttcatgttttaggtaacttagaatcatactgaaaaaaatgtatagtaggaatagtggccattgatttttctattaacatggttacaaaaaactcaagcagaaaatttgaatataaagataaaagttgactataataataaataaaatagtgatattttcaaacttttgataccaaattagagggtaatttggtatcagaaattccagagagggaatttaaagtttttagatgaaagcagatacttccagattctgcaaaatagatgagaaagaaaactgaaattacaaatataaaattaagagaaagtgcacattaaaaatacattttaaagctcttgctaagctcattaaagtagtggataccttgattttacagtttttgaataaagacacacctcttactaattttaaggaacccaagagattttgagggcctcacagacaacttctggacaaagtttcaggattctatctaatcattacttatctaagaactatatgctattttcaggatatttataagaggatttgcatcttttaaacttctcccaattttcccaacacaattctgggcatattacagatgatctgacaacaattaccatggcaaattgaattttgtcaaattctctagtagagatcagtgattctgatactttctgctctatacgatgaaaaaagttactgaagatcagctacctcactcatatcctattacatggttccatttattcccatcatggtattgatacttattttccatgtttgtgtaacttagtgtagatttatgtcttctgtgacaacttcacttaaaaaaaaaaaaaaaagatgtgtaaaagaatgggcccaacctgtgtgagkargttcatgccctgttgcttagacatcataacagtagctggctttgtttacatagtgatgtattaaaaaaaaaaaaaactctgccagccatacaagtctgtgcattttggtggtgactcaragtttttgtagtctttttcacagtttatgatgatccttagtgattaacaaggtctgaggaatgaaatcatttcaactactgcatacactgaagcttactgttgtgttattgttctgcaccttcacccccaggccccccaaaatcaaacagagccatagatagacacgttgagctgacaggtgggtagattcttagaacaaatataatttatgaagtaaaacccagtattaagctcatgagagtttgaaatctctattttatccctgaattacattctgtagaatgtccaacattacctgtttatcttgaaaactatatgattattataaactttggaagtggactgttttgatattatgataaactgaaatcattttttgaattgttcattccaaatgcattttgtcttaaatattcaaataattgaattttaaaaatatttttgtaactattgtggagtactgaaaagataataaaatatccatgatcctaccatagttaaacactttatattttgcttcagatatttcttaataaaaatgaacaaaacattttctttgtaattttctcartctttcattgtgacatcctaatgagtttggtgtgtttcaaaggcccgtgttttgtttttccttcttttttttgagacgagtcttactctgtcgcccaggatggagtgcagtggcacaatctccgctcactgcaacctccgcctcccgggttcaagggattctcctgccttagcctcccaagtagctgggactacaggtgcgtgccaccacacctggctaattttttgtatttttagtagagacggggtttcatctttttagccaggatggtctccatctcctgacctcgtgatctgccctcctcrgcctcccaaagtgctgggattataagcctgagccactgcgccctgcctcagtcccatgttctatatattaactttctacatatgtatccatgaacaatataattttattttacatgttttaattttcataaatggtattttactgtatgactgttatcactaactttggtttcttttaaacacaatttaatacttttaagatctatccatgttggagcatctttctttggaaattccaaagaaagaatgggtttggtaatttggtcgaaggtgcattttgagctgtaactaaaagctgagatagtaatcagtttattcctatgtgtttttattaacaaaagtcccttactgatgactgtctaaatcatagacagctctagctcatcattttaatcgctgtatgayatttcagtgtatgactccaccatattttaatatttcatacatatattcctctgttgatcaacacttcggtatattttctattttttaattatcacaaagtttgttcctgtgaacattatttacatgacattacaaaaaagaaatttttattgagttttaagttttccaaattagacattttcatttttcttcaataaatgtgtttacacacatttttgttcccatcatcccaatgatgggataagttttttatgggatatggattttaaatagtgcacataatatatgcaccattaatatatgcactttaaatagtgcatataatatatatatcatatatactaatattactttactgcatataatatatattttaaaataatgcatatattataaacaactgtcttaacatcatgctgctgatctataaaacasaaataattgcttatatgaaggatggctttagcaaattttgaaataaatgatttatctcagcataattattttttcttgctacagtgcaaactaaaagtgtagaaagacttgaattactttggtatgaaatttttcttaatctttaaacatttttgcttttctcattttacaattgatctacttccagatgttttagaaygcctatttttaattgactgtgaaaggcttctttctgttaaaaccaagcttcttcctaaccactgctacctgaacagctcattgtatgagagcatgtacagtcgagcagattaggcagtggtgaagtgcatgagctcagaatcaaaatgcctaaggtagaatccaggctctaaattttcctgtctacatgaactttagtgacttaatttctttggaccaagttatctcatctctaaaatgggtacatgtttatgaagattattgttggcatttaatgtgatatttttaaagctccttatacttggaacatattagacattcatttactgcttcatcctgttctttccatggaggaagaaaccatcttattccttcacttgaatctcataatttataaatttagccatgatgaatgatgtgtgctagtaggattacagacctcatctggaaatttgagagaaagaatgggtttggtaatttggtcaaaggtgcattttgagctgtgactaagagctgagatagtaatcagtttattcctatgtgtttttattaacaaaagtcccttactgatgactgtctaaatcatagtcataygattaaaaattggctgtgtacatgggaaattcccaaatttaagctaaggtacataattaattcaattaatcacatkattaattgaattatgtacctctgcttaaatgtgggaatcatatatgtatatctatatacatatgattactaagtaatcattacttaataagtaatcatatatatgtatgtaatcgtatatatagtatataattaatctaattagtaagtaatcatatatatgtgattgcttactaattagattaattacttactgttggcttcaacaacacaaacattattttatagttctatagggcacaagtctgacacaggtctcacctagctaaaatcagcgtgggcgtcatgaggccttcattctttgctgaaagttctaggtgataacatgctttcttgccttttccagctttgaggccactctcattcctctgttcagaaccttcttcttccatcatcaaagccaataatagttcatctttctaattctacttctatcatcacatatcttttactgactcttcctccctcttctacttttaaggactcttttgtgattatgtcaggcccactggataatccatggtaatttctctattttaatgtcatctgattagcaatcttaattccatctgcacccttaattcatcattgccatgtgtattagtcaaggttctctagagggacagaactaataggatagatgtatgtataaaggggagtttattaaggagtattgactcacaggatcacaaggtaaagtcccacaatagggcgtctgcaagctgagcagcaaggagacagtccaagtcccaaagctgaaggacttggagtccaatgttcaagggcaggaagcattcagcatgagagaaatacgtaggccagaagactaaaccagtctaatctttccatgttcttctgcctggttttattatggctgtgctggaatagattagattgtgtccacccagcttgagggtgggtccgcccttcccagtccactgactcaaatgttaatctcctttggcaacactctcaaagatacacccaagaacaatactttgcatccttcaattcaatcaagttgacactcaatattaaacgtcataccatgagacctaacatattcacatttttcagggattgggatgtggacatcttgggaggtgggggttattcttcctacaagaagggaaaatttaaatgctaaaacctgcctggaaatatagccccaatcttacttctgcatacttgtctttgaggatttgaaaaaaaaaaaccatataaattatgtaagcaaaatctagggaggaaaaagaactttcacaaatgagacctctggcctgtaaaggatttttactgggacttaagatatagattcctgaagacaggaatctagtgtaggactgaatgatatttctatatttaagaagcagtagagcccttggcttgagaagactaagaagctatcctgagaaataagcagtttttataaagatgactgcagtcctctcactgcataacctgccctcagacacagatacccacatatcatctcttacaaaactcaagaagttataatatttaatttctctttagacctctagcaccaagtttaaaattgcacagaccacatttttgtgcaagagtttgatacagtgcataattcctaccctaggaattaagagaactgcatctaatattggttaagctatttgatgtcctagatgagctctcatgcatcttttagctccaatatctcatcatagtcacagcaaacatttattgaattactkacaatttatttatattgtcatttaatccttacagcaagagtgtgagttctgaattgtgattatctttgtttttcagatgagaaaaactgaaacttaggttaaataagtcactaagaacattgagctaaataagtgcgggagtcataattcaaacccgtagctgccctactctaaagcctgagatcttatctgtggccaagctgtcccatgggttgataactacttgaaataacatggaaaaaaacaataattactttttaaattttttagctgacacattatagtacatgtttataggatacagagtaatattttgataagtgtttacaatgcataatgattaaattaggataattagcataactatcacctcaaacatttatcatttctttgtgtgaggaacattcaaactctgctcttctagctttctgaaaatacacaataaattatcattaaccctattcaccccaagtgctacagaacaccagaatttattcctcctatctagctgaaattttgtatctgttaacttctctacattgtctcctcccccttacccttcctagcctttaatacccacaattctactctctacttttatgagcacaaattttatttttttaaagacccattaatttctgaatattactagcctcgatgagaggatttcttctgcaagaaaatggtgaagagagcagtggggagcaaagtggaattacagcaagggagattcgttttctctttgtagatataatgccctcaggttgaacttttgctattctggagttgtttttatactcaggataataaaaaggaaggatattatttctaacgtgtttatttggagtgtctgtatttctaactatattagtatctctgtctctagctctgaaatgaacatgagtatatgggacaaacttgtggcaagtggaagcttccaagtgaaaaaaaaaattgtctgttgcctctgtgaggctaaaaaacattttgtataagcatgtctctaatgcatataataatttactgggaatataggcttgcttttaggaatttactttataaacaatttggaggaatgcatatctttctggtaaattcagagaaagacgaatggaataattraagaatgatgacattccttgggtatagtttttatttcattaaactataccttcgatatagtttaataatcagtaatactagtcaaaaacactagctagaaactctgcttctgttcctttgtcaatataattattatacaaggatgagatactatgttataaatatttactcttcttcctatggacgcttaatgtggggaaagatccmaagaaacttcaagaaattcttatctagtagtttttctgtagccttttcttaaaaaaaaaaatcaacatgctcatctgcactagtgatttgatatttaaaaataaaaagtattcgggctggcatgctactatccttcagtcttttaaataactttattaatcatcttatccttttctctatggaagcaccaaaacagtaaacatattttacaaaagaaatataatcagtaaagacaaatgacttagtagttttcccaaaaggataaactggagcggtgcctcaagaattacatttctatttttccaattacaaacagcaacattaatattacccttttaaatgtgccaataaaagtcatatctagcacaattgaatgagatattctactcatttcaatacttctttttactatctctttctttgtctctctgctatatatcaaaaagcattttccccagaaaatgtaattctgtggatcaggaatctgatgccttcccaattttttaaaaataagtctgtcttttttgggggtagggggattttagaatattccacttcagtcattccatatatttaccagcatatttaaggccattgcagtgaagtctttaaaaatcagaatataatgttgcagttatttttacagtaaaaatagtaaaaacttacctattagcttactcttaaaggtctaattgctaaaatttgtaagaatcaatgagaaaatatataattatgtactttgcaaaagtggttggttgttttcatagatatgaaatgaagagtatgtctggaaatttaagacatatttttccctgggaggccgaggcgggcggatcacgaagtcaggagatcgagaccatcctggctaacatggtgaaaccccgtctctactaaaaatacaaaagaaattagccaggcgaggggacgggcgcctgtagtcccagctactcgtgaggctgaggcaggagaatggcgtgaacctgggaggcggagcttgcagtgagccgagatggcgccactgcactccagcctgggcgacagaccgagactccgcctcaaaaaaaaaagaaaaaaaagaaaaaagacatatttttctttatgatttagtttattatttggcataggtttggcttatatgattaggcataagattaaatctagaagtaaagttttgctgtttttctttaggtcccattcctaactagtatgaagggaaagcttggtggttctctcttctcatgacggcagggctaaaaagttaattacctagttccaggattcagaatttaaaggcattaatctggtattcatgtcgataattcctatttatatgggagacatctgttaatttcacacacagaaagaatttccttgaagtataaatactgtgattggcaactctgcttaaatgtgggaatcatatacataaatatatgtcataaataacgtttacaaagaatgccaagcttaagtaaattttccacattatctaaaatactataaggtgaaaattagttactaaggtaaktaagcatgatttaaagcaaaagaaaaagtcactccttacattttcctttccctttctccattaaaaatggcaccatttctagtggcctggaggtcaatatttattttgtaattaacacagctttaataatcctttctgaaggttcttttagatgtccacagtttagctaaaaaggccaagttctttagaaaagtaagtgttaaacatgtttggctgtggaaacaattcaagtaatatctaactcaaaatccaaggtagaacatagataaaagtattactgttgaggattttgggggctgctgttacatttaagccttatgattagtgtgtttatgaagcattttctttgcatactcacatgtgcttgtttctggaaagagttttttttaatattctcatcagatttcaaaatggaccgtgattcagaaaatattaagaatcactactgactgattaaataaatgaatgaccaaataaaataatgtgaatttcatattcctgttctgccactaattagtttatggccctggataagccacataaatgatctcatctttcatgtacttataaactaggttaggtctagataattctacaaatattttgtactaaatcctggaacagaaaaagtagcattaatagaaaatcagtgaaatctgaataaagtctgtaatttacttaatagtaatataccattgttaatttcttagttttgacaaatgtacccaggttaagtggaatgttaatattagatgaaattgagtaaagaatataagagaactcacttcttgcagaactatactatatatctttgcaattcttctatattatctttgcaattcttctataaatctaacattattccaaaaaatgcttatttaaaaaattattatagttctgacatccagaccaggcacagtggctcatgcctgcaatcctagcattttgggagtctgggggagaggatcacttgagttcaggagtttgagaccagtctgggcaacacagtgagaccywgtctctactaaaattaaaaaaaaaaaatccccagacatggtgcatgtgcctaaagtctcagttgctcaagaggctgaggcagggggatcacttaagcctaggagatggaggctgctataagccgtgatcacaccactgcactccagcttcagcaacagagtgagaccctgtctaaaaaaaaaaaaaaaaaaattctaacattcagtgaaagctgtaaatttattttcaacttacataacagaggatcttatatattattagagacccactgaatgtttttgagcctggaaacaacatgatcaaagaaaagcttacttggaagtgatgttccacagggagtggagtagggaacacctagaggtgaaatgaccataagagaagaggtcattgttgttccaagcctaaggtacagtcatgaactaaggccatgatcatgggaatagaggtatagaaggtatgaaaaaactttaaagaaataattgacagggctgactgggcaaaaacacatagccattctatatattgtatggttaatactgtgccttgaaattggaaagccatatttattcactctcagaattaatgccttatgaatatatttttaactttaaagttcttacttttaggtttagcatgtaatcaagcctctatatcgttttaaatttctccttttttctaattgtgtgtacattgtcctttgaaggaaatggcaaaattttatattatattgtttgttcgtatatggtactatgttgtattaaggaaatatgtttgtttcaaatcctctcaaaacaggaaggtagacttttggaagtctaacttccaaaaagctgatcatgaattgtattatttaaatacattttaatatttaataaaatacagcatgtttggagtattcgtttttaaactagagaattgaaaccagtcttaactgggccttaatcttttagcagtcagttcttcccactgctcttttgtgtgaaacactgtgcatcaggaaaaatctgattgctctaaatgctatgttaagaatcctttctgcagctcttattaaagtgcaaagattctcatgcattagtcacctattactaaatcaaaattgctttgtaatcagtttttgtgatattagccaacatgacagtgtttcctctggagatcttacttgaaaatttttcagatttgcaagtctaaaactaacatgtttgatcacgctgctttgtatgatcctctataaactgaatactttataaattctcaagcttccctaaatgttagagctgtaactaatctttgaaataaattagagtaaaatctttctttttccacaaggaaattaagaaaccagagaatttaagcgacttaactaatgccatcaactaatttgtctctatctaacctgtaygggggaaagaaaaactctaaaatgtaagagattrgatatactgagcctacctatacctcttctcctctcttagtttctctccacaaaaatgagtatttctgagaagcataattttagtggaatttgcaaggaatattttctataaaacattgttcatataagaagtcggttgaactcttaaagaaaaggaaaaaagtatgccctttttttagcctccaaatattttcctaggttgatttgccttcttgggggctgaagttattaaaatttgcatgatctccttagaatacatttaggctaactatttctgattggttgaataatatagaaaatagagaacatagaattcttaagtctaggaatctaatttggtactaatttttaagtaatgaaatcaactaatattaatttttaaaaataattgtgcatattttcttctttccacttctttatcttttatacagaaagaccagcacaatgatgaacttgtttttaagaaasacttttggtcagagaagtgaaaaatgtgaggaaattatttaacttacaagaactggttacagttatcttttctaatctctcacttatctctttttaaagttctgtctatagacatatcaaacttttgcatgaatgttttaaagtttaaattccttgacatttactagaagtggagtttttaggctgttaaaggtcaaaattgacagggtccagagaagtcaatggggtagaatgatctttagttatttagcatcctaaaattcaagaatgtaaagggcattagttttgccactcaaataggaacatcccagaagatgtacactctctagcaggtatcaggtatgcagagtatgaacctatacttaagcacactttgccatcagtacctactcctggggtgggttgcagaaaaaatgtgcaggggtgtcgctgaagtgcctctgagactctctgccttatcattttcaggggacatacaggaaggctatccctttaggagaacttattggcctgaattttagatcccacagattgcctcaaattataaaattacctcaacatctacaagtaaaaatatttgcaaccttaaaacgcataaacatttggtgagatcctttttctgttttatttcatcatgagctagattcttcctttccttatttggaaaggtgtatttccagagaatgaatcactgcatttcaggggatttcaggctgtctagccgactcaataacaacagttccattggacctatcttcagactgcatcagatcttggagcagtgaagcacaaagcagaaatacagggcagagttccttcctttcttccactcaagtagaaagaagaaggtaaataggaaaaattcaggaactttacaacacttaggaaaacataatgtgtcttgatgtcttttattttcatctttcagaaccgtcgtccttctcctacacccaaaaatgcagtgcccaatgctattacaatagaatccaaatgcattccttagcaaaaaaagatattcagrtgaataatttgtaacaacagaaatttctaattaagcaaattgaggccctgagtttatcattacccttttcggaagttaataattaatcttttttgaaacgacaacaaaatggcttccagatatcactcaggtacacacttgccaccgtcctctcttccattttgttggaacaaaatgacatatacacatacaaacacacaaagactggaagaggatttaaaaatggaagagaggaaggtggtaagtgtatgcctgagtgatatttggcttaatgtctaaaagaaagctgaagtctcaggtcctacagaagagggagtgggtaagaagcaagtatattcactctaaatctaaatatcagcctgtttacatgcacacatgcatgcacacacacccaacctaattaggaggataatctaaaacatccaaaatatgaccaaaagagattccagaaaaagtacaagggtagaaaatactctagggtattttaagtcagaagatatacagggaataatgtgcttacagaatcatgagaagagataaaaatcaggttctaagctggatatcttgaaatgatacccataaaatatagaactggccaggtgcacaagctcctacccctgtgctcaccacgggaactgtaatagtctaggtcaggagccgtggccacagccataccagcctttggacgtcaggaaactgaaaaatggatrcctaaatatgcattcccatgattatgaagttagatgttagactaacgtgtcaccagtactgggccattttcttgacacttaggaagctaaaaactggagcctgcttctgcaaaactccaatatcaatagtcactgttaatggtcagttgccaagggaaacggaatctacttcacttctgccattcaaaactttgtcaggtcaatcttattttaggagcctaataattactcagaaccatagtagctagggaaattgggaaatgtagtttcaagctgggtagccatgtacttttgtagaactttattactaataaataaagggagaacaaattttgggtcacagctaactctagaaagatatgagaggtttgttctcctgagacattgaaccagaggaattctaaattcaggaaggtaaatatgggaggattaaataaaagtctacattcataacagtgagattcccaggttatttcctaaattcaacttccagaatgctggaatccaggtgtaatcccataggaatgattggaatattgttacttggacaaactggaccaaaggaaaaacagtaaatatattgatatttgggaaccctaatgaaatggtcagggtaaacctacaattcaacattattttgctacacacaaaacttctaaccatgtcataatgacttatacttaaatagaaagatatttacagacattagtaatttgttgaatgccttgacatgaaaaaagagaccaaaacaaaaaagcaaacaacaaaatctagtcaattaatatctagaggaaaaagagacaatatagagaactaaagaaaactataaaaagatgattaatattctcatagatttaaaatagtaagaacacaacataagaaaaaataatcataccacaagagtggaaattaaaatgagatatctgaaattttaaaattctttatgtgttgggaaataatgttggatgcaatcttccagaaaatagaatgttttaaaatgagggaataattcgagaaaaaggaaaacaaattagaagattaatttaccaggtcaatgtctgactaagccaaaatgcataaaaagaaaacatataaaacaaggcatacaaaattattaaataactttttaaaaattcctagaactgaaagacatagtttgctacgtcaaaaggttcaaaaggatccactaattgtcattgtaccaaataaaaaagatgcacttagccatattattattaattttcacaataccagagatagaaagacgatgatgatgatgatgatgatgataaaaaagactaggagaaaattcacatgcccaggattaaaaaacagaatgacatcttactttttaacagccaaatactgaggagaaagtcaattctaaagaagaatttaatacctaattaaaccaatcaagttgagagaagaatgaactaaagatatttccgacatctaaagtctttaaaatgtcactgtcctcatatcttttctacccctctacaagatgcatcagattctactgcctcttcctttgcccttcaagtatcgcttggtgagcagtagctgggtagtgagtagacaaatttgtgattaccccctggtagacagcattctgagaatgtcactctcttatagctctgcacattacacagatctttccagttgttgaaacaaacaaaagattttccaatttcacacagtgatttcaaacgtgcagatgtcagagagctatatatactagtctgccgctattagaggctggaactggatctattcatttcagcaaggtttattctgtccatggggttgtccagggggcaaattcgcaaataaaaataatcactttatggaaagacattttcagcaaaactcaaaattctcttgtttccctctcagtcttctcctgtcccatacatattatcgtcagagataggaaagtatcggttcaggcctagctcacagaaggcacttaatgattacctgttgaccagttgactgctgaactcactgacccttttttaaaattctgtgttttgtgttaaaatttgaactacatttagatcatttgtacttcagtatgaataagtgtcagaccctttcccaaggtaggatgtaggacagagcacagagcttggtgaaaattggaggaaatgagcataaaaacaagaggtgagagagtcagaaaccagcttcatttctgcagctgtgatggagaagctccatggacctccatggaatcaagcttcctgcacatgcttgggagccatccattgatccaaagcagcagtggatttttattttgaaaaacaatttgtagaaaaaactgttgagcagagaaagggtgacaggcaggtaaactaggatttgtgtgatttccaaatgcttattaaacatgttgccaaaactcccagagtgtgtaacaaccagctggggattacagctggggattaatttagaggattaatttagatttatatagaatctaaccttccatatcagccctgaggtgctaaagaaatggattgttaggcagagctttagagccaacccagggacttggacttaataaagcatttcagaggggatcctaggctctgggatgatcaggttctaaataattcctaatccttgtatacatttgattgcttactcagtttcagcaccatgactcatatcatcaacaggcatgctgtgtgaaatgattcccctgacctcctccacaaaccccccagtaagtcattcagattgtcctattggaagtcaactgaatattgcacttcagtgttcttatctacaaagtctgctgtaataaatactggatatcataggagcttgaatcaatttatccttatgtgctctcatttttactattgaaatttaaaactgtatttagtttatggataccaaaatgtttactgggaaaagcaaataccatttcataaaaactgttgtctctgtaatttctagcaaagtacatgagatctatttaaaatgtcaagagatcaattcattgtgaaaagtttcctcccagccaatgtgcagtgaattatttaaaagttctgacatctgaagcagctggtaccatcttctttcagtcatttacaagtaccttcatagatctaaccccatttttgttttgggttgaaaaatctcaattatagcaaaacaaagatcttggtgagacaaactgtaaacgatacatttgaggacttaaaagatagggagaagagagtgtagctcatgtgcagtcctaattgttgattatgggctttaaggaaactttgtggaaagactgaactatggctatatgtggttcttaacttttgtacttaaatccatagtcatcatctctccctttctcctgtagaatttcttcctttagattgtatcagatgttgtatcattgtattgctaatttgtttcaatgagcatttcttgtctttttagttataytaacttattctgcaagtccccacttactcgtctccattcagaggactatttacaatgtcataaccactaaaaaaaagtttgattgattgacatcaatgattgacacctatatattacacattgatgactgttctatttgagcttagcaaaattgttgtggaattcactgctaaattaaaactgctgtatagagctttttacattttatttctgaagtgactgattatatattaatagtaaagaaaattgacatttgtgaaaatgaaagtaaaaagtactgatgacttccattcttattgtcattaattatttcttagtttagttgttttgtgatggagagctatcttacgtagtcttgttatttattgttgggctaagcttgactgtgtttacaggtctaggttccagttccattgtcactactgtcttgctgtttcctggagcaattcagtctaacttattctgaactcattttcaccctctataaatttggtggagatgagcatttttcagcttttaagttcaggggtacaagcacaggtttgttacatacaaatgtatatacatacttacatacatttgtaaatgagtgtcatgggggttcgttgtacagattattttatcaccaaggtattaagactactgcccattagttattttcctgaacctctccctcctcccatccttcaccctccaccctccaaaaggctccaatgtgtgttgttctcctctatgtgtccatgtggtctcatcatttagttcccaattataaatgagaacatacagtatttggttttctgttcctgcattagtttgctaatgataatggcctccagctccatccatgttgctggaaatgacatgatctcattctttttttatggctgcatagtattccatagtccgtatttaccacattttctttatccagtctaccactgatggacatttaggttgattccatgtctttgctattgtgaatagtgctgcaattaacatacacatgcatgtgtctttataatggaatgatttatattcctctgggtatattcccagtaatgggattgctggatcaaatggtatttctgtctttaggtctttgaggaatctccacactgtcttccaccatggctgaactaatttacattcccaacaactgtgtatacatgttcctttttctccaaaaccttgccagcatctgttatttttttacttttttttttttttttgagactgagtctcgctctgtcacccaggctgtagagcagtagtatgatgtcagctcactgcaacctccacctcccggttcaagtgattctcctgcctcagcctcctaagtagctgggattacaggggcgcaccaacatgcccggctaattttttttgtatttttaataaagatggggtttcaccatgttggccaggctggtatcgaactcctgacctcgtgatctgcccaccttgtgagcctcccaaagtgctgggattacaggcgtgagccaccgtgcccggcccttggctttttaataatagccattctgactggtgttaaatggtatcttattgtggttttgatttgcatttctctaatgatcagtgatgttgagctttttttcatatacgtgttggcttcatgtgtgtcttattttcrgaaatgcctgttcatgtcctctgctcactttttaatggggttgtgtttttttcctgtaaatttatgtttcttatagatgctagatattagacctttgttggatgcatagtttatacttttagcttttgcatacaactatattatgtgaataaaatgggataaggcttttgaaagaattttgaaatgttagaaggagacttgttttttatatacygaatgaatatcatcattttgtggttttttttaactgccattatatcctttagcaatcaaaatactatagctctagtttttaaaattaaatatagactgttcatattataacttattagtactaccaactattgttttaggtaatattttctatccattaatagcattcgaggaggaatattttcttcttctccttagagatactcataattgattgtgcaatgttcttatctgttcacacatcctttattcttcttgtgctcattgtttcttttgccccgacctgcctcctacttggagctgctgctaacatgaatctgtcttaggaggatggattgtttttaagaaaaagataatgggtttggatccaaggtgctttccaaataaagtctaaactcttagtttagggctttaaaactttttcctaacctactgccccagccttaaccctcattcttacctcactgggtaatgctatcatatggttagaaactttacaatattcttgtttctaaccctttggttacattgttttccttatccacttgttgaaactgtatatgcctttaaataacatctagtccatgaaagctttgtggtcctcccactgcaaatactttttttcttctagacttctgcaattttcgtgtctacttttctgatggcatctagcctattacgttctataytttgatattactctgtgttttgttcatttattgggtttttttaaaaattcttttattctgtttctatatctgttgacaaaactgtgagctttttagatgtgttccacttcttatattcacagaagtgtctaggaggcttttcttgggcaataagaaacagtctatcaagagctgttgaattaaattgaattgttgggccacacttttagatacaagtatcaaactgaacctttcatgaaactggacaagtttaaagaataaatttattccaatgttgttagtgttttgaaaaagagtctttatgtgtgactggaagagaagaatcaagctgtttaaccaataatgctatcgagtttggatagcatgcttggctagaaatcagcaagcagatatcagagacattgggagtcacgaagtgttgttctacaaagttaaatacttgattaaagttttttacatacaggacacacatttaaagcttacggtttaccaaacataaaaggagtgcactagaatttgggcaggttttaaaaacggaaaaggtaaatcctgcatgcttgaaataaaacctgtattatgaagtttccttgggcatttgtttagggaaaacaataacatttgaacaaatattttcaaggaatgctgtttagaaagaaatcaatcttgaacaaatattttcaggtagtaccatactcagctttggggtttttttattattatcacatgaagggatcttttctgagttataacatttcctagcatttggaatctgatgaaggccacatctatacaaagaaatagaggtattaccatgaacagtcagagataggcttcctgagcctttaaaatttctgtccatgtatttacatttccctggcctacttgattcatgtgctctgtattttcttcttagattattaaaacgagaagaaagtttcacattcattccgcggtctcgtgaagagcttccagacaactttccaaaggaaattcctgggatctgctatttcctggaggtaaggactggtccaaagccaccaaagccttctctttcttcgtcgagaataaaaaaggtttcctacaacatcggcaccatgttcctccgggagacaagcctctgagacctgctacagatcaaagactcctccaaaaagcacaagcccagaacatgggtcaccaatggggggtggaaagagattgtgtctctttcattgctttgttgagaacaagcagcaaaatttctgtattatgtcaggcaataatcctactaaaaggtggaggtgaccgctgtcaataaaaagccggaggatgagggaaataagatgtgtccattcatatgagtggttttggtcatatatatacacatatattttaattacaagtgtgggtcccctttcagaactaaccaataaatagattccatgttttcttgtttatcacacatacaagtatctttccctatatatttgtaccacttttgagagccagttttgattatatattcctacatttagtgagttggtgggtgaggaatattttctaagtttctttttctgaacagacatttcatacatgtatcatggcagtgtggtaaacttcccaactggaagaattgtaactcggcaaaatattttagggatattacctatttttatacatatctcttctagataactacatttcgcacaacattattagattttcagaatctgcttctgtattgttagtatattatatataatgctaacctattaatctaatatagtttcccttatttagagagatcagtgcttcgactgagaatacatataaccaaggatttcagataccaagaaagcattatatgtctgcttagtaaatatatcttttagatttaactaatgtagcatggaatccagaggaaatggaatttcctaacaccagatgtatctgtaaccaagattaaagaaaggtctttttgccaccttctaacaaatatcagttaaaatgaaatgctttgctacactggatccttttcaacttagcacttacaaatataggtagcttttgcaacactaaactgcattctaataaacagcattcagctaaatgacatgttagttacccccttcctcttccccagttgatgcctcctaagagccgactgctattcttgagaacaaattcctggatactggcattagtgacaaagaagtgtcaggacagtttgccaagaatgttgtttcttcttgtacaacacaaagcaaggaaacctctgtattttatggctttgaggttttaaaaaatgttctgcagtttgattgatatggcttttaaattcagtgaatcactttcatgaatactgaagtaggtataatcttcagaactagtaatcattatagttacagataggattccatcgcatgtcctgctcaaatgaagacctgttctcattaatcaatactgcatgaaaatattactggctcacactaaaattaggagcatcaggtgtccagagttttcctgtttgggttcagatataaaatctaagtttctattgaggttaataagctggaagcatttgtttcctttaagccttggagaggtcattttcttactcattgatagcttatgtctactgaatgcaatattcttttctgttcagggattttggctgcattatgatttggttatgacataactcagttaaggaatatatttactaatttccaatgtagtctatgaggttcatttaatgtttttaaattttctatgtgtgtggctagaaggcatttgtagatatgcaaatatttgttataatcctgatcccttttataatttgagttattttcttgccctgggggtttacaaggacacgagtgcaacactctttatatggagaagacaggaaatagaccttgagctctaaacctttgcctgaccccctcttctgtgggcctgtgtttctggacaatggggaggtttacagccagtatgagcagagcagactgggagcacctcaatcctcatgcttatattagaaaatgccttagcaatgttgatgggctccttgtagcactggagcatggggagggaacaagctcactgatgtcatttatgcctattgtcttcagtaacttagaacttattatggtatattaaatcaataaaatgttggtgatgaacaatgtgttttgtaaccataaggctgaaagggacttccaggaatatccaatctatttctctcactttttataaagatttgtctaagcaactactctaaacacatatttattatctccatacttaagaatatctacgggaagcatatttgaaaagcatcattggaaatccacctcaatactagtgataggcctggagagaagtattgtatttatatatctcaatttatcagaagaatcacaaattctgtattagtttatatgattttacttagagaataagtatccatttacattgccataaatgtcacgatgaagaacgtgccagagatttcttatttatcactgacaggatgtcaactacatttttcatacattataacctaagtgtattttcacagctatagtccgagataatggtccaatttgttatcattttgctaatctattatagttgattattgtagttacaatgttgctatatatgtttatgaggtactatataaaatgtctgttcattcaaacttcaatcacagaagttagaagatggagaaaaaattatatttttatttgtcctacacaatgccatctacatctcttctcttaggaattgtgattgtaacaatgtggtggcatttgttatttcatatgacttttatctatacagtattctcacttacttacaaactattaccaacagcatgcattttagtatggcagatacaagaaatttgtgtgatgttcccttagaaaccaaatgatattaaattggggaaatggttttaacccactctgcaagggatactttaaaatataatttggcacctatagctcttgcattttaatattcttttaagctgctgtttggaagaaggcaccttataactagccattagcaccaaagcatcacgttggtatcaggattattttgatggagagaatgtcatcatttgcaaataaatcagttatctaacaaaatcagaatcccccaatatgtactcagaatgtactaccctgtatcttctttgtggaccttaatcattaggtaacattggccataataaaaaataataatatgcttcagaaacatagtagttggatctcttgtctatataacgtagagaaggggaagaagacatagcttccaggtaacatgggacccaattgcgtacaatctgcctttatattcatctcttgctctatattttaagtaatttcagattttccttttaatatctgattatgtggaatcaagtgagctttgatctgggactctgagacagacattgatgcctgagacttgagagtgggtctgtaggttcagcacttcaaatgttgtttcttacagtcttgcactccttcctcttgtccagtaacaacggtgtcaggacacagtagtttagtgtgaatatgtgtgtctttccaggaaaaacaaagcaaaagaggataataacaacttaaacaaaatctcattcacaaggggagcaagacttttaattttgcaaatgcctccaaagagttccagcaataaagcaaaattaaattgatagataacaaaaggcaaagccatggagaattctgaaaaccccaccaggctctgtgttttgtatagaatcatactgctgctgaatgaaattgtgtatctaaagtcgtaaggcatcaggtaggagctcaaaattatgaccataattaaatatatttgttgaaggctccttgggtccctgactttctgagagcaggtgttgtggatggttaaggcaaaaagtaaaacttttacacacaggtttctgtcttgtcattttgagaatgactcagtccattctggaccctttcttactccattctgtcactagaaaccatctcaccccctcacgcctggccacagcaaacagcattctctcttcacttctgaacccagaatggctacagaaagggttgctggtgcctcattcaggcggataggaaggaccacacacagtcaggcctgagcaacaatgtacttctgaagtgtagtaatgaactggatgtgccggggcattgattatatctgcagcttcaccctctgctctttcttcaaaacacagtctgactccaagcacttcatacagcttcactgaatgttcctttgaaattaattataaatgactctgaataggctttgggtagcaccaggcgtctttcagctgacaatatctagaaactcaagttcaagaaccaagccctatatcgtagcttagttttttctactattagattatagaccttcagctacaaaaattatgtcatttcagaggcttctataatcatagcttaataatagatataacccaaaaatcatgatgcatgagactgaattattgaagtttaacatatttctaaacgatttatgggcagctcttgatatgaatgttcctaaaccacaaccagctggtttaacatacacataaattgtgttcatgtgattgaacaaaatttattgttaaatgggtaagttgacctcagctatggactcaatttcaagatcctcgtagtggtgaatgaagagcagacactgatattacatacagattaacaatcttgtcaggctatactgagatagtgtgcaaaattccttcctcacacttgatccaaacaattgaaacctgcgtatgactgttcttccatcccttgttttcttccttcctttgttccttctttcctttaattaaaaaaggtcactgatacatttataacacaggaagtatcacagctaatcccatattctaaaatagttttataaagtgattaatatttttagtttgtgtgtatgcatctgtgtttattgaatgtagatgtttcatgattgaaagaagtaagtttctttggaaggacttgggaatgcagagaagtaaagtttgtgtctttatttctaatatgttataaccagatcacggtttcagttaagtacctcattgccatcccatccttaagaaatgacctagttcagtggttcagctgatctgcttggaagtatctggctggcttcataagaattccgtagggagttttaggaatacagaagactagtctttaccttcagagatttggattcagtaggtctcaggtagggcctaggaatctgtgtttagaaaatcactctaagtaatgctaatatacagccagacttgggaatcattgaaaagtattcaaataatcccaattactaggaataaatacaagttgactgggatagtgatgttatttcatttgtagttattttgaaaagttaaatactctaggcctcataccattatttctttcacaaattttaattttagctttgatttccaatttgtggtcttctttctgagcatgaatcttcaaacttagagacagacgtcaacactgataagcatgagggatgaatattgctcactatagggctattaggcatactagatacagtaccattttcttagttactgccagagctgtgcagtatattacaacatttgctaatcctcaccaccgaggtaaaaactatgacctttgggacacagaagcaaatatcaaagtgacagccttacttctgaatgctttgatttttatgtcatgaaaagacatcaacttaatacttagtctcactatgtacttttcatattgaattgtacattatctgaaaactgatttccaagcaataccgtgtaacaacctttcaagcaataatttaagccatggtgatgatgccatatgaagcttgcacttctttgcatttcatagagcctttgtgaaaacagaaacatgttttatacaagcaataatatagctggtgtggactttttaaagatactcattattctgtagcaaaatgagcagcaagtaatgactcagattaaaaatattcgggcaaatgacatgtttaatctatctcagaagttattcatttgcaaacatgctgtaaagtgattaatatacatcagattatttctggtgcataattttaaacatggctataaaaatatgatttctattcctgtcaaagagatttgtgtattatttataatgttgcccaatttttggatctttgtagtatataatagtaaggaagaagttaaggatggataaatgagtggaagtagagcataggttggaagaggtgattgagaaagtaggctttgcaaaaatatagatgggtcttgcggcagatttattcaaatgttggtttgatatggtcttggaagatgaaagagtaaagataaaagagctcattattactgttttcaatgatagctacacaagtttttggtaagtatgatagtattttgacttcagaatatgattgactgaaagtcam

SEQ ID NO: 95997 - DNA, 23139 bp, Homo sapiens
  misc_feature (1)...(23139): n = A,T,C or G
gaaactggaatttaaaaaataataataatatgcttttggagcaagacttcatcatttgtagcttttgcaaatgctactactgctcacttgtgtcacttgtgtcaaatcactttgatacttaaataccatattaaaatctacgcttggagaaaaagggaattttttggaacacagaagccaagtgtgccaaatactgcctttgccttaatgacatattattagttctttgctgaaggaactaaagaggcagggacgaggggtgaatcagcagagtccccatctctcagagcaggttgggataaacaatgccacggtcatttgccaagacactgtggcctctgcttgttcctttacagagacagaagttcctttacagagacagaagtagcctccaaaagcagcagaaagagaaaccrctccagggggctgcttctgaggagtggggctagggaggtgaggggcaggcactgcagctttccattaaaagcccctctttgttatttgctgttactttattgggttttaccacattctactttgaccagctagaaataataaacccctccttgacctctaatatcctttggttacccttccttctgtctctttttcctccaaactgaacctctgggaggagttgccgcccctgcggtctccattcccccgctgcggtctccattcccccccaactgcagcaccaccagccctcaggccataataatctggctctggcagctgtcactgcatggaaacgcttctccagcatcacctgctgcttccatggtgccacaggcgcctggtttgcttttctctctggccatggctccctgccatcttggtggcttctctctccctctgtgccatcctgggcctctgccctctctctgaagactctcactctgcattcgtgactttgtggtttttgtggttgaattcccagtatctttattcctgataattttttgttttttttttttttgagacggagtctcgctctgtcgcccaggctggagtgcagtggcgcaatctcagctcactgcaagctccgtctcccgggttcacgccactctcctgcctcagcctcctgaatagctgggactacaggtgcctgccaccatgcgctgctaattttttatatttttagtagagacggggtttcaccatgttagccaggatggtctcaatctcctgacctcttgatccgcccgcctcggcctcccaaagtgctgggattacaggcgtgagccactgcacccagccccctgatcattcttctaagttccagaactgcacaccccactgcctctgggactgctctccttccacaggtgaggggctcctcagatgcagcacaagcaaaacaggactgaccctctcccctcccagcccccgcactgctttccctttgcacccttctccccgtggctcagctccaacacctggtgtcatctttgagttctcttcctcaccccacctacacttaatctatcaacaagtccagagtacatcccaaagaagtccccttctccggttctccaacgtgacacttgggaggcccagccacaatcatctgctgctggagctactgtgacagccctgaactgggctcctcatgtccacctagccctgctgcagccacattgcaactggaatggtatctctctcttttttttttttttgagacggagtctcgctctgtcacccaggctggagtgcagtggcgcgatctctgctcatagcaagctctgcctcccgggttcacgccattctcctgcctcaagctccgcctcccgggtttgtgccattctcctgcctcagcctcccgagtagctgggactacaggcacctgccaccatgcccagctaattttgtgtttttagtagagacggggtttcatcctgttagccaggatggtctcgatctcctgacctcgtgatccacccgcctcggcctcccaaagtgctgggattacaggcgtgagcccccgcgcccagcctcggctaatttttatatttttagtagagacggggtttcgccatgttggtcaggctggtctcaaactcctgacctcaggtgaaccacccgcctcggcctcgcaaagtactgggattacaggcatgagccaccgcgcctggcagatgctacctcttaaccacagatacaagcatgtcaccacctggatgagagagcacagtcaaatacaaaaatcttttttttttttttttttttttttgagaccaggtctccctctgtggcccaggctggagtgcagtggcatgatctcagctcactgcaacctccacctcctgggttcaagcgattctcccaccccagcctcccgagtagctgagattacagcgtgcgccaccacatccagctaatttttgtatttttagtagacagggtttcgccacattagccaggctggtctcaaactcctgacctcaggtgatccacccacctcagcctcccaaagcactgggattacaggcgtgagccaccccacctggctatctaatctatctaatcaatctatctatcttatctatctatgtatgtatgtatctatctatctatctacctacgtacctacctacctatctacccacctacctacccacctacctatctatctatctacctacctacctacctatctatctacctatctatctatacctggggtctcactatattgctcaggctggcctcaaattcctgggctgggttgggcacaatggctcatgcctgtgatcccagcactttgagaggctgaggcgggaggatcgcttgagtctaggagttcaagaccagccctggcaatgtagtaagaccccaactctaccaaaaaaaaaaaagaattagctgggcacactccttagtcccagctgctcaggaggctgaggtgacaggatcccttgaacccaggaaacagaagctgcagtgagccatcatcacgccacggcactccagcctggacaacagaaacagacattgtctcaaggaaaaagaaaatcgagggctcaagtgatcctcccacctcagcctcctgaggagctgggactgtaggcatgcaccaatgcagccagctaattcaaaattctttttttttttttttttttccagacggagtttcgctcttattgcccaggctggagtgcaatggcaggatctcagctcaccacaacctccacctcccgggttcaagcaatgctcccgtctcagtctcccaagtagctgagattacaggcacacaccaccacgcccggctaatttttgtatttttagtagagacggggtttcaccatgttggttaggctggtctcgaattcctgacctcgtgatccgcccgcctcggcctcccagagtgctgggattacaggcatgagccaccgtggccggcacttttttttttttttttgagacggagtctcactctgtcacccaggctggagtgcagtggcgtgatcttggctcactgcaagctccaccttccgggttcacgccattctcctgcctcagcctcccgagtagctgggactacaggcgcccactaccatgcccagctaattttttgtatttttagtagagacggggtttcaccgtgttagccaggatggtctcgatctcctgacctcgtgatccgctggcctcagcctcccaaagtgctgggattacaggcgtgagccaccgcgcccagccagaatccaaaattcttaataggattattctagaaccttcatattctacatacaactcatattttctacctttcttttgtttaaaatatttttatttttaaagagacagggtcttactatgttgcccaggctggtctcaaactcctgggcttgagtgatcctctcacctcgacctcacaaagtgctgggatgacaagtgtgaaccgctatgcctggcttacctttctctcttctttttccagcacctggcatgtgcctgcctgtgtctagaacacctttcccctcattctctgcttggaaaaattctgctcctgcagaggaaggagcaatctggattcaaatcctggctttgccacctcctaccccatgaccttgggccagcagcttaatctctgtgatcctccctgtctggagaatagggatcaaaatggcccctatcccctggggttctcaccccacaagcctgtttgttctcctagaagcaaaaccctctggcctgcaggtacatgctactgccaccatggaccaatgacaacgcactgttctcaatgagtctcttagtgacatccctgagagaaggggttatggataatgcctccttgaattctaatgccaaggctccaggtccacaggatccctgggcagttgcagagagttgaggactttccaaggacccatccctcctcccacagcctctgyyccctctgstggcatgtgatggagctgggcctcatgttggctcccgggatgcctacccccataggtccctccaaaacagagacactggccaccagctttcctgccccagaagtgcctccctgcactcgctggaggagcagctcacctcggcacacaggcacacrcttgcccaagctgaagaagtgggagtgtagctccttggtgaagcagatgtctgcagctgcaggggtcctaagcagggacagatgcaattagtcctgccccctgcaccccgctccaccaccctgcccccagcatcagcatgcagaagggaggcacaggggagggcctgcggggccccaccccatgccctgcctggactgctggacgccacctcctgggcagagcaggaggagggcaaatctgggcagaggcaggtggggccggcccggcccacttcgaggggcccattcctcctcaccaacdcatcaacttcaggttccagatgtggcggagtttcaggatccctagaggacaggaaaggcttcatgccccaacttcccatatccccagggagtgcccttccttcaccccatctcagggaatgagggacagcagcactaccatttccctacagcccaaagtggcatctttcagacccttaggccagatcattcagttctccctggctcctccctctcccccaccctccacatcttactaatcactgcacctggactgcctacctccccaacatacttggacaatgcccattcttctatacttctccctgtactgtcactgcaaccagcccagtctaggctagtggatggctccaagtcctccttcctggcctcccaggatccacctgtgacatctataggcctttctccacccagcagccagggtgagctctgaagggctccagtgtggctaggtggctccccatgaactctaggacagttaagctctctgttcaggagtggaagccccaggcacccctccacccggccatctggttaccagagccaagcaacttcctgtgaagtcagcagagcaggaacctctaggtgtggcaaccaggctcccaaatagggctgaacggtacacgcccagccaggggcaaacctgaagccaggacactgggcttccagtccctggcccagaacttcctcacaggatatcctatgtccaacccccaaatttttcccaagactgtggggccctggatggtttagagaacagagggttctggaggcctgacgttaaaggagctgtaagatatgccctgtggccgttccttggtcctgctccatgcccaaggccctctccaaatcatgctccctcagggatgctgcaggagccacaaatccaagtctcagccctggggcagaacgcccggaaaccggagtgccagggctccatgaaaaggcagcgagaaggggtttgttctgacgaggctgggcccgtcccgaatcctcgcctttcctccccctgcccagcacactggcccgggtaccccagagatgagggtcgtccatgcaggactggtgattggacacggtgatgaggggcgtggccgggcctcgcttctcgatgagctcstacagcacctccctgttgtgcacggtcaggtggttcatgtactctggcggggaaggagaggtcaggcgctccgggctcgcccgctaggtcggggccgcggcgtcccccaccctaagtcccacctccggccgggcatgggtacccgggcgggcctgcctcggcctgggcccactcactggtccagaagcagctgtaggtgcccaccaagcccatgacgacgctgctggccagggtccaggtgagcggcggcaccgcggggaacggccactttcacgtgcagaggccaccccacccgaccgccggccgggctcccagcgccccgggccgacctgtggaacgcctctaggctgcgacctckaccgcctcgacacactggcccctgactggcccgcgcacggacggacgggggcgcggcgcaacagggkactggaccgaggtcccttcgcaggtcaggccggagcagcgcccggccccgctctctcgtcactggggagcggtctccgaagtcacaggccgtgggcgcgctgcggaacgggaggaaacgggaargcgggcgctggcaccccggcccggtgcaaccgccggaaagcgaacctgcgccggtgcccagcccgaccgactgtcgaaagcgcgcacgggccgcttgacggcagcgaggccagccccggggcggcgggaagtggccgtcaccccgtggggctcccgcttcctggcagcctcctgcgctcgccttttgtctctctagtgtttctgttttttgtttgacacagggtccagccagacccaggctggagtgcagtgatgggatcatggctcactgcagcctcgatctcccagactcaagcgattctcctgcctcagcctcccgagtagctgggaccacaggcgcccgccatcacactctgatccacccgcctcggcctcccaaagtgttgggatgacagccgtgagccaccccgcccagccacatatacaatttgacatagttacagtactacatgatactatgtgtatgtagcaatgtataatctactgtatggcaaaatatacaatatatacagcaatatatacaaacatattgtgtatcatatgtaatacaagaaacagtattttataccatctgatacagtcacaatgtcagctactacctctagttctgaaacatattcatgacccggaaagaaagccccctatgcattaagcagccagttttttatttttattttatatttatttatttattattatttttttaggagtctcgctctgtcgccagctggagtgcagtggcacaatctcggctcactgcaacctccgcctcccgggttcaagctattctcctgcctcagcctcctgagtagctgggactacaggcgcaggtcgccacgcccggctaatttttttttttttttgtattttagtagagatggggtttcaccatgttgcccaggttggtctcgaactcctgagctcaggcagtccacccacctcagcctcccaaagtgctaggattacaggcatgggccaccgcacccggcagttttttatttttatttttatttatttttatttttgagacagagtcttgctctgttgcccaggctggagtgcagtgacgagatctcagctcattgcaacctctgcctcccaggttcaagcgattcttctgtctcagcctcctgagtagctgggattacaggcgcaagccaccacacctggctaatttttgtatttttagtagaggctgggtttcttcatgttggtcaagctggtctcgaactcccggcctcaggtgatctgyctgcctctcctcccaaagtgtgagtcatcctacctggcctgttttttatttttaaaccataatttattgatttttttttttgagatggagtctcgcactgtcgcccgggctggagtgcgagtgcagtggtgtgatctcggctcactgcaagctccgccttccaggctcaagcaattctcctgcctcagcctcctgagtagctgggattacaggcgcccaccaccacgccgggctaattttttgtatttttagtagaaacgggtttcattatgttggccaggctggtcttgaacgcctgacctcgtatccacccgcctcagcctcccaaagtgctgggattacaggcatgagccaccacgcccagcccataatttattgattttttaaaatttgtccagccttctattaccacgtcgaatccattagctacagccatcccatgagaagctgagtggattcagccccacctcctgctcacagaccctgtccgagcacctcatttgtcccaacagcattactgcaggacccccaggacgttggactgccagctccctgggtctcctcctctctggggcagatcctcagtcctcccttgacttcacgactgtggccagatcatgtgtggactgtccctctctttgggtctccagagcgcttgcatcaaacacccctaactcagaagtgtgcagccacactgggactcagaacccaacaacagggacagaagactcacgcccttggggtgcccggtctcgtggcatcaggcatgacttccagctcctgcgccttccccagcaactgctgactggggacccagaccgggagctgagcgacgggcctggcgagcgaagctcggggtctcactcaggcaccagcccctccttgccccaggcttgagtgactcacaggtctgtcatgtcccgctggyccgggaaggcggggtctgggtgggaaggtgggcgggcaggtcagcagttcccaggcctggtgctggtcctccttgttggcggcgaggcggagacggggcgggcctgcctgttggcaagggtggggcgtccggcccagccaggcccttcctggccgggtggctcaggaacacagcctcttcctcttttttttcccctcctagccctattcaggcaggagctgctcttctggggtatcgcgatccacttaaggatgaggcagacttggtgacaagctggtctgagcaggtatgggagccccctggggagacggaagaagggaggaagttgccttctgcctggggagggtttgagagggagagggaagcctagggctcccaccaaggctgatattgacagccagggtttggggctgaagccaggaaccgtcrctctctctggttcttactggtagccctcatgggggtccctgacgccagagcctccaaggctgcatgtgccagcccagggctgcccacatacccatgtatatcccagaataggcaccagggtagggaacccaaactagcatgagtgacagagcaggtggtcagggagaaacagacatcaaacccagccaggagagagacaccgcaacagagagacagagaagggaaaccagagacgagagggaaagtgagacagagacggacagagcctcagagaggtaggaagtgagcccgaagggaaggtgacaggttgatagagaaaagcaggcagacagagcagaggaactcatgcctcaggatgcaaaagccacatggacagggcgtggagcaaggagccgagccctgcaaggtcaggtgagtgtgagacaaagataaactgagagagggggsctccagctggtgagatgaacaagaagggctccccagtggtggcaggggcatgggaaagagtccccatcacaggttgcaatggggatgatttggccatatctgagaccttttaaaatgcacacacccttcactgccgggagtttatcttaaagagaacatctcacaagtggggagacagagatgaacgaagatgttcctgtagttgctaatggaggcgaaaagcactggggtcttggaacaacatggtgaaaccccatctctccaaacaaattttaaaaattagcttggtagccgggcgcggtggctcacacctgtaattccagcactttgggaggctgaggtgggaggattacttgaggtcaggagtttgagaccagcctggccaacatggtgaaaccctgtctctactaaaagtacaaaaattagccgggtgtggtggcacgtgcctgtaatcctagctacttgggaggctgaggcaggataatctcttgagcctgggagacggaggttgcagtgaactgagatcaagccactgcactccagcctgggagacagagtgagactccatctcaaaaaaagaaaaaaaaaattagcttggtgtggcagcatgcaccttgtagtcccatctactcggaaggctgaggtgagagcatcacttgagcctggaaggtggaggttgcagtgagctgagatcacattactgccctccagcctgagcaacagaatgagactatcaaaaaaaaaaaaaaaaaaaagggggggggcygggcgcggtggctcacgcctgtagccccaactactcaggaggctgaggcaggagaatcacttgaacccggaaggcagaggttgcagtgagccaagatcacgccactgcactccagcctggtgacagagcaagactccatctcaaaaaaaaaaaaaaaaaaaaaaaaaaaggtagactaggccaggcgcagtgggtcaggcctataatatcccagcactggctgggcgcagtggctcacacctgtaatcccagcactttgggaggccaaggccggctgatcacctgaagtcaggagttcgagaccatcctggccaagatggtgaaaccctgtctctactaaaaaatataaaaattagctgggcgtggtggtgggtgcctgtaatcccagctactcgggaggctgaggcagggagttgcttgaacccaggaggctgaggttgcagtaagccgagatcacgccactgctctccagtctgggcgacagagtgagactctgtctcaaaaaaaaaaaaaaaaaaaaaaaaaaaaaaaaaaaaatcccagcactttgggaggctgaggtaggaagatcacttgagtccagcagtttgagaccagcctgggaaacatagaattcaggaggctgcagtgagctgtgatggcaccattgcactccagtctgggcgacagagcaagactttgtcccaaataaataaacaataaaagaataagcttgaccgcttgtgcactgttggcgagaacgtaaaatggtgcagtcaccatggagaccaatatgacacttcctcagaaaattaaaactagaactaccatatgatccagcaattccacttctgggtatatacccaaaagaactgaaagcaggggctgggcgctctggctcacgcctgtaatcccagcactttgagaggccgaggcgggcagatcacgaggtcaagagatgcatgaggctggggcaccagggctcattcctgcaatcccagcactttagcaggctgaggcaggagaattgcttgagcccaggagttcaagaccagcctgggcaacatagtgagaccttgtctctatttaaaaaaaaaaaaaaaaaaaaaaaaggacacggtggctcacacctgtaatcccagcactttgggaggccaaggtgggcagttcacctgaggtcaggagttcgagaccagcctgaccaacatgaagaaaccccatctctactaaaaatacaaaattagctgggcgtggtggagcgtgcctgtagtcccagctatttgggaggctgaggcaggagaatcgcttgaacctgggaggcagaggttgcagtaagccgagatcgcaccattgcactccagcccgggcagcaagagcgaaactccgtctcaaaaaaaaaaaaaaaaaaccagatggatggatgaatgaatgaatgaacaaaatgtggtctacccagatgcccagacaatggaatatgattcagccatgaaaaggaaagaaattctacagccgggtgcggtggctcacgcctgtaatcccagcattttgggaggccgaggcgggcagatcacgaggtcaggagatcaagaccattctggctaacatggtgaaaccccatctctactaaaaatacaaaaaattagccgggcgtgtggcaggcacctgtagtcccagctactcgggaggctgaggcaggagaatggcgtgaacccaggaggcggagttgcagtgagccgcgtttgcgccactgcactcagcctgggcgacagagtgagactccgtctcaaaaaaaaaaaaaaaattctgacatatgctccaacatgaatgacccttgaggacattttgctcagtgaaatgagccagtcacaaaaagacaaatactgtaggatttcacttttttttgagacggagtcttattgtcgcccaggctggagtgcagtggtgcgatcttggcttgatcttcacagagcaagactctgtctcaaaaacaatttttttttttggagacagagtctcactctgtcacccaggctggagtgcagtggtatgatctcgggaggtcactgggaggctggtgctgggcagcagctagtgccacttcctctgtcccatatttcagcgcctccagagccagaactgagcccagtgagagcgcaccctggrgcarcctggattcctggggtgtccccggcagccacacacagccatgcactacccaactgcactcctcttcctcatcctggccaatggggcccaggcctttcgcatctgcgccttcaatgcccagcggctgacactggccaaggtggccagggagcaggtgatggacaccttagttcgggtaagttcatcacttcagggaagccgtgcccctaaccaccatgagccaaagcccccatccctgcctgaccaggggtatgttctagagaagaggggagaagaagaggtgtggcacggagatgcagcgcaggcgcttgcctgctgctggcctcagtctcctcctctgtgaaacaggtgacatgtgggtgggatgagtcttttcctggggcatttccagtcccactgctttctgtgggctgcagycagtgagccttaacactctgggccacaacagtgccagtcccctgggcccactgcctcctctcagggcagttggcactgagtcaggctggccttcctgatgtcccacagatactggctcgctgtgacatcatggtgctgcaggaggtggtrgactcttccggcagcgccatcccsctcctgcttcgagaactcaatcggtgaggaagattctgtgggtctaatcaggggcacacccagaggcttgaggccctgaccccgcctccccttttcttggcagatttgatggctctgggccctacagcaccctgagcagcccccagctggggcgcagcacctacatggagacgtatgtgtacttctatcggtgagcacggagctggcagcgcagcagggtggggggcggtccttggccctaatgtgaggtaggctcattagtccccggggccacaggccccccatcctgggacagcctcacctgctttgcatgctttctcttctcaacaccttttattctgggctcttcccatcctcgacccccgccagagtgtccatagagcaggaggccttccttctataagcacaaatgtggggtccctcctcctctctcctgtgggagctgctggggctcagggtgtggctggccccctctatgaaagtggccagcaagggctgcagctcctgggaagaggctccgtggggaccacttatgggccttgggtagacccgatcttctaagtccctgggaggacaggctggcagggagccctttggagtcaggatccagagggcaagggaggctgcagggaaggagaactgattctctatataaataaaatgatatgacatctggtatgcgctccaaaattactgggtaggcagggtacagtggctcatgcctgtaatcccaacgctttgggaggctgaagcagcaggatcacttgaacccaagagttcaaggctgcagtgagctatgattgtgccagtgcactgcagcctgagcaacagagtgagaccatgtctcaaaaaaaaaaaaaaaaaaaaaaagaatgacatcaaagtgtccaaatgtcaaaatgtactatacccagtccgtggaatattattcagccagaaagaggaatgaagcacagacgtgccacagcatatggacgaacgcagaaaacattgatgagctgatttcattcatatgaaatatccagaataggcaaatgtacaagatagagaacagattaatggttgcaggggctggggggaggggagaatggagagtaactggtaatggatgttatgtttttattaggagtaatggataccaatgttttaaaattgattgtagmaatagttgcacagccttatgaatgtacaaaagaaccgtgttgtatacttgaagcaggtgaattttatggcatatgaattatgcctgatttttgaaagttctagagacaggttgggagggctgtgcccacattgccgctgttagtggagggcccctccctgagcgccgtttggcacttgcaagccaaaatcaaagacgtggggccactgctgcccatccctttgtcctcccaggtcacacaaaacacaggtcctgagttcctacgtgtacaacgatgaggatgacrtctttgcccgggagccatttgtggcccagttctctttgcccagcaatggtaggaagggaagggtgggcttggtatgtgggagcagaaggggagttctggctggctccactgggggcttcctcacccagacgggctagggggagaaggtccaggagtggatggcagccctcggtccctgggccttgcagtccttcccagcctggtgttggtcccgctgcacaccactcctaaggccgtagagaaggagctgaacgccctctacgatgtgtttctggaggtctcccagcactggcagagcaaggtaggcctgggcagtttgtacaggagggacaaggatagggtggcccagcggccagcctgatggctgctgtgtctctaggacgtgatcctgcttggggacttcaatgctgactgcgcttcactgaccaaaaagcgcctggacaagctggagctgcggactgagccaggcttccactgggtgattgccgatggggaggacaccacagtgcgggccagcacccactgcacctatgaccgcgtcgtgctgcacggggagcgctgccggagtctgctgcacactgcggctgcctttgacttccccacgagcttccagctcaccgaggaggaggtgaagggatggggctggcatgaggagggagggcagcagcagggtcacagggaagcccctcggccccgggcactgacactgccccaccacccattcccaggccctcaacatcagtgaccactaccccgtggaggtggagctgaagctgagccaggcrcacagcgtccagcctctcagcctcactgttctgttgctgctatcactcctgtcccctcagctgtgccctgctgcctgagcrtccccctacccccccagggcctgctgccttttgggacttaaaccccagcctcccccgtccatccagccctggggctggggggcttcaactatagttgccctgtgactgtagtccacccctgcctgccttgtttgatttggctcttgttctttggttgggcttgtgcctagattaggagaggaagccaggggccctgcactcatgccacctgccaggtagtgtagtatcaggagtggagacaaagtgggctctgggttggggtaggggaagggagggttcagaaagaggaatgaagatgttgtatgacaagaaggaaagttactgagaacaaaaacccagattggtgagataggacacttgtgcagcagatatgccaatgggccatgtttattgtggattggtaagaatcaccaggaaaccattaagccccaatagctacaaggagggtggttaatctgctatatcaaactccttcccygaaaccagcaaacaccgggaaacattttggctcattataatccggtgaacaatgcagtcaggcctgttataaccgctgagcagccacactcgcacctcctgggtgctgtagtctgtgttggtacaggcttctgcatgcctggtaaaggtccagccaaggctggtcaaggcaacatctccacacagaaaatctgcaccagttatgtaagctaaaaagctgtgtgaacccaggtgtcccggaaaggggctgcaggacacagcaaaatgccagcagcrtgccggacccctcccttccatcctcctctccaaagaasagaggtcaggaaaaacactggctgggacgctagaagggtcatgtgttaactataatcacatttatggtttggaaccatcaccccaaggtaaaaaaaaaataaaaggtattcccaggtatgtttggcaaaataaaataaaggtaattaaaaacctaagaaatggctgtaaactgagattacaaaaaaccagaggccttttgggagccacaggctgggggctggggccaacataccccagctctgggaccaaaagcctttggagtcctgtccctggatacagatgctcaggccacccacctagcactcctctcatttttgctgctcccccaaaagccagcgctgttctacaatagttcaggtcagacatctaagatccccaggccaaaccatgccacacacgtgtctgttccgaggtcttgttacaaatgaccaaaggttagcctagacctttggtcaggtggtgaaggccctgggaatgcaggttctagaaggggtgggggcatggggcccaggaggttgctagagataggaaatggggcaaatcgcaggtgacctcagcagtacctggatgattcccaccaaggaggaatgrccaaaccagatgggtgagaacaagcccaatgtgatgcacacctacccttgctaaataaacgctgctggtcagcctctagcccacaagcccctcttggtccgcatgtgttgtaataagcaacacaactgtaggctgaccccagcctgggattgcaaggctttgctgcagctgtgcttcatgaaaagcacttcagtgtttttcaacctactgcctaggacctggggaggtccaagtcaagctccagagtagacaactgacataaggccaccagtcccagccctttgcagggtttgctgcctcatgagcagggctgagttgtcaacctgtttctgaagtgaaagggcaatgacccaaaggttcccagaggaagttccttccccgtcaagaatgtagatacaaagacataggtggacaggaagtagaatttattggtgagtattaagaggggggcagcacattggaagccctcatgagtgcagggcccgccacttgtccagagggccacgaytggggatgtacttgaccccacagccatctgggatgagccgcttttcagccaccatgtcttcaaattcatcagcattgaacttggtgaagccccacttctttgagatgtggatctaaggagcaatggaaagaactsagtcaggaggcctggggcaaaggtgggagaagggggctgcagcactacataccttctggcggccaggaaacttgaacttggccctgcgcagggcctcaatcacatgctccttgttctgcagcttggtgcggatggacatgataacttggccaatgtgaaccctggccacagtgccctggggctttccaaaggcacctcgcatgcctgtttggagcctacattggggtagtgcaaggtcagaaacatgaacatccacctgaaaggcctgtctccaaggtcccttagagcaacccatacaaccaacaggctgcgtacactaccaaggaagctgctgtgtgcagccatcgcacactgggtccccatgaggaaaggaactcagtcggcttaattggctgcggagatcccaagaaccactgaaaaggcgccactgggctcctctgccagcttcagctacctgctggcaagatggttgtcattcagctaaaagcaagaagagctactcccatcaccagtgtttcccctaacctgtggggaagagcttgctaagacttactcatgctttgtttgtatctgcaggaaggggtcctgagtgaccactgaaagtcacttgccagcctggcttttctagtagccatagtggctgagtcactggggccacctctatgctctgataaaataatgcaagcctaataatgtagagactccaactgccttaaaaggcccagaccaagctcacctgtcagccccagcacaggacaacatcttgttgatgcggatgacgtggaaggggtggagccgcacccggatatggaagccatctttgccacaactttttaccatgtacttattggcacaaattcgggcagcctccagggctaggtagggagaagaaaagcagcaaagtgagagaagataatagagaaacattcaccacgactatctccagctcaggggaactgtgttggctgagttttgtaaggctcatgtttcatcaactcccaattccagtgcagtgtatgtgggtggggttgagggagcacggaggaaggactggggggtgacgaacaaagaatcctgccttaccttcagaggacagctgctcatattcatctgacaccatgtggccacaaagcggaaactcatccacttttgcctttttccgccccaggtcaaaaatgcgaatcttggcatctaaaaggattgggtaagtgtgcagggggtgtcacagacggacgcggagtccgcagagccaaccagtgcaggggctcttccactacttaccagggacacctcggcagaagcgagactttgggtacggcttgttcttacaataccggtaactgcaggggagtgaaaaaacacaggttaggtgaggttcacagaaagcccaacaggcactttgcccctcaaggaacaacccaaacgagggacgggaaaagggtggggaatgcacgtccacttctaaaccgtttccattcggggaaataaactacaaagcaacagttggctgctgcaacacagacaacacccaagactagaaacaacagacaccatcttccgttactttgtcttacgcttcctataaacactttgcaacaaactttcctagttaaaaattctctcttcaagacactgcgtactacaaaatcgccgcattatcattgcacagctcaggtcacccaatttaagactttcgggcacgtggcactaaatccacctccaagccgagtggaaatgcgtctggcgccccctgtaggacacaggaggcggccgcacccgtttttcccggactgcccttcacgtccgacaacgcacgcggcacgtcgcccggaaataagacagagaacgcacacaaaggccccaagagcgtatctagcgcccgaaaatgcggtgagcttgcaggacacaggcagagatacgagggaaccgtcgcttccacaccgacacgggaacgaaggaacagacagtaatattgcagactaaaaaatagccgggaggtgtaaaacatagggtcagttcccaagacagggccgccgcacgggggaggctccaccccacaattgttttcagcggccataggcacttctttccccgcccgtttcccagcagtgaaagtacacggattcaagactcaccaacgggcggggcggcggcccatggcgacaccaggatcttcagtggctgcaacgaaaaagagagagtcggaacggaagacgagaacagacctaaaaggtgtgagaaccagcaacggcaccgcaagagacgacaactgcgcttactyaccacaccgaagggaaagaggcgctcctccgcctgcgcatggyttatataggcggtctgtytgcgcgcgtaagaaccatagagtcctgtcgaagacgggtggacgctctgtcagacgtcatgaccatagacgcagccgctcttggccttgcgcccgggcgtagcccagcacatgcgcagatcagagaggtgaccgggtaccagrgccgcgggcggccagctgacgaatggggcttcgccacatggtcgcgagaagcccgcttccggctggccatcttgggcgtagaactcttgccctaggctttgccgttaactgtgacagacgtatatttctgagagtggaaaaaaggaaagtaccctaggtgggcctcccggcgaccgcgagagtgtccctgagcttgcacgggtctcggacacgcgctccgtgcctccttctaggctagaggccccggcggtgaagcgccatacggggatctgggcccgcgttcctttgtcaacccgggaggccggagggggagacccattcccctaccggagaggctggaccaggccttgctgggagccatgccccgtatccccgtttcctggagacccagggttcgcacattgccgcggggaagaggtcgaggagaaatctccacggagactcatggcctgggaaaccccggggcatctctagccccgtccgcccaccctgacccgcaccgtcccgaccagctgcgtctcgggcgccgcctcccatgagccgctctcgcctgggcaccgccccacctcgcccttcccactccactgtgctcaagagtccctccgggtgcgtctgggggtcgtggggaagcagggccgcccccacccgcccacggggcagcatccggggagaggtgcgcagagcaggcgggcgtcctgggggaagtggcatctggaggtatctgtccaccattctgcaggtggggcgcggtggggtaacaaagtcttcccgtcctttgacaggaaggacgggaggaaatcctgctcgagcgcacctgttttccaggatgatatgtcgcttttataaatggctgcaggtccctttgagaaaagcttgggacgatttctggggtgcacttgcagcagtggtgcaaggtccttcccaggggaacctagcctccctttccatcatgggactctggatgccggcggtgacttaggtctggaaactgggttcgaggctgtaacaccactggggcagtacaagtcaggaattgcggcggagtgccgtggctcacgcctgtgatctcagcactttgaggggcggaggtgggcggatcacttgagcccaggaatttgagacctggacaacatggcgaaaaaccgcctctacaaaaattaaaaactaaaaattggctgggcgcagtggctcacgcctgtaattccagcactttgggaggccgaggcgggcggatcatgaggtcagcagatcgagaccagcctggccaacatggtgaaaccccgtctctactaaaaatacaaaaattagctgggcatgctggctggtgcctgtaatcccagctgcttcggaggctgaggcaggagaatcgcttgaacccgggaggcggaggttgcagtgagccgagaccacgccattgcactccagcctgggtgacagagcgagactccgtctcagaaaaaaaaaaaaaaaaaaaaaaatatatatatatatatatatttaaaaattagccaggcgtggcggcacactctaatcccagctgaggtgggaggatcgcttgagctcaggacgcagagattgcagtgagctgagatcacaccactgtactccagcctgggcgacagagcaagactgtctcaaaaaaattcgtgtatggccgggcgctgtggctcacgcctgtaatccgagcgctttgggaggccgaggcgggcggattacctgaggtcaggagttcaaggccaacctggccaacatggtgaaaccctgtctactaaaaatacaaaaatgagccgggtgtggtggcacacacctgtaatactagctacttgggaggctgaggcaggagaattgcttgagcccggaagacagaggttgcagtgagccgagatcatgccactgcactccagcctagtctacagagagaaactatctcagaaaaaaaaaaaaaaatctgcctacagggcgggtgcagtggctcacgcctataatcccagcactttgggaggctgaggtgggtggatcaattgaggtcaggagttggagaccagcctggccaacagggtgaaaccacgtctctactaaaaatataaaaaaattagctgggcatggtggcgcatgcctgtaatctcagctactcgggaggctgaggcaggagaatctggcttgaacctgggaggtggaggtttgagtgagccaagatcacaccactgcactccagcctgggaccacagagcaagactcatctgtctcagaaaaaaaagaaaaaagaaattgcacctacagtctcctcactctctagtgggcgttaaaatgagctttctgtagccagtttgggcagacggaggatacagcctaatcctgggtgccctagtaggtcgtgcaggctgttctctgcacaaggacatcttacctggggagcgagagggctgaaatccctcccgtgtcctcgcctccagccgagtacctgccccgagagcagagtgcctacttgctgatccgcacataagcctgcaggggtgggtgggggccctggagcccagacaggcaccaaggnnnnnnnnnnnnnnnnnnnnnnnnnnnnnnnnnnnnnnnnnnnnnnnnnnnnnnnnnnnnnnnnnnnnnnnnnnnnnnnnnnnnnnnnnnnnnnnnnnnnnnnnnnnnnnnnnnnnnnnnnnnnnnnnnnnnnnnnnnnnnnnnnnnnnnnnnnnnnnnnnnnnnnnnnnnnnnnnnnnnnnnnnnnnnnnnnnnnnnnnnnnnnnnnnnnnnnnnnnnnnnnnnnnnnnnnnnnnnnnnnnnnnnnnnnnnnnnnnnnnnnnnnnnnnnnnnnnnnnnnnnnnnnnnnnnnnnnnnnnnnnnnnnnnnnnnnnnnnnnnnnnnnnnnnnnnnnnnnnnnnnnnnnnnnnnnnnnnnnnnnnnnnnnnnnnnnnnnnnnnnnnnnnnnnnnnnnnnnnnnnnnnnnnnnnnnnnnnnnnnnnnnnnnnnnnnnnnnnnnnnnnnnnnnnnnnnnnnnnnnnnnnnnnnnnnnnnnnnnnnnnnnnnnnnnnnnnnnnnnnnnnnnnnnnnnnnnnnnnnnnnnnnnnnnnnnnnnnnnnnnnnnnnnnnnnnnnnnnnnnnnnnnnnnnnnnnnnnnnnnnnnnnnnnnnnnnnnnnnnnnnnnnnnnnnnnnnnnnnnnnnnnnnnnnnnnnnnnnnnnnnnnnnnnnnnnnnnnnnnnnnnnnnnnnnnnn

SEQ ID NO: 95998 - DNA, 14601 bp, Homo sapiens
  misc_feature (1)...(14601): n = A,T,C or G
ccggacgcgaacaggagggccccacccccatccggtcgtcttaggaacagtggcccctgctgttgcctcgccacatgggaccatcctgagagctggaaggaccggccagctgtcccgtggaagatgggagctgggggttcttaggtctttttgaccccctcattgtccagaagaatcaatatggccttagggagcccttggctttcctcctggagcgggagcctttccccagcccccacctatggttgctttccagagctcaaggctcaggcccagctcccagcaccaggtgcaaacctggctcagccaggaaggccagcagccacccaagacctgtaaccacgttggccgccttcacctgctctcccccaagctcagcctcatggcccagcttcagggagcaccagggtctgtcccctcctgagggtggctctcctgcaggaggacttgagcccagggacagggtcctggccaaccctgactcctagcagggatcctcacagagagcaacatcgaagccgaagctgctgatttccagggtcctctttgccaccatggaccagagcgtgtgtgtccgtgtgcgactgtgtgtctacacacatattcacttgtgcatgcctgtggggggtgtggatacatatgtgtatacacgcatgtctgtgggcctgtcagctgcagtgcatgcacccccatgctcaggcctgcatgttcacatatgctccatgtgtgcacttgtgtggctgcctggtccatgcattgccatgtgtgctcacgtgtgcatgcccgtgtgtgcgtgtgtgtgtgtgtgtcctgtgtggctgctgtgccatggcatgcatgtgtccccgggtgcacacacatgtccccgtgtgcatgctcatgtgtgtctacacctgtgtgtgcctgtgtccccgtgtgcatgctgatgtgtgtgtctacatctgtgtgtgcctgtgtccccatgtgcatgctgatgtgtctacacccgtgtgtgtctgtgtgtgtccccatgtgcatgctcatgtgtgcctacacccgtgtatgcctgtgtccccgtgtgaatgctcatgtgtgtctatgcccatgtgtgcctgtgtgtgtccctgtgtgtatgcccaagtgcttgtgctcacattggcatgtgcctctgcgtgtgtgcacacagacatgaggccaggaacaggtggcctctccctcccagggtcccccgtgctctctctcagtcatgccttcctcccacctctccaggaagccccctgtgctccctctggccctgcctgtgtggttcacatgctactggcctccatttaatggtttcactgcagctgtgtctctgagggctcagtcttttttttttttttttttttttgagatggcgtctcgctctatcacccaggctggagggcagtggcgggatctcggctcgctccaagctccgcctcccaggttcacgccattctcctgcctcagcctcccaagtagctgggactacaggcacccaccaacaggcccagctaattttttgtatttttagtagagacggggtttcactgtgttagtcaggatggtctcgatctcctgacctcgtgatccgcccgcctcggcctcccaaagtgctgggattacaggcatgagccaccgcgcccagccttattttaaaaaaatttttttaaaactttttattttttatttttttttgagacggagtttcactctggtcacccaggctggagtgcaatggtgcgatcttggctcactgcaacctccgcctcccaggttcaaatcattctcttgactcagctgcctgagtagctgggattacaggcacgtgccaccacatccagctgatttttgtatttttagtagagacggagtttcaccacgctggccaggctggtctcaaactcctcacctcaggtgatccactggccttggcctcctgaagtgcctttgttctcctttttgccctttgaagcatgtgatctctgtgacctactccctgttcttgcaccccctcccctttcaaaatccttaataaaaacctgctggttttgcggctcaggcgggcatcagggtcccaccgatatgtgatgtcgccctgggaggcccagctgtaaaagtcctctctttgtactctttctcttcatttctcagccagccaacacttatggaaaatagaaagaacctacattgaaatactgggggctggttcccccgatatctggcgcgccaacgtggcttttctttttcctgagtgcatgtggggacccgcttccctttggtagttgtgtagaaacgttcatcggtccggttcacagaaatgcttgttcgactcaaaaaaaaaaaccaaaactgactcatatggtttagtaatagactgggtaccaaagggctatttaaaaaacaattgctcctgtggcgggagggaatgcctggaggctacttgttttatttcttattggaagaacgaggatcatcattttactttgtataggaggttcagctctttctttcccttaaaatgggaaaataaggacattgtcccccgagggctcgtgtgatactccccattctgagctcagaacacccagaactttgaaaattggctcttgccacatccagactgcgagtatgggaaggggaaacttttctgtctgttgtccctgctaccgcccctcgcgtccgtgattctgaaccccatgataaatctcctttgaacccttttcctctttttgatgccagtcctcttttatgggactccaattggcattacaataatttttctcaacccaggtatgccactctacctcttcagcatccccgggcacctcaaattgcttttttttttttttttttttttgagacggagtctcgctctgtcgcccaggctggagtgcagtggtgcgatctcggctcactgcaagctccgcctcccgggttcacgccattctcctgccccagcctcccgagtagctgggactacaggcgcccgccaccacgcccggctaattttttgtacctttagtagagacggggtttcaccgtgttagtcaggatggtctcgatctcctgacctcgtgatccacccgcctcagcctcccaaagtgctgggattacaggggtgagctaccgcgcccggcccttcaaattgctttttgacagcagataacatcgggcgtggccaccactgctcctctccctcagtatcagtgtagattcagacattctgctttgttcacctccaatgtgactattcctatagagttgtgttaagcttcgttatatgctgttagtggggaatatcaaaatttggacgaacaatcaaactatccaatgtattaattgtcatttatatacttgtgttaactcccgttttgactctaggaaaagtgtaatgttggttcgagctcgagaaggaatctggatactggtaactttacccagaccttgggaatcttccaaagctgggcaagagggcagagggctaggggccaggatcgggccctccaggcagtggttgggagggcacagggcacagggtgggggtaggggatgccgagggtgcttctgaccagccagcaggactcacagggagcagggcttgagccacggataacaggaccagtgaggcctggtccactctcctgggggcacgtgcaggccgctggaggggtctaagcagatgggccttccaggaaggacaggttgaggggtgtccttcccttggctgctggcaggcagaaagcaggctccaagggtaggggcagaaagcagagtttacagggcggccaagggggggttggactggccgcagtgccaggtctgatatggaccatgcacttggctgtcctccagaacaaaccaggaccttgcctcctgctgtgcctggccacccttgcctccggcctgtccacctctgtgggcccaaagccccagatgatccaaaggccctacagtcaccaattccatactcctggccacagaaggtcactcctggccacagaagggcagtagttctagactttcctaccatgacccacagaacaaagtagcttttacatggaggcccagtgtgtgggtgcacacacacacgcatctgtaactgaccccaaagcctcgggaagcaatgctggtctttgctggaccaccatgtacttccatgaccccaatcccttcctatcctattcaacttctaaaaggtgcccctggccggatgctggctgtccaaggtgacctggggttcaagtccctttcagatgaatgtagggtacagccctatggggcttagcaggtcttctccccgtgtgcggagacacgagattgtgagaaataaagacacaagacaaagagataaagagagaacagctgggcccgggggaccactaccatcaagacacggagaccagtagtggccccgaatggctgggcgcactgatatttattgcatacaagacaaggagggcagggtaaggagggtgaatcttccaagtgattgacaaggtgaagcaagtcacgtgatcataggacagggggcgcttcccttttaggtagctgaaacagaaagagaagaccatacatcagcgctttcttctatgtacttataagaaagatcaaagactttaagactttcactatttcttctactgctatctactacgaacttcaaagaggaaccaggagtacgggaggaacgtggaagtggacaagaaatgtgaccattaaatcatagcaccacagggagggggttaggcctccggatgactgcgggcaggcctggataacatccagcctcccacaagaagctggtggagcagagtgttccctgacgcctccaaggaaaggagactccccttcgcagtcttctaagtaacgggtggcttcccagacaacggcattactgcttgaccaaggagccctcaagcagcccttatgcgggagtgacagagggctcacctcttgccttctaggtcacttctcacaatgtccctaggttatattagtaatgcaacaaagagtaatattaaaagctaatgattaataatgtttatactaatgattgataattatccatgatcatgatcatttttatatctaatttgtattatgactatttttattttaactgttttttttttaaagatggagtcttgctctgtcgcccaggctggagtgcagtggcgcaatctcggctcactgcaagctccgcctcctgggttcgcgccattctcctgcctcagcctcctgagtagctgggactacaggtgcccgccaccgcgcccggctaattttttgtatttttagtagagatggggtttcaccgtgttagccaggatggtctcgatctcctgacctcgtgatccacccgcctcggcctcccaaagtgctgggattacaggcgtgagccaccgctcccggcctattttctttgttatactgaaacagtttgtgtcttcagtctcttgccttggcatctaggtaatccttcgcccacagatgaaagcggagctctgctgacattggtgtcttctccagacgtagttggttgtccaaattctttcccttggctttaaagtgagccggcggtgtcctgctcccaagcctgagagatgatgggcacaggcgacactttttaggacatgccgatgttttcagaaacaaaacaagaaatgttagccctgaaattctccatttcacgtgttcttcctgatattaaccacacattctttccgatattaaccaccacatcgtctttttgcaataatcttggcagggaaaaatatgctagccagggtccactacgtcgatttcaagcacggaagatgggtcacaccaggcacttcaaaagacccgtccctgaggcagcggagaccccgccccgccccgscgcgcccactcctttcggccaatcactgcagcggggagcagctatttgaatgtccccaccgcctatctgaaggccgccctgccattggccccgccgcgccccgcccatcgtggccagagcttcaagttccgcagccccagtgcggagggcggagactgcgccgacatggagctgttcctcgcgggccgycgggtgctggtcaccggggcaggcaaaggtgggcggcggggaaaggtgggcaaaggccggcggcgggcmgaggcgggcaggggacgccttcactgagcccgctytcggcaggtatagggcgcggcacggtccaggcgctgcacgcgacgggcgcgcgggtggtggctgtgagccggactcaggcggatcttgacagccttgtccgcgaggtaggycccgccgggtcccagcgctgcgaggcggcgagccaggagggggcggcagcgagcgggggcggtacctctgtgcgcgactccgcctcccctcgcgggcgctgcgcttctcaccgcggcctgggcgcccgcgcaccctctctcggggctggtggcctgcgtgggcggccgggtggtcggcagagccgccggggcccccgggctcagaaagaggccgaaatggctgcgaagcaggccccgggcaggagtcgctcgggcgcagggaggaagtgaaccggccggaggtagcgcccggctgctggccccacagtcccgacaccttcggaactcctaactcctttacttgtccggctgaaaggtcaccagccccagtccccagctgtgccgcttgctgggcacagagcctctggtaactgcyccctgatacacacagtgcccggggatagaacccgtgtgcgtggacctgggtgactgggaggccaccgagcgggcgctgggcagcgtgggccccgtggacctgctggtgaacaacgccgctgtcgccctgctgcagcccttcctggaggtcaccaaggaggcctttgacaggtgagcctgtgarggcggaggaacctcagggaggggctgtcctggaggacgcagcagccctaatctctgaccagggtctgtccctcggcctctagatcctttgaggtgaacctgcgtgcggtcatccaggtgtcrcaggtgagctgccctgtgggctggacgggaattctcgtgagtgatgccagctctgcctcacggtctcgctgcgattccagattgtggccaggggcttaatagcccggggagtcccaggggccatcgtgaatgtctccagccagtgctcccagcgggcagtaactaaccatagcgtctactgtgagtgccccagctgtgccctcagccccaccccagccccagcctcgccctcatcaccgaccccagccccagccagcttgggttcctcttcgtaggctccaccaagggtgccctggacatgctgaccaaggtgatggccctagagctcgggccccacaaggtgagcagggctggggtacctcccccaacctaggacaccccacttgccctgctgaccccagctgtcccggtgtagatccgagtgaatgcagtaaaccccacagtggtgatgacgtccatgggccaggccacctggagtgacccccacaaggccaagactatgctgaaccgaatcccacttggcaagtttgctggtgagtcaggtgggagcccagccagcgtggtgccagcagtycctgtgygtgccctgggtaggggtgggagggaaagatgggcggcagcctccttcctctatgcccctgacccccgccctgcccacagaggtagagcacgtggtgaacrccatcctctttctgctgagtgaccgaagtggcatgaccacgggttccactttgccggtggaagggggcttytgggcctgctgagctccctccacacacctcaagccccatgccgtgctcatcctacccccaatccctccaataaacctgattctgctgcccagactatgtgctattcctaggctgccagcaggtagctgggggcttggggccaggtgtggaacgcgggcagagacccatgacattcacattccaatccaagggggagcgtggctcccactcctgaggttttcaggcctggccagttctctgtcagggaggtgggaggtggtgaaaggtcacctcccaaagagggtggtgaatttcagcaaggttggccttcgggcctgtccagaacctctggggtgagacggtgtgtgcatgtgagtgttgatggccccctctgtgagtgtacagttggctcctcttccttcaagctaatgagtaagacaaaagggaaacaaggagaacgtcaagcttctccacttcgtcggtgatctgagccactttgttgaatcagatgatggttttcggaaactagaagagcgtttcctcaacttgtgctattcacaatgtaatgagcatagacacagcaccctgaagtctaatctgcattttatcatctgaagtctagacaagtaaccataagtcaagcctcctcccaccacrgctgatttcragctaccagttagatgtcatttaacgtggagctggaggagatgccctcagcaccctgttatgtggtgtttgtgtccataggtcccacagatgtacataaccgaggggcagagaaaacagtcgtgtatgcagaaataastaggaagtgacgtttgccgattttgcttttaataacacaaattgtaagcttctataatttgttaatgatcattaacaactggctagcaaaattgttgagaattcagcagttggctttcctgagccagtaggagctgcccccacacagcacaaggcggaagcagacagtggccctcatggcaccccccaatcccgagtgactctaatcccgggaccatggctccctccaaccccgagtgactccaatcctggaacctcatggcaccttccaatcccgagtgactccaatcccgggacctcatggcaccctccaatcccgagtgactccaatcccgggacctcatggcaccctccaatcccgagtgactccaatcccgggaccatggctccgggcccactgattctggcttcagcgtcagcggactgtgctgggtcactgctctcttcactctccacaccacaccccgacccccgcgccctcctccaccctgcccctctgcctggattgcccttactcccggtgccagccagaggagttgagggatgcggggagcctgcctcggctcccacgaggctcagagaggcctgacctgcttcagcctcttttcagaccttcccggtcagcacaacaggcgctgcctgagaactggcccgcctctccccacccctccctgacatgtgccctcccagaggcacaaatcagcctgagggaggccttgtacacagccaagtaatcatccctagggctcaatgcactagctattgctttgatctgggtcggctcctttggggggctgagcagctcagcaggccccctcttcccctggggtagggtggaggaagcttagtgctgcctttgggaactcagctctgaagtgcggctggggtcggctggggtgtgatggacccgctctgcaccatcacagaggggaattaggagcaaaccgccccaggacagaagggcaggtagtgagaggcaagaggtgtaggtggagaatgtttattgtataaaatgagaaggggctgccccacctcggggcacaaggaacagaactcccccccaccctccccctccagggaagcccatcctggggcttccctgcacctgcccctgcagccctgagggagaccctgctccctcccggcctccggcgggggccagggaaggctggagccacaccccagaatgaggcggcagagaggacaggatcctgccacccagcctcatccccatgcttccccccggcccacccccaccgctccccannnnnnnnnnnnnnnnnnnnnnnnnnnnnnnnnnnnnnnnnnnnnnnnnnnnnnnnnnnnnnnnnnnnnnnnnnnnnnnnnnnnnnnnnnnnnnnnnnnnnnnnnnnnnnnnnnnnnnnnnnnnnnnnnnnnnnnnnnnnnnnnnnnnnnnnnnnnnnnnnnnnnnnnnnnnnnnnnnnnnnnnnnnnnnnnnnnnnnnnnnnnnnnnnnnnnnnnnnnnnnnnnnnnnnnnnnnnnnnnnnnnnnnnnnnnnnnnnnnnnnnnnnnnnnnnnnnnnnnnnnnnnnnnnnnnnnnnnnnnnnnnnnnnnnnnnnnnnnnnnnnnnnnnnnnnnnnnnnnnnnnnnnnnnnnnnnnnnnnnnnnnnnnnnnnnnnnnnnnnnnnnnnnnnnnnnnnnnnnnnnnnnnnnnnnnnnnnnnnnnnnnnnnnnnnnnnnnnnnnnnnnnnnnnnnnnnnnnnnnnnnnnnnnnnnnnnnnnnnnnnnnnnnnnnnnnnnnnnnnnnnnnnnnnnnnnnnnnnnnnnnnnnnnnnnnnnnnnnnnnnnnnnnnnnnnnnnnnnnnnnnnnnnnnnnnnnnnnnnnnnnnnnnnnnnnnnnnnnnnnnnnnnnnnnnnnnnnnnnnnnnnnnnnnnnnnnnnnnnnnnnnnnnnnnnnnnnnnnnnnnnnnnnnnnnnnnnnnnnnnnnnnnnnnnnnnnnnnnnnnnnnnnnnnnnnnnnnnnnnnnnnnnnnnnnnnnnnnnnnnnnnnnnnnnnnnnnnnnnnnnnnnnnnnnnnnnnnnnnnnnnnnnnnnnnnnnnnnnnnnnnnnnnnnnnnnnnnnnnnnnnnnnnnnnnnnnnnnnnnnnnnnnnnnnnnnnnnnnnnnnnnnnnnnnnnnnnnnnnnnnnnnnnnnnnnnnnnnnnnnnnnnnnnnnnnnnnnnnnnnnnnnnnnnnnnnnnnnnnnnnnnnnnnnnnnnnnnnnnnnnnnnnnnnnnnnnnnnnnnnnnnnnnnnnnnnnnnnnnnnnnnnnnnnnnnnnnnnnnnnnnnnnnnnnnnnnnnnnnnnnnnnnnnnnnnnnnnnnnnnnnnnnnnnnnnnnnnnnnnnnnnnnnnnnnnnnnnnnnnnnnnnnnnnnnnnnnnnnnnnnnnnnnnnnnnnnnnnnnnnnnnnnnnnnnnnnnnnnnnnnnnnnnnnnnnnnnnnnnnnnnnnnnnnnnnnnnnnnnnnnnnnnnnnnnnnnnnnnnnnnnnnnnnnnnnnnnnnnnnnnnnnnnnnnnnnnnnnnnnnnnnnnnnnnnnnnnnnnnnnnnnnnnnnnnnnnnnnnnnnnnnnnnnnnnnnnnnnnnnnnnnnnnnnnnnnnnnnnnnnnnnnnnnnnnnnnnnnnnnnnnnnnnnnnnnnnnnnnnnnnnnnnnnnnnnnnnnnnnnnnnnnnnnnnnnnnnnnnnnnnnnnnnnnnnnnnnnnnnnnnnnnnnnnnnnnnnnnnnnnnnnnnnnnnnnnnnnnnnnnnnnnnnnnnnnnnnnnnnnnnnnnnnnnnnnnnnnnnnnnnnnnnnnnnnnnnnnnnnnnnnnnnnnnnnnnnnnnnnnnnnnnnnnnnnnnnnnnnnnnnnnnnnnnnnnnnnnnnnnnnnnnnnnnnnnnnnnnnnnnnnnnnnnnnnnnnnnnnnnnnnnnnnnnnnnnnnnnnnnnnnnnnnnnnnnnnnnnnnnnnnnnnnnnnnnnnnnnnnnnnnnnnnnnnnnnnnnnnnnnnnnnnnnnnnnnnnnnnnnnnnnnnnnnnnnnnnnnnnnnnnnnnnnnnnnnnnnnnnnnnnnnnnnnnnnnnnnnnnnnnnnnnnnnnnnnnnnnnnnnnnnnnnnnnnnnnnnnnnnnnnnnnnnnnnnnnnnnnnnnnnnnnnnnnnnnnnnnnnnnnnnnnnnnnnnnnnnnnnnnnnnnnnnnnnnnnnnnnnnnnnnnnnnnnnnnnnnnnnnnnnnnnnnnnnnnnnnnnnnnnnnnnnnnnnnnnnnnnnnnnnnnnnnnnnnnnnnnnnnnnnnnnnnnnnnnnnnnnnnnnnnnnnnnnnnnnnnnnnnnnnnnnnnnnnnnnnnnnnnnnnnnnnnnnnnnnnnnnnnnnnnnnnnnnnnnnnnnnnnnnnnnnnnnnnnnnnnnnnnnnnnnnnnnnnnnnnnnnnnnnnnnnnnnnnnnnnnnnnnnnnnnnnnnnnnnnnnnnnnnnnnnnnnnnnnnnnnnnnnnnnnnnnnnnnnnnnnnnnnnnnnnnnnnnnnnnnnnnnnnnnnnnnnnnnnnnnnnnnnnnnnnnnnnnnnnnnnnnnnnnnnnnnnnnnnnnnnnnnnnnnnnnnnnnnnnnnnnnnnnnnnnnnnnnnnnnnnnnnnnnnnnnnnnnnnnnnnnnnnnnnnnnnnnnnnnnnnnnnnnnnnnnnnnnnnnnnnnnnnnnnnnnnnnnnnnnnnnnnnnnnnnnnnnnnnnnnnnnnnnnnnnnnnnnnnnnnnnnnnnnnnnnnnnnnnnnnnnnnnnnnnnnnnnnnnnnnnnnnnnnnnnnnnnnnnnnnnnnnnnnnnnnnnnnnnnnnnnnnnnnnnnnnnnnnnnnnnnnnnnnnnnnnnnnnnnnnnnnnnnnnnnnnnnnnnnnnnnnnnnnnnnnnnnnnnnnnnnnnnnnnnnnnnnnnnnnnnnnnnnnnnnnnnnnnnnnnnnnnnnnnnnnnnnnnnnnnnnnnnnnnnnnnnnnnnnnnnnnnnnnnnnnnnnnnnnnnnnnnnnnnnnnnnnnnnnnnnnnnnnnnnnnnnnnnnnnnnnnnnnnnnnnnnnnnnnnnnnnnnnnnnnnnnnnnnnnnnnnnnnnnnnnnnnnnnnnnnnnnnnnnnnnnnnnnnnnnnnnnnnnnnnnnnnnnnnnnnnnnnnnnnnnnnnnnnnnnnnnnnnnnnnnnnnnnnnnnnnnnnnnnnnnnnnnnnnnnnnnnnnnnnnnnnnnnnnnnnnnnnnnnnnnnnnnnnnnnnnnnnnnnnnnnnnnnnnnnnnnnnnnnnnnnnnnnnnnnnnnnnnnnnnnnnnnnnnnnnnnnnnnnnnnnnnnnnnnnnnnnnnnnnnnnnnnnnnnnnnnnnnnnnnnnnnnnnnnnnnnnnnnnnnnnnnnnnnnnnnnnnnnnnnnnnnnnnnnnnnnnnnnnnnnnnnnnnnnnnnnnnnnnnnnnnnnnnnnnnnnnnnnnnnnnnnnnnnnnnnnnnnnnnnnnnnnnnnnnnnnnnnnnnnnnnnnnnnnnnnnnnnnnnnnnnnnnnnnnnnnnnnnnnnnnnnnnnnnnnnnnnnnnnnnnnnnnnnnnnnnnnnnnnnnnnnnnnnnnnnnnnnnnnnnnnnnnnnnnnnnnnnnnnnnnnnnnnnnnnnnnnnnnnnnnnnnnnnnnnnnnnnnnnnnnnnnnnnnnnnnnnnnnnnnnnnnnnnnnnnnnnnnnnnnnnnnnnnnnnnnnnnnnnnnnnnnnnnnnnnnnnnnnnnnnnnnnnnnnnnnnnnnnnnnnnnnnnnnnnnnnnnnnnnnnnnnnnnnnnnnnnnnnnnnnnnnnnnnnnnnnnnnnnnnnnnnnnnnnnnnnnnnnnnnnnnnnnnnnnnnnnnnnnnnnnnnnnnnnnnnnnnnnnnnnnnnnnnnnnnnnnnnnnnnnnnnnnnnnnnnnnnnnnnnnnnnnnnnnnnnnnnnnnnnnnnnnnnnnnnnnnnnnnnnnnnnnnnnnnnnnnnnnnnnnnnnnnnnnnnnnnnnnnnnnnnnnnnnnnnnnnnnnnnnnnnnnnnnnnnnnnnnnnnnnnnnnnnnnnnnnnnnnnnnnnnnnnnnnnnnnnnnnnnnnnnnnnnnnnnnnnnnnnnnnnnnnnnnnnnnnnnnnnnnnnnnnnnnnnnnnnnnnnnnnnnnnnnnnnnnnnnnnnnnnnnnnnnnnnnnnnnnnnnnnnnnnnnnnnnnnnnnnnnnnnnnnnnnnnnnnnnnnnnnnnnnnnnnnnnnnnnnnnnnnnnnnnnnnnnnnnnnnnnnnnnnnnnnnnnnnnnnnnnnnnnnnnnnnnnnnnnnnnnnnnnnnnnnnnnnnnnnnnnnnnnnnnnnnnnnnnnnnnnnnnnnnnnnnnnnnnnnnnnnnnnnnnnnnnnnnnnnnnnnnnnnnnnnnnnnnnnnnnnnnnnnnnnnnnnnnnnnnnnnnnnnnnnnnnnnnnnnnnnnnnnnnnnnnnnnnnnnnnnnnnnnnnnnnnnnnnnnnnnnnnnnnnnnnnnnnnnnnnnnnnnnnnnnnnnnnnnnnnnnnnnnnnnnnnnnnnnnnnnnnnnnnnnnnnnnnnnnnnnnnnnnnnnnnnnnnnnnnnnnnnnnnnnnnnnnnnnnnnnnnnnnnnnnnnnnnnnnnnnnnnnnnnnnnnnnnnnnnnnnnnnnnnnnnnnnnnnnnnnnnnnnnnnnnnnnnnnnnnnnnnnnnnnnnnnnnnnnnnnnnnnnnnnnnnnnnnnnnnnnnnnnnnnnnnnnnnnnnnnnnnnnnnnnnnnnnnnnnnnnnnnnnnnnnnnnnnnnnnnnnnnnnnnnnnnnnnnnnnnnnnnnnnnnnnnnnnnnnnnnnnnnnnnnnnnnnnnnnnnnnnnnnnnnnnnnnnnnnnnnnnnnnnnnnnnnnnnnnnnnnnnnnnnnnnnnnnnnnnnnnnnnnnnnnnnnnnnnnnnnnnnnnnnnnnnnnnnnnnnnnnnnnnnnnnnnnnnnnnnnnnnnnnnnnnnnnnnnnnnnnnnnnnnnnnnnnnnnnnnnnnnnnnnnnnnnnnnnnnnnnnnnnnnnnnnnnnnnnnnnnnnnnnnnnnnnnnnnnnnnnnnnnnnnnnnnnnnnnnnnnnnnnn

SEQ ID NO: 95999 - DNA, 115050 bp, Homo sapiens
cataagaaattggctgttgattggccaaacgtaaaaatttggcttgtgttttaagtctgtttgggctaacaaaaaaatactataggctgggtgacttataaacaacagaatttttttttttttttcccaacagttctgaaggctgggaagttcaagatcaaggcactggtagattcagtgtctggtgagggcctgctctctggttcttagacgaacatctgtttcctcgagatgccctcatgtggtggaaggggcaagggaccttgctggggtctcttataagtgctctaatgagctaattactttccaaaggccctctctcctaatactatcaccttacaggttaggatttcaacatacaaattttgggaaagcagtcaattgcattctgccctcatgtttctccagagaaacagaaacaatatatatgcatatacagaagaaaatttatgatgagggattggctcatgagattatggaggttgagaagtcccagtctaccttctgcaagctggagaaccaggaaagcctgtggtatagttccagtccaaacctaaaggcctaagaaccagggaggtcaatctgggtctgagagcccagaactatatctgctcagatatctgcaggcaggagggatgaataaccgggttcaatggggaacacatttgttcttccacctttttgttctattcttgtccttaaggattggatgaccaccatatagatgagggcagtcttctttacttagtctaccaattcaaatgctaatctcttccggaaacaccctcacacacacatatccaggaatagtgttttaccagctttctgagtagctcttagcctagtcatgttgacacataaaattcaccatcacagcttgtgagtgttttgggcccttaaccctaaagttaagccacctgtcagacctgcaatcccggcactttgggaggccgaggcgggtggatcatgaggtcaggagttcaagaccagcttggctaacatggtgaaactccatttctactaaaaatacaaaaaattagctgggcgtggtggcacatgcctgtaattccagttactcgggaggctgaggcaggagaatcgcttgaacctgggaggtggaggttgcagtgagccgagatcgcgccattgcactccagcttgggtaacaagagtgaaactccatctcaaaaaaaaaacaaaaaacaaaaaacaaaaaacagagcctgggcaagagaaggagactgtgtctcaaaaataaaaagtaccgctccctctccctctccctctccccacggtctccctctcatgtggagccgaagctggactgtactgctgccatgtcggctcagtgcaacctccgtgcttgattttcatgcctcagcctgccgagtgcctgcgattgcaggcacgtgccgccacgcctgactggttttggtggagacggggtttcgctgtgttggccgggccggtctccagcccctaaccgcgagtgatccaccagcctcggcctcccgaggtgccgggattgcagacggagtctcgttcactcagtgctcaatggtgcccaggctggagtgcagtggcatgatctcggctcgctacaacctccacctcccagccgcctgccttggcctcccaaagtgctgagattgcagcctctgcccggccgccaccccgtctgggaagcgaggagtgtctctgcctggccgcccatcgtctgggatgtgaggagcccctctgcctggctgcccagtctggaaagtgaggggcgtctccgcccggccgccatcccatctaggaagtgaggagcgcctcttcccagccgccatcacatctgggaagtgaggagcgtctctgcccggccgcccatcgtctgagatgtggggagcgcctctgccccgccgccccatctgggatgtgaggagcgcctctgcccagccgcgaccctgtctgggaggtgaggagcgtctctgcccggccgccccgtctgagaagtgaggagaccctctgcctggcaaccaccccatctgagaagtgaggagcccctccaccgggcagctgccccgtctgagaagtgaggagcctctccgcccggcagccaccccatctgggaagtgaggagcgtctccgcccggcagccaccccgtccgggagggaggtggggggggtcagccccccgcccggccagccgccccttccgggagggaggtggggggtcagccccccgcccggccagccgccccgtccgggagggaggtgggggggtcagccccccgcccggccagccgccccgtcggggagggaggtggggggatcaggcccctgcccggccagccgccccgtccgggagggaggtgggggggtcagccccctgcccggccagccgccccgtctgggaggtgaggagcgcctctgcccggccgcccctactgggaagtgaggagcccctctgcccggccaccaccccgtctgggaggtgtgcccaacagctcattgagaacgggccaggatgacaatggcggctttgtggaatagaaggcgggaaaggtggggaaaagattgagaaatcggatggttgccgtgtctgtgtagaaagaagtagacatgggagacttttcattttgttctgcactaagaaaaattcttctgccttgggatcctgttgatctgtgaccttacccccaaccctgtgctctctgaaacatgtgctgtgtccactcagggttaaatggattaagggcggtgcaagatgtgctttgttaaacagatgcttgaaggcagcatgctcgttaagagtcatcaccactccctaatctcaagtaatcagggacacaaacactgcggaaggccgcagggtcctctgcctaggaaaaccagagacctttgttcacttgtttatctgctgaccttccctgcactattgtcccatgaccctgccaaatccccctctgtgagaaacacccaagaattatcaataaaaaaaaaattaaaaaacaaaaaacaaaaaacaaagttaagccacctggactgctgacctgcaacattagcagcctccaggcaggctgggggagggggaatatatttatataaatataaatctcttcttttgggagatttctcatagacaagactgaagaaagttatcacagacaacaaacaagactatggacaagtagacagaagacaggagatgatgttaaagtcaaatctcaccagaggataccaaaatctaatccaaagatctcagagatattgaagggctaaatcgataatcacagttggcttatttaccatcatttgtgtaggtttaactacgtggacacatttcctcacattgatttcagcactggaagggaacacttagtgatcatctcttttcataaataaggaccctgagatcaaaagagattgagtgaactgaccaaaatcacacagaactggctagaaccaaactccttagtgattatacttaaattagcatatatatgccatacacgtaaaagaagatatataatatgtatgatggtcatctgtgtttaaaaaggagagcagcatcacgtgaactttccattaaaacctgggtggcatcggggcaggaggaccttgaattaggaagctggaagagggtgatgaggctggcaagttagccacaggccgaggataggctagccagggagtggagaggctgcagtggccaaggttcaggaagttcatagcagaaacaaggcaaggcaactgtggcagtagattggggatgtgacatctaccagggacagaaaatatgtgctcttttcactctgctcagccaggctagagctgtgcctaccccacagcatgtgtttggagcctgagggagacagcagtgtgcattggggtcagataattacagaagcatctcccctccatgttttcctctctcctaaagactttgcttgttaactctgcatttacaggtaaccaagcccatatgatggcattagttaatgactgactgctgtttttttccaagctgctgtcaggcagattttactaattaatttcacttaaaatagtggtgttcaagcctgactgcatagtaaagtcatctggggagcttagaaaaaataaacaaactgatgccagagccccaccccaattaaattctgatttaattggtctaaggtccaagcattgatatgtttgaaaaattccccaggtgattctaataggcagccagggttggaaccatggatctaaaacatcaggaaaagtttcaatgaactaattaattgttttaaaacagttacaacagcattgttttcttcacatctggcaatgtaattcataaaacaataatgaaataatttgcaggatacaatgtcttcataggattttctcattctcatttttgctaagtcaacacatggctgaattaaacaatcaatctgaaaccgatggttccactgaagcttcttatagcttcattaccttctttctccaaatcacatcacaaagatttgatagagtaaccacctccctcgacctttatgttgaggtgtctggacagcacagaggcatggtacttagaaaagattccaggacgctttgttatcattggactttctgtgctatggaaattcaacactgtgggctggaataactagtcatgtggaactccttcctgcttttgtaccctctcacttttacttgagcagaaggttaaaagtattgctttctgagaagtcccattcggtcactcctctctctcgcaagagagacagctgttctcccttttcttttgcctataaacttccgctcctaaactaaaaaaaaaaaaaaaaaaaagtattgccttatttttctcatctcctacttcttgtctttttctcttgtttccgattcaggcattagagaaggcaaggagttaggagtaggaagactcaatgatttatagaactgggggtgtcataaaaggtcattagttcaaccaccatctgagaccaagagacttccccaagatcacacagctagatagtcctcgaactggccccggaagtgggggcctcattctccagacccattctgttcaggatatcaactggtttttcaagacagactgagctcaaggatgtttgggggagactcctccttccccgagagggtctccattcatcttatcctcgccaaacgatattccttccgcttgcttcattaactggctccatttgtgaagtcttctccaaaccgccctgcttaattcgggacacagcagcacctgtacattcctcccttcctcctcgctctttagccgcgtgctgctaatgcttgtgtgttttctattgttacatgctttccctcgttgatgtgcatttattgaatgcctcctgttgtcaaacttctaatagggaatacraaaacagaagacgcctccgcttggctgtgggcctggctggggatgaacccctgtagccaggccccggggtctcgcctggtttcggtacgggcaggcagcgcaggcccgcggggaacgtaccccgcaccgctccgggagagcgggtgtggggttggattcaggtctcggcctggcgaagcgtgagcgcctccctgcacggaggggaggccccagcggtgggcgcctgtccccaaggccgcgcggagggaggcggtcagtccagaccgactcggccgagctcccgagctgccaccggtgaccacgacaggaaggctggcgcgccgggggaggggcctgggcaagagcgggaggggcgggcggaaggacgagagggaggaggaaagacccgcggggaggagctgggaggagacacccgggagaaggcggaggaaagggcaggaagcgggagggagctgaaaggaggaggaggctgaggggcggagccgggcgctcggggagagtagccagcagagggggtggagccgggcctggggcggagccagggaaggggaggagcgggggggagaggcctctacggccgccgctgccgccgccgctgccggggcgcgttctcctcctaccggtcgggtgccccggggcgttccctctgccgctgcttctcggcgcggttcctacccggccgctccccgaggcgcgggctctggcggcctcgaccgactaggacgccccgtgcgccgcccgcgggccgccgcctccctgggcgcgcggggccagcatggagctcttccaagccaaggaccactacatcctgcagcagggcgagcgcgcgctgtggtgcagccgccgcgacggcggcctccagctccgacccggtgaggctggcggtgcgggcggggggcaccccgggccagggcggggagaggagggggcgcggccggacccctcagccgggcgggaggagccgcctgcgggcctggtgaggcggggcggggcgggctgcgagcgcgcgagctgtcattattccctgactggaaggagcctggcctttctccgagacagcgccgagcccctaccccagtgcggagcagaaggggctggcgaccctcgtccttcccaccgcgtcacgcggccgcccttggggcttggggcccaggccgaggggagggggtcccctccggcagaaagttccagcaaggtgcacctggccgtaaaggcctcttcctccttggagtagttcttacatggccttcgccagaagttctgggttcgaattccgatctggagcggttgcgccagttccgtctagggctctgctggacactcactccctgttgccatcccgtgtgttcttggtcccttattattaaaggtgtgactttactgtggttacctcataggcactcggtttaaagcctttgtctttgactttaataccacagcacaattaaattgtattgtaatgtataattttgagatttttgtgtgacttgatgttgtgcgacacaaaatgtattgtgggtccatgtttgggtgtcatgtaagctgttcggagaggcttaagtctgcaattagcttgctttaggaaaatgtgtgtgcagtcgtggtttaaacagagcagtccctgccctcagagcgctgacagtccagtttcttgtaagatggggctgggtggcacctgccccttttggcttgctaatcctttcctcatatcactcagagattcttccactttagggaaagcgagaggatagagttctttaaggaaggagccagagcttttcagacttacttgtaattcttatgtgcagtctagacagaaggattacatgatatgaattgaaaaggataaaaggttcagatgagcttttcagatcacagcgtggtatcacttataggatggtttttaaggacaggccctttaacatattatttccaatccccacagcaaccttacaggacacgtgtgggatcctctttttcaggtgaggagaaaggagtgagaggttattagtaactcgttcggggtcacagcctagagttgagacactgacacagggcagttctgtgacctccagaacacttttgsgcaggccccactgctttcttaggaaggcctactagttgctttgccagagcagtgaaggataacttatttttttcctcaggctctgtctatattttcttgctattacgttgtatttcctcttttcagaatggaggataaactccttggcccagataaagttcttgatgatctcgggatagagttattatggataggctaattttggccagtcttctgtcattctcttctctgatttgaccatttgtctggctttctccccttccctcctttcactcccccaaatttgggtaaggcttcagtacagcttgaagtaaagcagatttcaaaattcctaggttgtcaaaagagtcaactccttggattctaaaagcttagactattagaactggatgggacttaagatcgtctccaactcatctgacaacaaacttttctacaccccagtttcttgaactataaaggctaacctgcgcctagattcttggatgaagccatgcagtttggattactgtttgttcaaagtccatgtcagaaggcaaatttaaaacttttttkggggaggaaagtagctatagcctttgcacttgagattggcatactttttagaatatagcgggccacagaccaagtagaccaaatgtctggaggaaggaagaggccatgtttcagaagtaacagccagttttgatcttaaggtgttcaggatagccagggaataaagaatcccatgcacttgattttcctatagtttatcctgtccaggactgaagatcctttctaactaatggctatttaagaatggcattttaattgaataagtgcttttcagatctttttctgtatatggaatcatttaaaattctctttattttattggacttttcccctgtgcttttatggcaagttttgctgctgtttgtagtgacagcatttaaaatctttcattgtttcctactggttatttagctgaatagattactaagtccttttcttttttgaaagggcagtattataagctcaaaaaagcttgtgggcatcgtggtttttacattcgtgactattgaacaacctgaaacaagagttttcctttttctagagacatcagaaggataagtaatgatgatatttaagattaaaatactcatttatttagcctggaatgtttgttactgtcaaccccttttcctacctagtccattccataagacccagctcagatgctacccctcatccttggggcagaattattggccacctttattgtgtttccaggcattttctacacttagtggacacttcaattctaacccttatgcatcatcataataaaagtttgcctacttcttccccggtgggaagtcccagtgtgttccccaaggcaagggctgtatttactcctcatcttggtgtctctaggctttagagtacttaggacagagaaggcgtttttgtttgagttgagctgaattaaagttaagtctaagttctctctcagtaatatcattgccttaaaaataagatgttgtattatgtttgttgctctttttaggcctgtttttttgggggagggggaaagggcggggcgggcagtggacagagtcttgctctgttgcccaggctggagtgcggtggcgtgttctcrgctcactgcaacctctgcctcctaggttcaagcgattctcctgtttcagacttctgagtagctgggactacaggtgtgtgccacctcacccagctaatttttgtattttttgttagagatagggtttcgccatgtcggccaggctggtctcaaacccctgacctcaggtgatctgcccacctcggccccccaaagtactgggattataggcttgacccactgcgcctggcctctttttagggctgttttgaatatattttaattggagtggaaaatctctgtccatttggatgaggaaatatgaggaaaggtacacctgcacttgtgttatatttctatctgatgtagcattatctcattatcttttttttttttttctgagacagggtcttgctctgtcacccaggctggagtgcagtggcgtgatcatggcttgctgtagcccctacctcccggcaccaagctattcctcccacctcagtcccccaggtagctgggactacatgtgtgtgctaccacacctggctaattttttttttttttttttttggtagagatggagtctcactatatggctcaggctgatcttggcctcctgggctcaagcgatcctcccaccttggcctcacaaagtgctggaattatgggcatgagccaccacactgggcttttaaaatatctttttggtagtattccttactttcctctttaacattatttaaactttttcaggttttttttctcctagttaaaaaacsaagtattgttttttttctggtgtttctaatttttttaagggtaatgagtaatctgtattcatatatagcagttttttgatagatgcttagatgcttatgtctgttgtaagataatgactactacttctcttttcttttttttctttcttttttgagacagagttttgctcttgttgcccaggctggagtgcaatggtgcgatctcggctcactgcaacctccacctcccrggttcaagcgattctcctgcctcagcctcctgagtagctgggattataggaacctgtcaccacgcctggcaagtttttgtatttttactagagacagggttttgccatgttggccaggctggtctcgaactcctgacctcaggtgatccaccctccccggcctcccgaagtgctgggattacaggcatgagccaccgcgcccggcctggttattttattttctacagggaaagtgataaagcaccgtgtaaacattcagtaatcttctgagagtagagtctaatatctcaggataagaattgtaatttgaagattcaaaaagaaatataatacaatccactttgggggaatgctgatatggtcttatctctttggtcttaaaattgcttcctctagtccttgtggctttgtctgatatgacagtattatataatttatagctgtgtgtaaattatataataattcacattctgttctgagactgagcgaccaagaagagatctcaaagcatctgtcatacacataacattcataaacatagaaactgtatatggaaaggtgatactctaagtgatgaatcccagtgaactttttttttttttgagattgagtctcgctctgttgccaggctggagtgcagtggcgtgatcttggygcactgcaacctctgcctcccaggttcaagcaattctcctgcctcagcctcccgagtagctgggactacaggcacgcgccaccacgcccagctaattttttgtatttttagtagagatggggttttaccatgttggccaggatgctctcgatctcttgacctcgtgatccgcccgcctctgcctcccaaagtgctgggattacaggcatgagccaccgcgcctggcctgaacaattttttgagggatactaggtattagttagaattcacagaaatgttaaaaattttttctgttcttcttagagttaatttttgataatgaaattatttttactatgtcatatgaggttaacttttttgaatgagaaatcataattatggaattgaaatccacctggaatttttttttgaggtatcatttttgtgaaatgattctgtttatttggagttttgtggcatttggtatttacttaaaaaaaaaaaaggattttgaactttatctttttaaaaaattctgtttgtagctaggcatggtggctcgcgcctgtaatcccagcactttggaaggcmgaggtggatggaccgcaagaggtcactagatcaaaaccagcctakccaacatggtaaaaccccgtctctactgaaaatacaaaaattagctgggtgtggtggcgggtgcctataatcccaactactcgggaggctaagccacaagaatcgattgaacctgggaggcagaggttgcagtgagctgagatggtgccactgtactccagcctgggcaacagagtgagactgtctcagaaaaaaatattgtgtttactaaaaatttgcaaattaccatgacagaatttaatagggcactttaaattacatattaaatggcttacaaaatctttctgatcatttttgttgttgaataaccaggttttttcttagtgtatttagtcttcagtttttataatgggttactagttttatatcttrtactactttttactccatattttatattgctgacaggctaacagttgggttgaatagatctgtatgtttatttttatgcatgtacatatttgtatgactacgtttatttcccatttaaaggtagaaaagacttatctttacaaagttttcaccccacccatttttggcttaaataaaagaagacaagtggttttttttttttttttttttagtgtagacagcccaggctggagtgtggtggcatgatcttggcccactgcaactgcaacctcggcctccagggttcaagcgattcttgtgccgcagcctcctgagtagctgggactacaggcgcctgccatcatgcctggctaattttttgtatttttagtagagacagggtttcgccacgttgsccacrctggtcttgaacttctgagctcaggtattctgcctgcctcagcctcccaaagtgctaggattgcaggcgtgagccaccacgcctggtaggagtacaaagtctttctaaggtgactgacaatttttggaatcaggttttacagattgagggaggtttttgtgtatattttgttgtctacatcatcacctgagattaacagtagctaataataacagcttttatttcttgagcacttttcttttttcttttttctttttttttttttttttgagacggagttttattctgttgcccaggctggagtacaatggcatgatctcggctcattgcaacctctgcctcccgggttcaagcagttctctctgcctcagcctcctgagtagctgggactacaggctactgccaccatgcctggctaatttttctatttttagtagagacggggtttcgccgtattggccaggttggtcttgaactcctgacctcagatgatctgcctgcctcagcctcccaaaagtgctggcattamaggcgtgagccaccgcaactggcctgtaatctcagctgcaactgagcacttttctgagccagacactgttccatgacctttacatgtattatttcatttcatctccacagtaaaccttgggaggatggtttcattattatcctcattttacagatgaggaaactgaggcacagagaagtaatttgcccaggttcacagagggagagccaggctctaacccagtgtttgactctaaaaccaggttttcctcagtattgacaaaaatgttttgtgaacctttctaccttcttgactacaaagtgataggatttatattttcatgggtaatagctgaaatgtatctttagctatcctaatcattatagtgtagcctatatggagaattaaatagcctctcaaatgtcaaagcaagcacattaaggaaggatctatgtagaaagaaaatgctaatagtgtgataactagtttgtttgttgatcctgtgcctgcattgactttcttgcaaaattcatatagttacagggaatgttgttatgtaatgaattgactagtagtagtttttccagctacggtcagttgatcaggtttctcttcttaagtgtttggaagatctgcagtttgggaagggaatagatacaggggagatctttgagcagatgcattgacatgtgtactcattgggaactatttcctccagtgrtgagcaacctgaagcctttctcagtgtagcttttcaagagtcctagatccaatttcatagacatcctttcagagcatgcacagcagaggtgaaatggaggagaagcgtgtagggcaaaactaccttcttcaaagaagggagaaactttgtagaatcactggttcctagacgcttgtgttttggccaggccctggccagcaaaggctagccaaaggcatgctttggaggagaggtagtatcaagtttttttagagtagaccgtgaaggtgccagaaactaaggtgcactgacagcttggtctatggggaacctggctgcattggttcaggtccccacttgtcccacttgcctggcctaaacacacccctggcacggagaaagaggatgagactcactgctggatccctagcacctggcccataacaggttttttgtgaaagttgtactgaatgaattgaaataattctagtccctggtctaccttctatagtttaagcagcaaaggggttgtagggacgtttaaagggagaatataagaacaaaagactagaacacactgcctctcttgccacctaaaaaagtcatgcaaatttctcactgtcattttattcagtgaagcaggaatctcactcttaagcctgtggaattcattaaatttgttttctttctgaataaaaataaatgggacccatagacatctttgtttttttccaaaccggcccttgtgcagagaaggttgttgttgctaattttagtccttgtratgtatggtggaatttattcatgtatttgcagataatactggactactggaaaatcaaactagtttgatcaaactagtttggggtatatcccaacacattgccaacacatgtttcttgggtgatgcattatgaatgcattatccaaggatttatctaatctttgtttgaggtggttgttactttcaggttcttagggtaatgagtttggaaagttgtaatttaagctgtacttcctttttcattcccaaaccatgacttttcttttttttaaataatagagacagggtctcactatgttggccaggttaatcttgaactcctggcctcaagcagtcctcctgctcagcctcccaaagttctcagattacaggcatgagccactgcacctaatagcagaatcaatctgctattgattcaatacattctcagaatcatagtccaaccttgttttggcatggttttatggggaattaaatgcatgagatctttacaagctgtgttactrtgtctctgtgtgtctttttgtaaacggttcttttcctgttcaaatatattttaaaacataacctttagaaatctacmtttgcaaacagaagtttgagaagtagcagcaatgtcacagagcctttagtcaatctaagtccttagytgatgtaagtcataatcattatgtgtcagctgcccataattgagctgaggagaacatttgaatcagtatgtttaacaacatagggaactaataattgttaaaggttatcagtagctattgataatacattaagtgataatgtataaatagtatttttaaagtgaggataaacactgaacattcagcattacagtaccttcacaagacatactggtagtaccttaattaaatcacatgtttttaggatgactcattttctggttgttggagactcttragggatctgctttcattcacaaaatagcatccacacattctttctttggtaagtctgaaatacaggttgattttaggtcagtgttccctgatatttttttcttttaagttattttattttaatttcagtttccttcaagtttacccttgcatttttttaacttgatagtgggatactttaaaatactaagccaattttctttatgaatctcattctttgaaacagcttttcactttgaagttaacactgaatttcaaattttacaatttctgcaatgtcaatatgtacgatttgaagcagttatctaactgaaatgttaggaaatttaaaacatgccatcatgctctcaattttagtaatttgcaggtataatattgatgtttcacagtatcattatatattgtttttatgccagatataaacattstcttatttccagcttaaagaatgtcccttcccccagggagcaactgtggtgggtggacccgggagttgagcagagtaacagtctcttttctaggcagggacttccagaattcatctgtgtagctgtgtcatttactcccatttgcacctttcaaatacttttcttgaagaagcagccctcatcccccaacatctaactaatttagtattatatttatttctcctaacaaattacatcgcctaaaattctgtgggccaggcgcagtggctcatgcctgtaatcccagccactttgggaggctgaagtgggcagatcacctgaggtcaggagtttgagacctgcctggccaacatggtgaaacactgtctctactgaaaatacaaaaattaggcgggtgtggtggcgagcgccggtaatcccagcttctctgttaataactctaaaatgaggaaaggaaaataccaattcttagctcatctgtgctttgatttagctctcaaaatcttgtttttgaaagtgatatcaaaagacagttttggggacagcaaaaggtgagggatatatcccaacacattgccatatttcttgggtgatgcattatgaatgcattatgaatgcatcacccaaggatttatctaatctttgtttgaggtggttgttactttcaggttcttaaggtaatgagtttggaaagttgtaatttaagctgtactttttcattcccaaaccatgacttttctattttttaaataatagagatgggktctcactatgttggccaggttagtcttgaactyctggcctcaagcagtcctcctgcctcaacctcccaaagttctcggattacaggcatgagccactgcacccagcccaaaccatgacttttaaatgtgtaggtttcctgtactggtattaagtggtatacagttaagtctatacctttcatagttgtattcatttccatcaggtcctcctaggctgaaatgtcctaattacactgtgggacctttcatgaaagtccttttgtttagttgtcctctgttcctttttgagttgctttgggtcttttcttgagatgtgacagttaggactttatgcttcatatagagaatcaacaattttgtgtttggatattgtagagtttaagaaccaatttctaatttccttcatgatgatcaaaactttgtggccgtcttgctgtgctggaattagatccctttttaaataaaaatgtctagaaatttttaatttttttagagacagggtcttgctctgccacccaggctggaatgtgggatagctcactgcagcctcgaactcctgggctcgggtgatcctcccgcctcagcctcctgagtagctaggattacatgtgggcaccaccacacctggctaatttttttacaacattttttatagagacagagtcttgctatgttgtccaggctggtctcaaacccctgggctcaagtgatcctcctctctgggccccccaaagtgctgggattacagacatgagccactgtgcctggcctggaaattaagtttcttttctaggtggtatctttaatcttttaaatattcttgtggttactttttgaagtgtatttccttctgctagtttagaccagcttttatgccgcctccctatattatgagatctttatgcagtttgtattactttattatgtgagagtttaaagttgtatgtgctacaggcatcatctttcagtcagactaagaccaagttactaatacaggtccttcccagtgacctatatataatcatttagaccagtgattctcaagctggctgtacagtagaatcamcagggggagatttaaagaatacctattccagggccccgccctaaccaattgagaccatctctgatgctcagggattagtattataaagctcctagatgatgataatgagcagccagcactgataaccctgaattagatttaagactgggaaatcaccagctgctagaacttctaaattggattagctctttagcttgtggaatgctggagaataattaccattagacagttcaaggaaatgtgtatcaaactttgcatttataagatagcacctgaatcaaattattccttacccaattctgagaattaaagcataaatgagctaacaattggaacttttagtttctcattctaaaacccttttccttatctgtttgattttgtgttggtgattgtctttttagagccgtaatatcctttgtctttagcaggaaatgaaatatgggtctgattatttatgcatactctgataccttttttttttcttttaagacacagtgaaagtgcctataggcttcagcagctgtgctttaaaacccaggcttgttcttgggctgagggagtgccttcattcttccatcttggaatgagtgactcatgctctgtgcaggcacacagtacttaatcacttgttttctgtgtaccaggaagaggagggcatatgaaaatagaagccatgtactgccaaatggatctgaaataagagtgaaaatgttgacctgatgggtcaaacaattgagcttattgcaaatacttatgacttagggtgtatgttgcattattatttcactaaaatttggcattatttcaaaaaggctatacttttgtaatttgtaagcaactcttttccttatagataacgttgatgatcttaaattttacaatttatttgtgaattttaaatttttctttttttgaatttgtatgccacattagagtataccttctgaaggaaagattagaaaacaatacatttgttggattagatcagttacatggttattctttgcagaaggatagtatgagcccgctggccattttctctgccattccagtgccttctgcccccagagtagccattaatatgatcagtaggatatctactactaagggcatttgctgcatatgcctggaataatactgtctacacatgtcctctgtacagacagactctttaatgccaacttgttttatttctttagtgaagagccacagattttaaatacacacacacacacacacacacacacattttgaagtgtcagctgtatgccaggcgctataccaggcagcgaagtcagagcagctcgacacaacacacacagtctcccttcttgtgtcagttacagtacctgcttcaggccttcctctattgttttgtgtttcttatctctatattagtatgagaagttttgtgtacctgctagagttttcaagataatataaaaatttcaggataatttaaattgcccaggccaggcatggtggctcatgcctgtaatcccagcattttgggaggctgacgtgggaggatcacttgagtccaggagtttgagaccaggctgggcaatatagatagaccttatctctactaagaaaaaaaaaaaaatgaggtgggcatcatggcgtgtgcctgtattcccagctacttgggaagctgaggtgagaggattgattgagtccagttggaggctgcagtgagttatgatcaagctgctgcacttcagtctgggtagcagagtgagaccttgtctcaaggggaaaaaaaaaattgcccagaagttttaggtgagtctttcattttgagcaaccatattctaatcatgtgtaatatttattgaaagataaatgcttttattattaaaagcacctgaaattaaaaatccaagctcattcctggtttgtataaaagaagaaaataaatacataaataaaagtgcctgcatagcaaagactgatattttggggctaacttcaaaaacaataaaaactttagatggtattcttattacacgtcaatgaaaacaagcaattggtaggaaaaacatttttattatttgatgcttattttttaaattttgttcaataactattgaatgagtgcctgttatgctggactgcaggtatgtagtggtaaactgtaaatagccatagaattaaataaactgatggagggattcagasttaatagtctgtctgtatttatttctttattttttttgagatagggtcttcatttgccacccaggctggagtgcagtggcgtgatcatgggtcactgcatccttgacctcctgggctcaggtgatcctcccactttagccttctaggtggctggaactacaggtgcctggctaattttttgtatttttttgtagagacggtgttttgccatgttgcccagactggtcttgaactcctgggctcaagcaatctgcctgtctcagcctcccaaagtgttggtttacaggtgtaagctaccacacccagtcagtagtctgtcttttcattggttagttgaaactgtttacatttattgtaactacacatgtattagaagttatttctaccttttatttatgttttccatttattatgcttttcttaatttttttccccctattttctattggataactgaaattttgtcaggtattgttgccattaaaatttacactttctatttatattcttctgtagtttccccagccttaggaccttgtacttactcacatatggaactggagtttaccagtatccatgtctttcccaagcatgtttttacctcccttgagattctgccttttctagattctccctctctcctgtgtatgtagcgggtgtgggggcagggcaggaagttggcagtcatgctcgatttaccatttggaccagaatttggttgttgggactgaatgctggatgcccagttttatgctgtatcagagctgcaggtcaatgtttcccattctgagaaaatagaattctggggcatatctaggcattaagatatttgcgtgaagcatttattactctgagaaggctttcaggaattatggtcctaccatgaggtttaataattgawaaatgtattgaagttgggttttttctttcatacttttttctttttttttgagacggagtttcactctttcgcccaggctggagtgcagtggtgccatcttggctcactgcaacctccgccttctggtttcaagtgattctcctgcctcagccttccgagtagctgggattacaggcacctgccaccacacccagctaatttttgtgtttttagtagagacagggtttcaccatgttggccaggctggtctcaaactcctgacctcatcatcctcctgcctcggcctcccaaagtgctgggattacaggcgcgagccactgtgcccggccccatacttttttctttgaagccatatgaagacccttaaattatggagaggttactgaatggtaggagcctggagttttaaatacatacacatttctcaacttgatgtgaaagttactaacatttattatgtgacggatgctgggcacttttcacataatcctcatgaaaacctgggactacaggtgtccggctaagttagatggaattctgtttacgaaggaggaaactgaagctgagaggggttcagagactgtagtagagctaggattcttcacccaggacaccaaatgcagactacatctatagcacatccaagtagctgaattctgtccagctttccagttctacagtcagccccaggtcacccttgcacattctttcctgtcacctggctctctggcttcaggccccttcatgttcatcctctacagatttgtcctgtgttctatctcaaatccaaatctgccctgctggaggaagcggctcctgaatttactacctgttgtcccgctgagtgggttcctgtttagttcttcagcctcattcttcctgctccctgtcttattctgcatggccagcagtaccaaactatttggagtcttctttgccttcagtggacatctgagtgtctgctatgtgttaagcagcctgctagaggccaacaacagctttttatttttatttattaattttaatttttattttttcttgaggtggagttttgctcttgtcacccaggctggagtgcagtggcgtgatcttggctcattgcaacctacgcctcctgggttcaagccgttctcttgcctcagcctcccaagtagctgggattacaggtgctcatcagcatgcctggctaatttttgtatttttagtagagacagggtttcaccatgttggccaggttggtctcaaattcctgacctcaggtgatgcacccacctcagccttccaaagtgttgggattacaggcgtgagccaccgtgcctggccattatttattttttttgagatggagtctcactctgttgccgattagtcagatctcagctcactgcaacctccgcctcccaggttcaagtgattctcccacctggtgctcccaagtagctgggattacaggtgcttgccaccacgcctggctaatttttgcatttttagtagagatggggtttcctcatgttggccagactggtctcgaactcctggcctcaagttcttcagcctcattctggtctcccaaaatgctgggtttacaggcatagagccactgcgcccggcccgacgacagctttttatttgttattttacttatttatttatttatttatttattttttgagacagagtctcrctctgttgtccaggctggagtgcagtggcgcgatctcagctcactgcaacctctgcctcccgggttcaagcaattctctgctttagtttcccgagtagctgggattacaggcactcgccaccatgcctggttaattttttttgtatttttagtagagacagggtttcaccatcttggccaggctggtcttgaactcctgacctcgtgatccacctgccttggcctcccaaagtgctggcattacaggcatgaggcactgcgcctggccagacaacagctttttaaatgatcaagatggtgaaggtcttggccctgggcaaggatagtagcagtaggggtcaagagaagtgaaagattcatcagttattgaggagatacctccaataggacttggcaagaaaaaaaggcattttggagtacctgggatgatggtggtgagctgaaagccccatacaaacatgagagaattgcaccagaaagaatctggtagagaaacttatggtgttagaaagagccctggtctggcttggtgcggtagctcacgcctgtaatcccagcactttgggaggctgaggtgggtggattacctgaggtcgcaagtttgagaccagtctgaccaacatggtgaaacctcgtctctactaaaaatacaaaattagcccggcgtggtggcacaggcctgttatcccagctasttgggaggctaaggcaagagaattgcttgaacccgggaggtggaggttgccatgagccgagatcgcgccattgcactccagcctgggcgacaagagtgaaactccatctggctaagaaaaaaagaaagaaagaaagagccctagtctgagagtgggaaagtgttttgatgttaacaagctgtgcagtgttgggcagttactttacctatgccagctttaatgtctttgtctcaaatagaccagatgagatgacttgacttttgccaccttaagtagtaaatccttccaacttgattctgtgatgactttagcttttgccactttaagtagtaaatccttccagcgtgattctgtgcaaatgatctgatttcaacttgcctcccccctttctacatcatatgtttacctatccatttgggagccttctgtgtaccatgcactgggaacagaagctcgaggagacaaggtctaagtgagcttcctcttcctcatgagttcctgttcagtcaaggagacaggcaagtcagtaatgacatgcactaaaccaaagtaagatgccgtgatgggaatatgcacagggtttaggggatccacacgagagagtctggtcagctctgctgggtgtgggtggagtggggaatgtgtccgggaagaggactgacccttgttctaagtctagaatgaagggcaggcagaagtgggtggggagtcggattccaggcccaggctgcacatagttcaggatgactgaaggctaggttgctgggggcggggggcgggggsggggatggaaaggactagcctatgcagggtctcacaagcctttccaaggartttggactttattcccaaggctgtgggaggtggacaggtagttagcaatattcatatttatccctttttaatgcctaatgtgtttctttcacaatattaatgttataccaactagactttagggcaaaaagtattatttgaaataaaaccagttattacgtcctgataagcagagcagttcaccaggaaaatataataatcttgagagatataaaaataaggaagaaaataaagcatgagattttaaaaagtaagacctctctcaaaaactaacaggtgaagcagtcagaaaaattagcaagtacgtagaggggttgaacaaaataattcacaaggctgtaccagaaacaaaagtttcattaaatatttctccatacactgtggtttttgttttctcttctattctgttttagtgctattaatgctgatctctttataagaaattgatttgatgacccactgatggattgactccccccctttttcttgacaacactgagttaaaaaatatacatgcatttcaagcacacatagaacacttgcaaattgacttgtcaaattcctttcccacacctagcctccagtgccccattatcctccatccttycccttgctaaaacaaagacgactttgactcctgtttttactgagtcaagggcataggatacacgcatctgcttctcttctccatttctgtgtttagcctttcatctttttttccagacttagaagaaaaaaatagtatcttctttcctttccaaggttagcttttatacctgtagcattttttttgtcatctgtcttcttttccttcttcatcatcttatctctttcttgtttttgttttattttgagatggagtctcgctctgtcccccaggctggagtgcagtggcaccatcagagctcactgcagcctcaaattcctgggctcaagtgatcctcctgcctcagcctcctgagtagctgggactacaggtgcgtgccgccacacctggttaatattttgtagaggcaggggatcttgctgtcttgcccaagctggtctcamacccctgacctcaagtaatcatcctgcttcagcctcgtaaaatgctgggattacaggcatgagccactgagcctagtccctcctctcgttcttaaatccagttatttcttcttgatcatctcatcatgaactcagtcttatgggtttaactggttttcattctcgactactaatgactattgtttttagtcattagaccacaacacagacatttttatagttttttttctwtttttttttaagtcgaaatcttattttcttgactggatgatgcatttacatggttcacaatgccaaagatggaaaagggtattgaatgaggaggttctcatcggcccttcctttcagctgctgtatacgctatcctttctgccatgctccctcttgttctttcccattcaggagagaataggtgtctcagtgagtgtcatctttgatttcccctctcccyatcctccacatagcttcttttgaggactttcatgttcatctcctcctgtggattcttcacccactaccagctcactccctaagctctttttctttttttgttttttgtttttaaatctttttttgttattttttcttttttttttctcgatctctttttttccatgacctttcatgtcatttcargccaagacttttgcagtaacccaagtgggtttcttactcccaatctccacctcttttcaaatactatttcatgaaacttttgtttctggtacttacatacatctatgagttcactaggtgttgatgtagaagtatctcttacaatggaccttctgaacgactgaaaacacgatttaacttttgggtaaggtttcctagttacatcaaccttgtgatgtaatccctggccgtaatcttattttacttatgttattatctgcttgccatggtctccaggaagctcaggctcattcctttttttttttttttttttttttgagatgaagcctcactctgttagccaggctggagtgcagtgtcgtgatctcggctcactgcaacctccacctcctgggttcaagcgattctcctgccttagcctcctgagtagctgggattacaggtatgcgctaccatgcccggctagtttttgtatttttagtagagatggggtttcaccatgttggtcagcctggtcttgaactcctgacctgtgatccgcccgccttggcctcccaaagtgctgggattacatgtgtgagccaccgtgcccgaccaggctcattactgtttattcaagtttttccacagttggccttagtttacttttctagcattatcaattcatatctccagtgtacctactggtcttctgttatttacactgtttgcttcattatttttgtatcatcttaacgtgatacagtgtctggttcctggcaagtacttgatatgtgtttctccaatgatgggacacataccagaacaaatcttgtacttttttgtctgctgtattatttttcttgctgctgtccttatgcctgatgcgccacttcttctacatgactctccgtgactgctttaactctgttttttccttccttttctgtattcctaaagcttatttgrtacccaagggwtagagtcctacaactgtggtctgttcatctaaggtcaaggtggtagggttctgggtagctggagctctttccttagcaggggcatctgtgttggcagatgttgagacatggtctgcctgatacagggattctggctcactatttggaaagaaatcagggtatctttattccactggcattagggttaagtagttaacaactaacagagatgaaatcagtaaatacggtaactgatactaaggaacagctttgtaagccaaaagatataaaaattaaaaactgaaaatatttgcaaacatgtcaaagagttgaagtccttaatgtgaaaggaacttgtaagtcaatgaaagatataaagaaaaattaggaggcatgaacaagaaaatcatagaagatgacatgacatataagcagccaaattttttttttttttttttgagacagagtcttgctctgtcgcccaggctgcagttgagtgcagtgatgtaatctcagctcacggcaacctctacttcccggattcaagcgattcttgtgcctcagcctcccaagtagctgggattataggcgtgtgccaacacgttcagctaatttttgtatttttagtagagatggggtttctccatgttggccaggstggtctcgaactcctgacctcaagtgatcctccygcctcggccttccgaagtgctgggattataggcatgagccaccatgcccggccataagcagccaattttataattaagtgtttaatcttatcagcaatagaaaggaaataaacatcatgttaggcaatagatgccagatgccatcaaattagcaaaattagataaattctaaatttttaactcaaaattattaattttttttttttgagacagaatcttgctctgtcccccaggctggagtgcagtggtatgatctcagttcactgcagcctccactcctggttcaagcaattctcatgcctcagcctcccaagaagctgggattacaggcacgcaccaccacgcccagctaattttttgtgtatttttagtagagatggggttttaccatgttggccaggctgaactcctggcctcaagcaatccacccagcttggcctcccaaagtgttggggttacaggcatgagccactgtgcctggccttgctttaaaaaaaaattttttttaattcaaaaaagaaattcatatgcttctggcagaaatctaacttggtatgtaacctttgtagcaaacaatttggtattatttgagaagtttacatttttaaggttttaacctattaatttaattcccaggaatctatccaaaagctattaattagagaggcaaatatttgcataatattcatcatttatcacagtgttttttatgatgggggaaaaacttcaaatcacttaaatgttttctttgaggaagtacttccttaagtggaaaattgtgtcaccatgaagttataatcttgaagaatattttaaagaagaaaatactcatgaaattttagaaaaactatgttagaaatgttagaaaaaattacttaaaaaactataatgtcatgggatccttagggtgttgcttttccacctggacacttctgtggccagtggcgattttgcctgagttttcctcgggtccactgggctttttccactgtcttggctcggcaagctgtgctgggcttgcactaccagcccggatcccatgcctgccaatggcaagccaggtgcggagtggcgagtggtgtatgagcgagcgtgcacggtccagacactatgcacagccaggtgtgccagccgtggcagggcaggcagctccaggcaccggtacaggcactggctttgtgcaaggctgtggctggaccaggtgtaccacaagcagtttctgctgcaggtactggggaatgcagtgatgcccggaagcttggagatgccaggaactgcagagccccactgtcacagccctggctcggagagcccctaggtctggtgttcccgaagggccgcagccctttcctccttgttgcccacaacctggtgagcagggggcgtgttttggtcctgtttgtgttacasctttttcagtcccaccattcaggggtcccgtgtccaggaagaatgaggtatgcaaggtatgtggacaactggagggggagcaaggcagagagcagcttcattgagccccagaagagctctcaggagacctgaagtgggtagctcctttttgcaggcaggtcatccaatgaggagacccgaagggggcagctccctcccgcagctggtggtctggacatctgtgagtctggctgagtccgggatttttaatgggctcagaatggaggaagtgtgtgctgattggtccatgggargccacggacggcctggagaaagcaccctgagttcttactccagctcacggactccacccggaacctgcagctcagaccccaggcttcaggttgtccctggcttgaaggtggggttttacctgtgatctgcccctttctggacrggaacctgtgtctgtctscctccactgcccaggctgtttgggctgaggggtgcctgcaggcccacttggagctgccctcacccctgctggcctctctcccacgcttatcggcacccgaagtccagagggggctgaggcggcagggagctggtgtgacagcagtgtccaagcctgtgcacacccgactcggtcgtgacggtccccaggctmggccacaacttgctctgcaccagagcaggtgctgggagcagggagagaggccagggagtgggagcaggcacttccgagcctgtggggaaagagggtcttcccgggtagctgagagtacaggaatgcccaggtctggagcctctgctggctgcagctgtgccaggagccccgccaacttggtagggggcagcgctcccgcttgttttctgccctgctggctccatggagggcgcagccctggccgcgcctccccggatgcatccagacaggctgcggctgccatcaataatgcttatttattagcgctgcagtttggtatgtatacaaacaaatgccctgaaatgtagctgaagaagttgtctctgggtggtgggataggtgatgattttttttctttgattttatagtacatgttatttaaaaatcactgccttactgattagttccacgtataatttctgaaggggacactgtaacagaaaggtttagagcaggggctaagcgtcaggctgacctggtttttggtagcagccttgatccgatccattgtatgacctgaccatgttttacttttctcagcatttgtttcctcatctgtaaagtgagactccttaaacttaactcagagttgtcaagattagaaatgataatgtattataatagcctttaaaaaataaatttcttattttgctttaattcttgcaataaaaacagtatcgcactgttgcctgggctggagtgccgtggtgcgatcttggctcgctgcaaccttyacctcctaggttcaagtgattctcctgcctcagcctcctgagtagctgggactacaggcgcgtgccaccatgcctggctaatttttgtagagatgaggtttcaccatgtgggccagctggtctcgaactcctgacctcaggcgatctaccctccccagcctcccaaagtgctgggattacaggcatgagccaccacgtccagccaaaaacaagtcaactttttttgccttccattgaatgtatcataacaaagacattcaagatgcaatagtcaaaactcaaatgaatttggaggctaaactattaagtgtataattactctgtgagttacagattgagtgtaagtttcactaaaataaattgtaaatgataataatgaaaatgtaattttaattttctgccaagacaaatattgttttcattcttgataatcttcacctgtcgaactaccacaaatgttacgtttattaccacgtatataaccttttgcaatctgggccacacaagagaataaaccctgtccttaggcatccgttgcatgtaatgaatttgcttctctcttgtgtgtctagaatggaaccagcttgtgtcatctaatttctcatatggaagaagtgagaaaactgtcacccaaaacaaatcactgttctgtggtttagatgaggaaccctgattgagatgcctggcacgtagaaggcactcaaacggaaacagttcctattgtatttgtcctggaagtcagataaaagagcagttgctttccggatttctttgtttggtataagcatcttcgggaaaatgtattttccagagtgtgatccagtaagtggacagctctgtggcaatttcttaggccctgtctttggatcctgtgctgtaggaccacacgcagctcctccgtttgtcctcttgtagtgtaatggccctgttcctccactgtagggcgccaaggtactgcttcctatctgggaagagttttctgaatgttactgctttccccttaactgtccgaagccttattgtatcccaagccttattcaggcctcacatttaatactttgtcacaaattgctttatggtaatgtattccatttggatattcatactgcttttttgggacattgattttttttcaatacactgctaaagatactgttttaatatattttctggtgaatgttttctcatcactgcttcctattttattttagctactgatctacttcttgcctggaatcccatttgtttggggttggtagaaggtgttattgggaaaattcaacttcattcaggtatgtttctataaactccttaaacttgtcaaatttattgtagcattttttggtgttttcctctttgaggatacatgagattctcttatagctttgattcctttgttttaattttgggtctgctcaaagtgggtgtataatgagcgaagacctgtttctactcttatggagcttacagtttaggaggaaagacaggtatcaaagagtaatcatggaaataaacgtatgattatttggaattgtggaaggtgccatgagggaaagatatagcaaatgcattgatctcaaaggagagtagtaggaataaagctggagaggcaggcaggtggcagaccatgactggttggctttatgtcagctgactgttcctgatgcagtcagctctgccagagacgagtatgggtctcttagcacacagtgtggtcctgtcagggatccctatccaggacaggcagattgatgggaagtccaggtcactcaccaggccctcacttggaatgacaggcacctgtgtcctcagtttaaagggaattttgttggtgggaaagtataacaggtattatacaggtgggtcccaaaaggctaactgaaaggggccaaatgaaattttattttttcttttttggtgccttacccttcagggagctttttaaaattagagatgggttcttgctacgttgcccagactggtctcaaactcctggcctccagcagttcccctgccytgggctcccaaagtcctgggattacaggcatgagccaccatgcctggcctaaatgaaatattttaagcactacatttaaataaatatttttcctttggtatcaattttgatgagttatgaattataggaggctttgccattatttctgtataattgtgagtatatatctttatagtgtgtcctttttatttaaaaataatattaagcatttgggagctagattgatttttgtgtattagaaataagcacgtatatctggaaaatctaattttcctttgctagattctttggttgtttttagaagtgtgtttttatcatgaaatattttacaaattcaaaaagctgtttatcgcagatgtgcggtaaggttgttttaaaatacacgcatgtatctaccacctaggttaagaaatgaaatatgggccaggcgcagtgactcatgcctgtaattccagaactttgggaggccgaggcaggtggatcatctgaggtcgggagtttgagactggcctgaccaacatggagaaaccctgtctctactaaaaataccaaaattatctgggcatggtggcgcatgcctgtaatcccagctattcgggaggctgaggcaggagaatcgcttgaacctgggagatggtggttgcagtgagccgagattgcgccattgcactccagcctgggcaacaggagtaaaactccatctcaaaaaaaaaaaaaaaaaagaaatgaaatatgaccaatgtgtttggagccatctctgtgccttttcccaaatgtttccaatttccttccccttaaaggaacctgctattttgaattttgtattcccttggttttcgtttttgcttttattatatakgtattcctaaagatgttgctaagggttgtattttggggattttatataaatgatattaagttgtttttgttctttcacttatttttatttatatttttgagatttatccatgcatgaaactgtagttccttattttcactgtttatgaatatattgtgatttgtcctttttcctctcactgggtaattgagttgtttctttttttttctttcttttttttttgctattagaactaatactgctatgagcattgttgtatattctgtatttggtaggtttttaaaaaaattctttcaacacagaggagaaaagcacttagtcgttgagtaaccatgtaaccaagtattttaataacagtctcctacctgtccacatttacctacatatatttttaattcatttacatgctgacaggataatttcacagctgggtgttctgagctaaaattcgttttctattatttaaatgacacgtatgaaacttttgagttatttttctcattttcagtcacatcttagcacagtgaataaatcactgcaatcagttaggagacctgaagacaagctgtatttatttagctttgagatataggagaagctgcctaacatctgtttcatgtatctcttgttatgtaacaagccagtcccaaaagttaatggcttaaaacaacaacagtgtatactttctcatgattctatgggttgacagagcagctctgctcttgtctgttgtgttggctggggtcattcacgtagcaacattcaccaggagtttgcctgggtggtcttagttctccttcacctggccccyctctccatgtctctcatctcacaatgcctgtcttgagtcctcctctctctcctggataacctggacgtcctttcagggtagtggctgggtgctgagaaggcagctaccagtgttcaagggcctgtatgtcttaagttgttacacaaggtaaaagaaactggtctcttcatttccatagggtactgtgagtcccgaatgagattattgtacctgcaagtgcttagtaaattgtaaatcactattttatcaaggctctttggttgcaaatacaaacctatcagcttaggcaaaaaaacacactttttaatgaagaacccaagggaccaaaaacaagaaagaaatggatgttgtacaggacccaggattactttattggggcagctggtctctgacaaactgcctctccctctatgtctcttttattcttctctctttttggctttctctgtttgtgtgtatgtaggttaaaatttctgcctttaaaatgacacccttagcctcaagccagctgacatctgatattccctgtaataactggaaactgacaagcagttaaaaaagattgagtagtgagtccacgttagacttctaggtaagagacttatttgcccatcttgggccaggggactcctggccagggtcacgtagatcagaccgtgctccagagtcccagtcccctaggtgggaggcagagcaggagggtttggacttggcagacagcccagaagctgtctcctacaaataatgtacaaatgtaagtttgttaatggttgatgagtttacgatacagtcaaagtatggtcatttaggaggcggtgaaggtatggtcatctgtggtcagccccctttatatgtacttctcctccttgccattctttggtcccaaaataggtgattgataggcagtgagaatacctgtgatgtaggatattttgaaagaagggagaggtggagggtagagtgaactggagaaagaaagtataaaaaaggaaaaaagggcagggaaattctcttaatttttcattctcctaatccttggacattttttttccttcttcttgtcacgtcacttgaacggtttggctcttaagaaaaagagtcgggaggaagcaaagggaaacacttttctgggcccctgctgcttttccctccctcccaaccctctccatgtcactctgcccccagccccttgcctgtgagcacccaccttacttactctcctcatctgtcctcagggatgcctcctcctctcctctccctgcccccgattaaagctcttgccctgggtcagattggctagaagggaggtatgtgcctgctgtgtgtgagaaagaattgagaaaattacttcaggggcattttccccaggaacatcttatctttggaggataggggatgaggggaataaaatgtctatactgaaactctctcctgtttccctcctacttattctccacatattaatgcacaaatttttcttctcacctagggagatgggaacataaatttatttgaacagatgtcattgacagtcttaaagtggcgtgggtgagcaatgccgctgttcctgactgtcactgaactctgagctctgtggaatgagcaagtgctcgtgacttaggaactgtattagtttgctgtcatagcaaagtgccaccagctgggtggcttaaacaacagaatcatattttctcacaattctggaacacagaagtctgaaatcaaggtgttggctgggttggttcctcccgaagcctctgtcctaggcttgtacatggccaccatccccttgtgtcttcacgtggtcttccctctgtaactgtgtgtgtctgtctaaatttcctcatcttgtaatgacatcagtcattttggattaaggcccactcaaataaactcactttaacctaattacccccttcgaagaccctgtctctaaatataatcatattctgaggtcctgggagttaggacttcagcatatgaattttaaggggaaacagtttagcccataacggaacataatgtccaccaaaatgcttcattacaaaagcatgtcaaaaagaattccttctagtctggtgtttctgtttcctgctgcttgtgctcatttcagtgtgataggccagtcctcaagtatcgttggctaggaacccactccagatgtggactaattctgaaagatcacacaattgcctcgaatcaggtgacctcatttaagcctcagttgccatctataagacaaagctcatggttccttgayacagttattgcgaagatttaataaaactcacataaagtgagttcttggtaataataagcatttcagccaggcgtggtggctcacgcctgtaatcctagcactttgggaggctgaggtgggcagatcatgaggtcaggagttcgaggccagcctgaccaacatggtgaaaccccatatctactagaaatacaaaaattagccaggtgtggtggcacacacctgtaatcccagctactcgggaggctgaggcaggagaattgcttgagcccaggaggcagaggttgcagtaagccaggatcgcaccactgcactccagcctgggtgacagagcaagactctgtctcaagaaaacaaacaaaacaaaacaaaaattcaatatatgctgattactattttttttccctcttaaagatcctcatagatatcagatattctactcaagaaccacttagattgtggctacacaattttgaacaaattttaaacatggactatttttctaatgttagtttttgctgaaactgtaataagaacaagtcacaggcccgacatggtgactcacgcctgtaatcccagcactttgggaggtcgaggcgggtggatygcttgaggtcaggagttcgagacaagcctggctaacatggtgaaaccccctctcaactaaaaatacaaaaattagctgggtgtggtggcgggcacctgtaatcccacctacccgggaggttgaggcaggataatcgcttgaacccaggaggtagatgttgcagtgagccaagatcgcaccactgcactccagcctgggctacagagcaagactctgtcaaaaaaacaaaacaaaacaaaacaaaaaaatagaacaagtcactaaaagactacattgtgaaaatgtataaaaagtaatgtttttggtaacaacacattagtagcgttagtgaaagttattttgtaatccacacatttcttttaaaaaatatatgatagaagaatttcaaactatttctgtgcgtgttatcctttgttgatgattgcctgcccttttagcaagctctgccacaaaaaaaaaaaaaaaaaaaaaaggttctatttgccctaatgcctagaaaatatctatttagaaccattagcctatttttgggttgcaagacctcttcctcagacatttgcaggcaggtggatttcagccagggtgtaatgtagtctgtcttccgacaactcaaacgtgtctgactttggtttgaccagttgagatttctttactttatttatttatttatttatttatttttgagacagagttttgttctgtcgcccaggctggagtgcagtggcacaatcttggcttactgcaacctcagcctcctgggttcaagcgattctcctgcctcagcctcctgagtagctgggattacaggcatgcgtcaccatgcctggcttatttttgtaattttagtggatttccccatgttggccagactggtctcgaactcctgacctcaggtgatcggcctgcctcagcctcccaaagtgctgggattacaggcatgagccaccatgcccgaccgagatttattaatatgaggaacagaaagtaggagggatgtgtaatgcatcaaataggtgaaagaaaagtatagatctgtgaaaaatcaacattaaaaaaattcattgtagtatccaggaggaaataaaaatggtagtcaaggccgggcatgtggtggctcacacctgtaatcctagcactttgggaggctgaggcaggtaggtcacttgaggtcaggaatttgagaccagcctgaccacatggtgaaaccccatctctactaaaaatacaaaaattagctggacactgtggcatgcgcctgtaatcccagccactcgggaggctgaggcatgagaattgcttgaacccgggaggtggatgctgcagtgagctgagatcttgccactgcactccagcctgggtgacagagtgagactccatctcaaaaaaaaagaatggtagtcaatttcatatcacaattgtaattacatattaattttttctttttcttttttgtctgtcttctcatggaaataacctccaagaagacagcaactggggccatgtctattctgcttacctgctgtgtctctgtgtgctggcccactgcagggcaattcagaaatattcagtgagtacttatggatttaacaagtatctatggagtacctactgtgtcccayggcctgtactcagtgctggggctgtaggttgaacaagctggggctgcaggtcgaagcttgtagaaacctagactcagaatctgagtgatagatgttaattactagtcacacagttttaccattaaaaatgtaatcatctgaagacaagtgtggggtgctgtggtgtgtatgacagaagagcctaactgggtggagctggtgctcctggatggaaagcatctcatatgggtggagctggtgctcctggatggaaagcatctcacacggacagggccaggggtgggagcggggaggccttgagaggagaggtagttcttggcggagtatgcagctgtgcaaaaggcccggttcttggcagagtacgcagctgtgcaaaaggcccacatgattgatgtgtttcttctcttcattttctgtgtaatgtctgggtatagtcatatcttcacacagacatccaggaaaagactgctttaggctggagatttaaaatagatcacaaaagctcttcaagttaaaatgtattttcaagattgagaagaggataagctcaattagggtaagaagtatctgaagataagcaaaaagattcattagtaaaggaatatatcccacgatatattcaggactagtttgaagagaaaattgtcaggagccttgattaatgtggcaatagaggctctttgtttagtaattaactgaattactactgatagtactgaacaatcctagacaaaaattcactcaagtaaatctcattcattaaaataatactcgccatctgctgttcctccacttttgtagtggtgacgatgtctcagtcattaagatggtaaagtgtgttatgcatatgattttaatactgattttagtcttctgtctatggagactttgctatggcactagtgacatgaaatattttacatattttagtggtaaatggagtgtcactagcattgttttagtgcatgccttaaaagccactggaaaccccactccttaagtacattggagagaaacaagagggtctgacagggtccctgtggagctctcatcctctgctggaggctgggtcatgggacaagccttttagttattgcttctgcttagatatgagtttgcctgtgtatatacaggcacgtaccaccgtgcccagctaatttttgtattttttaatagagacagggttttgccgtgttgctcaggctggtcttgaactcctgggctcaagcagtctacctgccttggcctttcaaagtgctgggattacacaggcatgagcactgtgcccagcctcagatacagtcatttttatgttcattttctcatgaggatctcagagttactgacttttagaggtaagatttactttttttttttgagacagagtcttgctcttgtagcccaggctggagtgcagtggcacaatcttggctcactgcaacctctgcctccttggtttaagcgattcttgtgcctcaccctaaggtggctaatttttttatttttagtagagacagggtttcatcatgttggccaggctggtctcgaacttctggcctcaagtgatctacctgcctcggcctcccaaagtcctgggattacaggcatgagtcaccacgcctggcctagaagtaagattttcattggtgaccagattcctggttaacccttagaagattctttaactataatttagctgacccattctcttaacagacttgagtcttggaagcaggcagctaagtggtgtgagaggattacattctccggtatcttctcattggttttgtttttgcttctctcctgttccttttcttctctcctcaggtacctagatgctgagtgcttcgtccttctctctttgctcccctcagcttgttgctacattttgtgcttcagaatttcccacctcccttgttcctagtcttgagcccgtctccttggtgcagatggttccacctcccgggtagaagtgatgcttgaagaagtcacatgaatgcgacccacagttctgagctccccagagtgtggttacacaagtatgcttcttattcctgagcatatctctaagtggcatggcagatatttatgttttcaggcagagagatacttgagaggcaggctagcgtgcctcatgctattccactctcattcctttttctagtcataaacccatttgttcttaaactccagttttcttcagtgatttcagtagcagccatattaaaggtttgttttctagcctcagaaagaggggaggaaagctgggtgcagtggcgcgtgcctgtagtcccagctacttgggaggctgaaggaagaaggactgcttgaggccaggagctcgaggctacagtgtgctatgatcatgcctgtgaatagacactgcactccagcctgggcaacctagtgagaccctgtctcttaaagaataaaaataagaaaaggaggattattaaggtaaaaatgactgtgtgggccacctatacaggtgctttctgtatttatttcctcctttgtattaccttttggactttttatcttactgaacatttaaaagtaattccagtcaaattattgtcaaagctaattgtgtttaagaaaggagattctcgataaatttgttaagttctcacttaggcttggccagtaacaaccattgacagcaaaaaatgaaggttatttaattgacttggatagcaggtctgttacagcccgtgggcttgattccctttgtgtacggaccaataacctccagccttgaagcatttttatgtcacttttcaaagcattaatttatctttatgatgattaacttgtattgtgagtaaaaatcctgattgtctttagtatgctggagtttagtggctaggaaagtattgaagctttcaataaacatataggaaaacattttagtactttagggggataagctgtagttgtctgaaaaatacatttttatrtagaaaatcattttgcccaacagtacttaataatttagacttttctagttttctaagtcttttctatttcttatagttacaagagtttatatttttttagagtataatagattatttcaaggttatttcattttatggcagatttatttagggatttaactacagtcttaagctttacaggctaagcagaatatacttctaattgcaccatttggtacttttgaaatagagcctattaaaaatgtctcttgctctagatgctctccctatgagtcattgtcagttttctataaaccgagacttaggaaactttagtaaggaacagagcaaccagtcaggaaacatggaatagctgctatgtttggaagatgaacaaattaatagttggctctttagtcactgagagcattagaagcctaatgtgatgtacttttagctattaggtacctgacgttgaacaaaccagcactggcgtggtggtagcattacttgtttttccatttacttgatgtgtgttgttccctgaaatataatcagggatatatggtgctctacttccattaggggggacaaaacatttctcttaatgtagttttttttttttttttaagacatggctttaaatgtaaaacagaaaaattcactaaacatactgtgaattcatatttttagttgaaatttaaattcatgcataaatgtgcataaaacctactttatagactcacgttctgttcacttaaaagtgctaaatagccaattaatagcttctgcagcagataccaatgaagtaggttttatgcacacttaggactcaatttacattcataccaaagatttgtaaataaaattggagcataattggagcataatatgccttggaataaactattaagatattttcctaattatttgtttctcttagcatgttaatatcatagttcagttgtcccttggtatgaagaggagggattggttccaggaccacccacgtataccaaaatccatgcatgctcaagtctcgaagttggccccgtagaacctccgtatatgaaaagttggctctctgtttatgtgggtttctcgttccacgaatactgtatttttcaatctgcatttgattggaaaaaatctccatgtaagtggacccttgcagttcaaacttgtgttgttcaagggtcaactgtgtataatagttctttgtctgtttgggctgctgtaacagaatgtcatggactgggtggcttgtaaacaacagaaatgtatttctgatggctctggaggctggacagcctaagatcaaagccccagaagatttgatgtctggtgaggggctgccttttattcatggatggcctcttctcactgagtcctcacatggcaggaggcgtgagggagctctcctgggtctcttttataagggcactaatcccatttgtgatgatgtagccctaataacctcatcatctaccaaaggccccacctcccaataccataatatgggggattaggatttcaacatacagtcacggtcctccctatctgtaggttccacatctgcagatggacaatattcaggagaaaaacccaataaaaataatattaacaactataaacagcatttatattgcattaggtattataagtaatctagagatgatttaaagtatacaggaggatgtgtataggtatatggaaatattaatactatgccattttacataagggacttgaacatttgaggattttggtatctatagggggttctagaatcaatcccctgcagttactgaggggtgactgtatgaatttgtgggcacataaacatttagcttataatattttgccctgtccccctaaatgtatgctcttctcatatgcaaaatacattcattataatcccaacattcttaaactcttaactcattccaccatcaactcttaaagtaaaaaatccgaagtctcgtttaaatatcatctaactcagatgtgggtgagactcaagatatgattcatcctgaggcaaattgctcttcagctgcaaacctgtgaaaccatacaagttatgtacttagaaaatacaatggtgggacagacttgggctagacatttccattttcaaaagagaaataggaaagaagaaagaggcagtggagccctagtaagtccaaactataagacaaactccttgagatcttaaggctcgagaataatcttcactgagtccatgttctgcacttcaggcccactgcggtagaggttctaccttccagacctgctgaggtgggggccctgcctccacggctctacccaggaagggttgtgcccctagggccctgctggttgttcctatcctcacggcatctggcagagaccatcttgcctgttgaataatgcagtccctgcctaccccttttgaaaccaaggaagcagccctgatgatctcttaatcacctttgggcttgttctgcctttgtcttgaagaatagtgcacattctctgccaaaaagctctatggtcctggcctgtaaaacccaggaagactgatagccatccttcattccttcccagttcattccctttcatctcacactggctgttctcctgctgaagtggcttaagtccatggttcacacccatattactctccttatcagagggacttgggcacacctgtagtgttttcccctgaacgggcctttttaaaaatttccatagtctggctagaacttttcaaatctttaagttctacttcatttttgcttaacaactctgtctttaagtcatagctctcttctcgcattttactataatcaggcaggaggaggcaaacttcatctttgacattttgcttagaaattgcctcaggtaaatatccaatttcactcttaagtcctcccttccacaaaatactagaacatgcacaaatttcaaccaagttctttgccactttataaccaggatcatctccatattgtccaataacacgttccttattttcatctgagacttcatcagaatgctcttcacggttcatgttttctactgacattctgctcaggattacttaggaattctctgagaagattgaggctttttctacagctcatctctcttctttctgagtcctcaccagaatcacctttaaaggttcacacagggcagtgtaggctttttctaatagtatgcacctccaaactcttycagcctctacccattacctggttccaaagctgcttccacatctttagatgtttgttatagcagcacccctgctgcttggtaccaaaatctcgattagggctttccagaaccaatagtgtatacgcgcgcatgtgcttgcatacacaggcgtgtgcacacacacacacacacaaacacacacmgttgacccttggacaacacaagtttaaactgtgtgggttcatgtatagtgtattttcttttgcctctgccacccctgagacctcaagaccaacccgttctcatccttcctcttcctcagcttacttaacatgaagataaggatgaagacctttataatgacccacttccacttaatgagtagtaaatacattttctcttccttatggttttctttttttttttttttgagatggagttccgctgttgttgcctaggccrgagtgcagtggtgcgacctcggctcactgcaacctccgcctcccgggttcaagcgattctcctacctcagcctcccaagtagctgggatttcaggcatgcgccaccatgcctggctaattttttgtatttttagtagatatggagtttcaccatgttggctggtcttgaactcctgacctcagctgatccgcctgtcttggcctcgcaaagtgctgtgattacaggtgtgagccaccacgcctggccccttgtggttttcttaataacattttcttttctctagcttactttatttattcatttatttatttattttttgagacagagtttccctcttgtcgcccagactggagtgcagtggcacgatctcagctcactgcaacctctgcctcctggattcaagcgattctcctgcctcaacctcccgagtaggtgggattacaggtgcctaccaccacgcccagctaatcttttgtgtttttcgtagagatggggtttcactatgttggtcaggctggtctcgaacccctgacctcaggtgatccacttgccttggcctcccaaagtgctgggattacaggtgtgagccaccgtgcccagcctagcttactttattgtaagaatacagtatataatacagcatacaaaatatgtgttaatcaactatttatgttattaagcttctaatcagtagtaggcttttcatagttaagttttgggggtgttaaaagttgtatgtggatattgtttttgtttttgagacagrgtcttgctttgtcacacaggctggagtgaagtggcgtgatctcagctcactacagcctcgactgcctaggttcaagcgactctcatgcttcagcctcttgagtagctgggactacaggtgcacgccatgatacctggctaatttttgtatttttttttttttttgtagagatggggttttgctatgttgcccagtctggtttctaactcctgagctcgggtcatccaactatctcggcctcccaaagtgctgggattacgggtgtgagccactgtgcccagccaaaagttgcatgtgcatggggagtcagcacccctaactcctgcattgttcaagggtaaactgtgtgtgtgtgtgtgtgtgtgtgtgtgtgtgtgtgtgtgtatagtgtatatatatactatatagatatacactatatactatatataaatactaattaatctctctgtatacactatatactatatatatatatatakatagagagasagacggagatttaacatctataccraaattattacttacagagatctgttatttaaagataattattataagggattggctcatgtgattatggaggctgccatctgcaatctggagaaccaggaaagctggtggtatagttccagtccaagcccaaaaactgagaatcaggggagtcagtgatgtaagtctcagttggaatccaagggcctgataaccaggagcactgatgtctgcaggcaggagaagatgatgtcccagcttagagagcaaggtagcccatcctctgcctttttgttctattctggccctcagtggattggatgatgcccacctgtattggtgagggcagtctttattcagtttaccaattcaaatgcaaatctcttctggaaataccctcagaaataatgttttactagcaatctggkcatcccttcccagtcaagttgacccacaaaattaaccatcacagggtcatttacggatatttcatacactttaaaaacgagatcaagaaaactagtcagaggttctgtttctgacaacagcagtatttgatgagataatggccaagaattttctaaaaccaactataaatacaagccacagattcaagaagtactttgaatccaaggaaaaaacataaagaaaaccacactcagttacctcatagtaaaactgatgaaaagtaaagacaaagaggatatcctaaaagcagccaaagaaaaaaatacacattaaattcaaaggcatgttaagcattgatagaaacaatggaagccagaagacaatggaatgacatcgtcaaagtgcctgtccagaattttataccttcagaaattaaaaataaagacattttgagacaaataaaaacagagaatttgtcaccaacagtctctgcattaaaagaaatactagagagggctgggcacagtggctcatacctgtaatcccaggattttgggaggccaaggctggcagatcacctgaggtcaggagttcaagactagcctggtccaacatggtaaaacactgtctctactaaaaatatgaaaattagccaggcgtggtgatgggagcctgcaatcccagctacttgggaggctgaggcaggagaattccttggacctgggaggcagaggttgcagtgagctgagatcatgccactgcactccagcctgggcaacagagtgagactctgtctccagaaaaaaaaaaaaaaaaaaaaaaaaacctagagagattttcaggcaaaaggaaaatgattccagatgggagcatggaggggtaggaagaaatgaagatcaatggaaaggggaaatagtaaatttaagtgaatttgtcatcatacatggggcttaactttaaatgtagaattaaaatacacaacaatagtagtaacaatggggagttagaggagttggtattctaagtcctttcactgtccagcagctggaaaagtacaaatttacattaggcttttgtaaattaggattcatgttatcccctacagtgtaaccactaacagaataataaaatattgtaaaaagctcataaaggagaaaagcagaataataatgatttaaaaacttaatccaaaagaaggcaagaaaaggtatgtatggaacaaatgggacaaatagtaagatgatagtttgattcctaaatatgtcagwcattacataacaaatgagtagacttaatgcttcaattaaaaaccaaagatgtttatactagaaaaacaataaaatccatctacatgcttactttcaagacaaatgccttagagatatgaatacagaaagtaaaagcatagaaactgtgtgaatattagcctaaygaaaactggtgtcactgtgctaatatcaaagtagactttaaggcaggaagtagagagaatcatttcaaaaataacaaaatgttcaagtcaccagaaagaatagtttgaaatttgtatgcatctaagtataaccttaaaaccaactatawatatwtwtaaaaagcaacgagtcatttggtttacattttttagtttagactgtcaatttgaaatgacagaggaacgtgagtattcctgttggcaatgttacagagaagaaaggaaaggcgagcagacttttccccttttcagattatctttttccttctttaccaacatgtctccatcctctgatgtatccagtgcaaatatagactcttctgtggmgttttgagcataatctgcagaagtccttcaagaaatgtttgtatttaaatattatgctacaaaagactttggagtatatagtatgcacctctgtctttgggttaatatttgttggtatgtcagtataattataaattcttgtcaagtgtggtggcacatacctgtagtcccagctagtagaggtctaaggtggatcacttgggcccaggagttctgggctggagtgagctatgctgattgggtgtctgcactaagtttgacatcaaatacggcagcctcttgggaggggagacgaccaggttgcctgaggaggagtgaactggcccagatcagaaatggagcaggtcagaactcccacgctgtgatcagtagtggggtygtgcctgtgaatagccactgcactccagcctggccaatataatgagatcctgtctcttaaaagggagagaaagaaaaggaaaaaaattatgaattctcctgtgctagctcctcaagtcataattgcacaaccgtgtgagtgttcaggctgatgggtgctctctgtttcaccatttcccagcctctctgtgactgttccagtggacctaggaaaggtaatctttgcctcaggaatgtagtgtgcagtattagagcatactaaaggaagtaaacacctgagactcattagtaaatgcaccttctcttcctttttacccttgttcctcacatgaatgtttatagagataaactggaaagtgtccaaaagagcggtgaaaatagaacctacaaaataaattatggttgtatgctgtgaacataagtcattttaagttctcaagtaaaattaaaaggactagtgccaagaatggtaactggttactttccatttctcctgttctccttatgtgagagaactaagaaagcagggtttggattaggtttaaagaatttccatggagtggggaatagtggtcaaagagaacttcagttttatctgtaatgtttaaactttcaaaaaatgggatatattaatatattccctatataatgttaataaaaataaaaatgattgctggacatgcattggtggattaaatgtatatcttttctgtatgtcaataggatggtgagccatgtctagaaatacgtagttgcagtaccccttagaggcaaggtcatgagtagggagtcggttaattttaaaaattttatttatatttatttactttttgagacagtgtctcactatgctgcccaggctggtctcaaactcctgagctccagtgatgctcctacctcagcctcctgagtagctgggactgcaggcacacaccaccggatctggcartgatgtttaattttttgtgttaacttgactgggaagggatgcccagaaagctggtacaaaatgatttctggtcatgtgtgtgagggtgtttccagaagatacttggcgttttgagttggtggaccgagtaaagaagacccattcttatcagtgtaggtgagcatcatcccgtctgttgagggccggaacagaagcaaaaaggaagtatgaattcactgtgtttgagccagggcatccatcttctcctgctcttggacatcagagctcctggttctcaagctttcggactcagattggggcttaaaccatcagcctcccagttctcaggccttcggacttggactgggacttttaccattgactcccctggacttggactgaattacaccacaggcttttctggttctccagcttgcagatggcagattgtgggactttttggcttctatagtcacatgagcaattccaataataaatctcctctcatttatatatcctcttagttctgtttctctagagaaccgtaatgcaggagaaaaatttttttttctaaagtggtatgaaaatctttatcctacagttgctcatctccttttaagtgagtcactttctaagtcaagcaattgaatcttttccaggactattgttttagcttgccctactggtcatgcttttcaagataatcacttcctaatcagtttttttwatcttgctggggaagtcaggtttccttgtctctcttttccaggaagaggcacggttacaaaattgactttttcccccattgtaatatgtttaaaaagttggaaagaaatctttatgccatcagaccttgctagattctattttttttattccttgttatactgtgtatatcctgatctcaaaatggtagctttaattgaaccaagtttcttttcctggtgggtaacaaataaatacatagcctgctttggtgcttttaaaaattgtactgtgaaattaggcctgatggataataggattgccaaacaatagtgacgctgtacttttacatttgtcttgttttaattctaagtataaaatgtagaaatcatttaaccctgtagctcaatatgcacattcctgccggacatctcaggctttttatgtggcagtggtggtgtattttgtttcacctaaggcaaaataattacaggagtagagattgctattattttctgtgaggtcttcttttgtttgttttattttctagagtgagtgtttttgcttggaaatagctcagtgttcagttcataatttttcttttcattgtgataattttgattatttccttgaacactattccagacacctacatcttttcactagtgttgatacatttcaagaattataggctgtcctatcctaacctccatttttggcagaaagtatacttttagttttttatcctcttcttaagactcctaacaagttcttttgttcttcagaaggagatttttttgaaaataaataaataaataaaaaacttgagatttaatttacataccataaaattaacccttttaaagtgtgcagttaagtggtttttagtagatttgcaaggttacgcaacatttaccactctctaattccagaacattttcggcatccaagaatgaaacctctcagatggccagttatttctcattacccctacaccagctcctggcaaccactaacctcagctcctaatctaccttctgtctctagggattttcctgttctcaatatttcacataaatgaaatcatacartatgtgcacctttgtgattgttttttttcacttagcacaatgtttttaaggattgtccatgttgaaacatgtatcagcacttcattcctttatagctgaataatattcccttgtatagatagactatgttttgtctgttccttcatcccttgatggatgtttgggttgtttccgcagaaggagcttttttttttaatttaaatttttaggtagtacaagtgcgtggtttaacaacaatgtaaatagtagtaaaagstattcagcgaagcctccctcactcctctgtccctatctgccctatttccactgcttcatccaacctagcaccatcattagtttattgtgaatcctctgagagtttctttatgcatttacaaacaaatacaattattatgcttatagtcttcattttcccagccttcccaagtstatagactacatttytaggagaggaacagattggataaagcatgtacacagtttgaattttgatgcatctccaacactaagtattacytttaacaaagagatttctttttgacagtctgatacaaagtgatcttcctattttatttcattattgctgagcttaattatatttttaatgtttatcatccatactccataaagtatggagatatatatatatatatatatatatatatatatatatatatattttttttttttttttttgagatggagtctcactctgttgctcaggctggagtgcagtggcgcgatctcggctcactgcaagctccrtctcccgggttcacacgccattctcctgcctcagcctccygagtagctgggactacgggtgcccgccaccacgccgggctaattttttgtattttttagtagagacagggtttcaccatgttagccaggatggtctggatctcctgacctcgtgatctgcctacctcggcctcccaaagtgctgggattacaggtgtgagccactgcacctgacctatctttttttactttggggacattacctttttcttttctacagattttattgaggaactgttgcacaaggggaaaagaaacctcagtccaggattgtgctcaattccagatatagtaaggacaagtggggatttacagcaaaagagtgtggtaggaatctgtggatggaaaattaccgagaggaaaacctattacctttttcttgttgattgatacagctctttctatttcgtaaatactaacctttagcatgccatgtgttgcaaataatttcctgtttgtcatttgcttttcattttgttcatagtgtgatttaccacccagatatgtttcatttttaatggaatcaagcctgttcattttatgacttctggattatgtatcatgcttccgaaggtccttctgctctgagatgataaagaatctgctatattttgttttgcttttatttttagcaattagctcatctacaattaattggggggcatggcttgcagtgggaatttaacttttttttcgtgtggagaaccaattatttcaacattgttttaatttttttttttgagatggaatctcgctctgtagcccaggctggagtgcagtggcgcaatcttggctcaccgcaacctccacctcccgggtcccggttcaagcaattctcctgcctcagcctcctgagtagctgggattataggcacgcaccaccatgcccagctaatttttgtattkttaatagagatggggtttcactgtgttggccaggatggtcttgaattcatgacctcgtgatccgcttgccttggcctcccaaagtgctgagattacaggtgtgagccactgcgcccagcctaatttttaaaaattattatcttttttgaaatagtgtcttactctgttgcccaggatggagtgcagtggcttgaattcagcttactgcaaccttcgcctcctggggtcatgcaattctcccatgtcagcctcctgagtagctgggactacagatgtgtgccaccatgccctgctaatttttgtattttttgtagagacagggtcttgctgtgttgcccaggctaggctcaaactcctggactcaagcagtccacccaccctggcctcccaaagtgctgggattacagacataagccacctctcccagcctgtttttcaaattttagtttcggggcgacatctgcaggtttgttacatgagtatattgcatgatgctgaggtttggtcttctgttgatcccgtcactcaaatagtgaacatactacccaatagacggttttctaacccttgcttccttcccactatcccccgtttcggaatctccagtgtttattgtttccatttattgagacaccattcttttcccttctttatcatcatttatgagatgctcatttttacataggtcgtgtctggcttctctattctagtgattcatttatcttttcctttacctagtatcaagttttaattaccatgcttttttaaatccccctcttgctctgtctccartgttgggtttcactctgtcccccatgctggagtacagtgatggaatcgtagctcactgacaacttcttgaacttctgagctcaatcagtcctcttgcctcagcctccaaagtagctggaattacaggtgcaggccaccacgcctggtgttaccatagttctgcctaggaagacaagtagtctcaatttcttttcaaaatctttactggatatttttacgcatttagtctttcaagtgaaatttaaaatatatttaaatttcctggccgggctcagtggctcatgcctataatcccagcactttgggaggccaaggtgggcagatcacaaggtcaagagatagagaccgtcctggctacatggtgaaaccccgtctctactaaaaataaaaaaattagctaggcatggtggcgtgcgcctgtagtctcagctactcgggaggctgaggagggagaattgcttgaacccgggaggcagaagttgcagtgagctgagatcacgccactgtactccagcctggcgacagagggagactcagtctccaaaaaaaaaaaaaaaaaaaactccctagaagtcccataagaattttgattgaaattgcattaaatttctatattaatttgagagataccaacaagtttgaaatgttgaacctgtgcatccaggctcatggtgctttcatgtatttattttctgtatgctctaaatgaaagttctgtggtgcttttcatgtagatattagacctttcttttattcatttgtttgttcgttttgtttttttttttctttctttcttgagactgggcctggctattttgcccaggctgatcttgaacccctgggctcaagcaatccctctgccttggcctcccaaagtgctggaagtaccactcccgacctagacatttcttaattggaattagtcccagaaactttattgctcctgttgctaatgttatgataccttttttctattacatatgcaagtggcctatattaatgcttttttgtatgtttttatttatatgtggccacatcagtggactcccatctattaatatattattggtttctcaaggtctgaaaaactgctaaatatataatattccatttccttacaatatgtatagttagtttttaaccttttatattacatctagagtccacgctttttccatgaggctgaggtttagcaaatgaaaaatatacagcatatagtaaaggctcgatgttagtttttttcctcactgtttcagtctaacacatagatcaaaaaataaaaaaaactaaactaagtaaaatttgtaaggaaatagatatctacacgtcataatctaagttctctaccttaatttctctcttctttggaaaatggtatgatgataggtggttggaatttttcttcactcagattctctttaggtttccttagggggaaaaatcaatcaaagaaaaattttatatatttgattatactagaatctaaaattttttttgcyatttatttctggaagaaactggattatcaaatataattcttttttctttttttgaggcagcatctctcattctgttgcccaggctggagtgcagtggtgtgatcatggctcactgcagcctcgacctctctcggctcaggtgatccttctactgtcagcctcctgagtagctggaactacagggttgctccactatgcttggctaatttttaaatggttttttttgtagagacagggtttccccatattgcccaggctggtcttgaactcctgggctgaagtgatccacctgctttggcctcccagagtgctgggattacaagcatgggccatggtgcccagcctcaaatagaattctaactcaggtttttaacccaaagcccatggggtttcttctttactttctagatttggaattcttttaaagacaagtacagagtcattggaaaaaaaaaagttgaacatcatagaagactgagtcattcattgataactgttgggcctaagtggtgggtggatttggtttgattatattgctctctctacttttatgtatgtttgaagatgtctaaaagggaagtttaaaaaaaatcctatcggccagttgcaagcctggggcacattatttgaatgtttcttagtttttcaactatagattggaaatggaatctgttagcagggtgtagtggtattaaaaatatagacataaattgcctggtgatacttatagtagatgttcagtaaacattaattcttaggaatagcatcatgaattatacaaattgttaatcctcatagccattctctgaagtaggcagctttatcccagttttcatatgagaaaactgagaattggagcwgctaagtattatgctttgaagtatacaagaagcaaatgatggagctaaaatttgagtccaatttctgacctcaaagtctaggacacttgaagcctccttgaaaaaggaaggctactattgacaaagctttgtttctgttacattatattttctcagatttaatcttcatcataactgcaaggcatattgaatatctgtaaccttttaaaaagaagcacatagatttttcacatttttgtatatgagtagttaactctaaaaaaatgtgtattttattttaaaatatatttgaatgtgtaagttgagtttaagtattggcaataccatgtttttgtgggaaaaaagatgcctcttggttttccaggtgagtttgtatatgagataaaacctgtgtttgaaagttaaaaattttatatttttggtactatacctttagatggtttattggaaagatactatatttgataatgtacattgtatttttgttattgaatttattaaaatcrtaatttgtaatgtcgatatgaaatgaatccagagcaaatcagggcaagaagatgtaaactaggaagggccttcctctgtgtgtgtgtgtgkatgtgtgtttgtgtgtgtgtgtgtgacccacagagagagagagaaagagaggtccttgagtcataaagatttcttgtttattttttttttagagacatagtcttgctctgtcatccaggctggagtacagtgatccagtcatagctcactgcagccttgaactcctgggctcaaatgatcctcccacctcagcctcctgagtagctgagactacaggcatgtaccaccatgcccagataacttgtgtatcttttgcagagatggggtttcgccatgttgcccaggctggtttcaaacttctgggcttaagcgatccacccacctcagcttcccagagtgctgggatttcaggcatgagccaccgcacctggcctcagctaatttttaaaaacaatttttaaagggctggtgccttgctgtgttgccaggctgtttttgaactcctggccttgagtgatcctcccttctcagccccccaaagtgctgggattacagggatgacccaccatgcctggcccaactctaaattgttcactgtaggatagaaatggccgggcgcagtggtgcacacctgtaatcccaagcagtttgagaggccaagtcgggcgcatcacaaggtcaggagttcgagaccagcctggccaatatggtgaaatcccgtccctactaaaataacaacaacaaaaaaacccacaaaaattagccaggcgtggtggcgggcgcctgtagtcccagcyacttgggaggctgagacaggagaactgcttaaacctgggaggcagaggttgcagtaagccgagattgcgccaccgcactgcagcctggcaacagcacgagactctgtctcaaaataaataaataaataaaataatataagttagaaattattcctgtgatgttaagagacctagtgtaaagatttctttttattcaacaaaatttattgacattgaacagtttattatctgttatgtgctttttaagaagatttacatgttaggtttgttaccaagcacctaaagggtaatgtttcacataacacctacaagatgcttggtaatgtccattcatgcctgatgaatttcctagcacatggtaggtcttcagttaatgtttaatgataatagggaaatggcctataaaagccttaaaactttggagtaaatttccaccctactttataaggaattatgaaatgtttccaaacttctgcatttatgaaacgcttaaagcatatctccaaagcaccatttctaaaatgaaagttgatcagtacttggggaataaatgagggaaatgaaaatattatatatcctttttatttttattatttatttatttatttttgaggcagggtctcactctcttgcccaggctggagttcagtggtgccgtctcggctcactgcaacctctgcctcccaagttcaagcaattctcatgcctcagcctcccgagtagctgggattacatacgtgcaccaccatgcccggctaatttttgttatttttagtagagacagaattttgccatgttggccaggctggtcttgaactcctggcctcatgtgatctgccctccctggcctcccaaagtgctaggattataggtgtgagccactgcacccagcctatatatcctttaaaaaaattgttttatatgggaaatatatggtgttatttttctataataaattcctgaaacacaatttcaataatttttggtttggggtctaattggggagtactttttaatggtgtagtctcataaactgaaaaattgatttgcatgctgtctttcatagactattttttgtttaattaaaaatctcttgtgagaagtagaaatttggattggaaagactgggtgtttgcttctttctgtcttgtgtttattaaaggtttctttaggttgttttgccattttccctccattctcctcattatatttagttctctgttcaatcctagtgtacacacaaagtagttggagaattaccaacccatactcttctgaaaaataaatttagtaaccagagtacagtagtgcatacggttctttttgtctttatttttaccaaatagttttctgaagttagttcagttagttttttcttctctatctcctacagtttagttctattcttaatttttaatagagttggatttgcagtttgaggttctcccacattctggttgatttgaactatttattttaayggatatgtgaaacattaccgttgttctaagagtcagaattctactcagagaccagtcatttgccagggcatactcagagaattgtcatttccccttcatctcttttatcctattcccrtccccctcttctctgtaccccgtttccacctactctgtggagataactaatctcactgacttctggttctctcctcttcttgtttttgtacaaatgggtggatacatatagttatgcatcacttaatgagaaatgcattgttgggcaatttcatctaaacatagaaatggtacagtaaaaatactgtacaaaagatatggtatgaaagataagaatggtacacctgtattgggcatttactatgaatggaacttgcggaaccagaagttgctctggatgagtcagtgagtgaatgtgaaggcctaggacattatcgtacactactatagactttataaacatcatacatgtaggcgacactgactttaaaatyttttctttcttttttaaaaatttttttgggtttttatttttatttttttatgagacgggatctttccttgtcacccaagctggagtgcagtgtcatgaccatggcttattgcagcatcaacctcccaggcttaagcgatcctcctacctcagcctcccgagtagctgggactacaggtgcgtgtcccaactcctggctaattctttaattttttgtagaaacgaggtctccatatgttacccaggctggtcttgaagtcctgggctcaagcaatcctcccactttgacctctcaaagtgctgcaattacaggcatgaatgagcctccatgccctgccagaagttctttcttcaatactaaattaaccttagcttactgtaacttttctactttataaactttttaatgttttaaaactttttgactcttctgtaataacacttaggttaaaacacaaacacattgtacagctgtgcaaaaatattttctttttacccttatttaactttttttataagtaggagtatacctaaaataatggtaaaaagtacagtatagcaaatakgtaaaccagtaacagtcatttattattatcaagtcttatgtatagatgtaattgtatgttgtatacttttctatcactagcagtgcagtaggtttataccagaatcacacaaatgtgaaatgtgtcatgctacatttatgatgtcactaygtgataggaatttttcagctccatgataattttaaggggccattactgcatatgtagctcatcgttgactgaaacatcattatgtggtatgtgactgtatagatatatatcacctcatattttcttccttacatgaagggtagtacactctaggtattcttttatgctttgatttaataatatattttattggctgggcacggtggctcatgcctataatcccagcactttgagaggccaaggctggcagattgcttgagcccagcagtttgagaccagcyggggcaacatggcaaaaccccatctcttaaaaaaaagtacaaaaattagctgggcatggtggtgtatgcctgtgttcccagctacattagaggctgagatgggaggtttgcttgagcccaggaggcagaggctgccatgagctgagattgcaccactgcactttagcctgggtgacagagtgagacccagtctcaaacaaaacaaaacatatatttattatgttattataacatagccttattatgtacagtcggccctgtgtatccattgagttctgtgtctgtggatctaaccaaccacacatggaaaatttttggaaaagatggttgcatctgtactggacatgtatagacttttctttctcatcattattgcttaaacaatacagtttaaaaactgtttaccatagcatttagattatatcaggtattgtaagcaatctagagattatttcaagtatatgagaggatgtgcataggttatatacaaatactacaccattttacatgagagacttgagcatccgtggagtttggtatccacggggggtcctggagccagtcccctgcagataccgagggatggctgtatgttaataatatattcaggttatctactaagtgcatccaggaatccttccttattaattcatagaatacttttttgtttttttacagctgcatagtactccattgcatggatgtgccatagtttattcaaccactgtcctgtatctggacattaggctgtttccagtgtttattgtaattataaaataggcttcagtgtatatactttggttgttgaggtgtaccctcagggtaaattcccaaagatgggatcactggactgattaaaggtaagtgcatttgttgtattgttaggtattgctaaatttccttccagaaaagttgtgtttgtcatcggtattctcacctgcacagctgttttgagttttctcacagtctcgccagcacatgtgttgtcattcttgttaattgttcccaatctgatgggtgagcatggtgtcacaactggttttaatttacatttctctaattatgagtgagattgaacatcttttcacatgtttaagggtcattttatgtctttgtgacatgttttactttaaaagtttattttggatgcacacttttttttttgttatcattgttaggttattcaccttcaacttgtcagaacagtagcactctaaaaacgccagactttattatgactctcctctttcagatcttccatggtggcttattctaattcggcagaaagcattggtgggcaaactcccaggagaccatgaggtctgtaaagttaccaaaattgctgtgctctcactttctgaaatggaacctcaggatcttgagctagaggtaggtgaaataaagggaaattatatggaaacctgatataaatgtaatagcaaatatgaggatttggttcagtagaccagaaacttacatttttagagctgggtaatgtttttaaaataatttaatcctaagattttccaacttagtagtggaactcttgtctcaaaatccatgaaatctagtgtagaagacacataaaggcagggctgctgtggtcgcagtagtgttgggggaatccctggggctctgtccacttgatctctcctgggaagccaccttctgtttccagggtgccctagggctctgcacagtacagtttgaaaacttcttagggaaaaggagtgagttaagaaaaggagagctcttattatatcctcttttgtctgcatttcttgaaaattttctaagcatatattactctattaaaatttacaaagaaagttttttaaaaggaagacagtcactcatctaatgtaatctctttattttccagagaagagctcaagtccacaagtagagtgatttaaggatggaataatgagattgtctagggctagtgttttttaccacaaggtgctgcctcctagtagaagtaacccatgaaagcatttatgtcctgtttgctcttagtatgggaattagatgcctagtaattgtcatcactccgattgttttgttcactatgtgatgtgccaggtgggccctgtgtattacatagatgataatatttagtccccaagacccccctatgaggtagacattactacaaataaaggaggctaggtgggtggytcctgtctttgacaggctgaggctggaggattgcttgagctgaggggttcgagaccagcctgggcaacatarccagaccttgtcttgtggaaaaaaaaaattaatgagtgaatggattttagaaaataaaataaaaacaaataaaggaggcctggcaagggttaagtcacacagctggcagaggtggggcctggatctagactcaggctgcctggtcctatataattctgctgagctgcygccctgttacctgaacatcaggtaacagcaaagcacacactgccccacaactcaacacatgtttttccatgtagagttcttggggaggaactttggggacagggttaaattgccttaagaataagtaaaaataaaactatttttatgcttcaaatgtcactggaagtttgacaattgaattttaagaaacaaaatgaatttaagtggactctgatattaattatttgttacaggaatcgaaaaaagtttggagttcttaattctccttttattggtacttatgctagaacactattcactattgctgatcgagagacaaaaaacctaggtggcaattaggcctattaaaagcagatgtttgcagtttttgtctgcattttttttgggtgaagagcagccagactagcaaaaattttgttagtttcctaagccagtaaatttgctggcagtgtcttttggatggttttgctgacacactgaaagatcaggatggcttgttatcacagacctttcccttgagggtgggcacccctttggcctggcattcaggtttgagcactaagactggggtctctggcagtttgatttagagatgggaaccagcccgcccagcactttatccatctgccagtcatgatttgcatatttggcactcccarttcttcggaaattaaatgtcacacatcatccagaaaaggttgggacctttgttaggcctttcagggaggtgttctgatgtccttcatggccaccaatctgtaacatttttgagactagtagctgactattcaataaaaagggaaaaaaccaagatggctttaggaactaacatttacatggagtctttaagggcaaaagtgtgaatattatcaaagctttaagagcttctttattcttcatactttcccttttttctctctcgatagtctaagggaaagagattatattcaaataaaaaggaagtgagatttcctccattgacataattatttttacagctgttgggctgtacagtataaactaccgtacttctcagggccagcgagatcgtggttcacgttaagagttgagtatacgtaacgactcttgctaattgggagtaaaagtaactacagagaaagtatttccaggtcctatctcagtgaatagtttggtacacctttctctcaagagattaaaattttagaaatttacacttttgccattttttctttccttttaatcctgttttatggtaaaggaactttgcaacagtgaacaacaggaagggcaaagaaccacatgttgaaaatcacaactttattatcttttaacatgttaatttaaatcttggtatctatttcaatttccatataactcaatttaaaagagtttttagaagcttaatcctttttaaattgttttttggttatacagtaaattgtaaaagagaagaaaaaaaattcctccacttggaaataattgttatcaatattctactgagttttggtgggtgtttccatttgtgcctaggctctttggaggaccagtgttactttcacatgtttcagaatagtttctctgttttgcacttttacatatttccctctagtcttattatttttttaagaacataggaagactttgttaaacaaaactacttatttctccttagtatgactttctgatttggatgtctgtgtatcagtttgaataatctgcatttattccagcagcatcctttaatgtggtcactgttcccagatttgctaaagcctaagtctgtgttctgtaattggagcagaagcaatcttatttcagagacgggtattaatagaatttctagttttctgcctctgttgtctttttatcgcaaatatatgccttatttgtttgccagttaaaaaaaattcacataccataattcaaataccttacagttcacccgtttaaagtatgtaagtcaatggtttttagtgtattcagagtcatgtggttatcaccacaatcaattttagaacctttcatcatcccccgaaaaaaccctgtcttcgttagcagccactcctcacttcctcccaaactccagctccccagcaccatgcaaccactaatctcctttctgtctctgtaaatatttgtctattctggacatctcatagaaacggaataatacaccacgtggccttttgtgatggacttctttcacctagcatagcttttaaggttcatgccagttgtagtgtgtagcagtactttattcttttttattgccagataatcccttgtatgggtatgtcatgttttatttatttgttcatcagttggtagacatttgagttgtttccaccttttagctattatgaataatgctattataagccattttgcatacaagttcttggtggtatatttgttttaatctctcttgggtgtgtacctagcaatggaattgctgggtcatatggtaactctatctaaccttttgtggaactgccagactgtttttttttttttttttttttggagacggagcctcgctctgtcgcccaggctggagtgcagtggcacgatctcggctcactgcaacctccgcctcccgggttcaaacgattctcctgcttcagtctcccgagtagctgggactacaggtgcatgccaccacacccgactcattttttgtatttttagcagagatggggtttcactgtgttagcctggttagatggtcttgatctcctgaccttgtgatccgcycgagagagagagagagagagagagagagagagagagagagagagagagagactgagactgactttgcctgtaatatcagcactttggcagggggccgaggtgggaggattgcttaaggccaggagttcgagaccagcctgggccacatagcaagaccctgtctctatgaaaaatttaaaaattagctgggcatatttgtgtgtacctgtagtcacaggtactcagraggctgaggcaggaggattacttgagtcctggagtttgaggctgcagtgagctgtgattgcaccacagcactctagcctagatggtggagtgagaccctgtctctaaaaaagaaaaattaaaaacctgtataagggtatgaagaatctgtaatggtttaaacaatgaggacwtagttgttgcttctttagaaaaaaaataccctttaaagttatataggcttatgttccatgtctgcatatcttatttgcgtatctcattgccttaatggataaccgcatcattttccgtatttagtttccatcagacacctgtttaaaattttagcttcagatggatgtaggtaccagcttttcacataaaattatttatgtcccttttcttaaatggcagcagcaacatcaacccttagtctcggtcacaagatgtaagttgcaagcgtaatttaaaaactagggaagtgctgtggagcttgtggctgtggtgttgtctttttgagatcgcgtgtttcagagttgtgataaggacctaaccacataccacacagaactggctgggcctctggaaaagggaaggtgatcctgttgccagtgctatgcattgtaatccctggggctctgtgtaaacaaaataccttaggactgggaaggaatcctaagaagtaattttctctatccctgttttttgtcaggactgaatttaaccttttcagaaaggtagtgctctatactttattttctaaagataactgtgtagcagattctaacatactcactggaaatgtttgcatttatagtaatctcatttatttgtttgagacagggtcttgctctgtcacacaggctggaatgcagtgacgcaatcatcctgccttcagccccccaagtggctgggattacaggcatgtgccaccaccccctgctaattttttttttttctattttttgaagagatggggtctcactrtattacccatgctggtcttgaatacctgggcttaagcaatctgcctacctttacctcccaaagtgctggggattataggtgtgagcccctgcacctggccagtaattttagatttttatttagaaaaaatcacttttaagagacagagaaaaccttccagtgaaggtgtttccatgagtttgaactttgttatacagatccacaatccttatctgaacttcttggggggccatatttgttttagaattcaagttttttggggttttcaaaaggttattccctgtattttctaccctctaaagtggttctggagcattaccccacgataaaacacattaatgtttcttaaacaatggtatgaatgttcatactaagggaggtaagtgatgattatcagtatcttcatatcagttcagggcatgctttgccattaaatgagtttttaacttaaaagatacacttycaggttttagagttttttggattttggaattgtacataaggaagttaagggatgatgggcttatattaactctgtttcaarcccaggatgagggtagataaaagaaataaaaatagaaaagaccaggtgtggtggctcaagcctgtaatcccaacactttgagaggccgaggcaagcagataacttgaggtcaggagttcaagaccagcctggccaacatggtgaaaccctgtctctactaaaaatacaaaacttagccaggcatgatggcatgtgcctcagctactcgggaggctaaggtggaagaaccgcttggatctgggaggcggaggttgcagcaagctgagatcgcgccattgcactctagcttgggtgacagagtgcgactctgtctcaaagaaggaaagaaggaaggaaggaaaggatagaaggaaggaaagggaagggggaggggaaggggaggaggaagggaggaaggcaggcaggcaggcaggaaggaaggaaatgccaagcttagagaataagcattttttaaagtagatcagactgaagccagaggcctttctgggtctgcatctagaagcagacagtagcaggtgggaatttggcccctacacagtaaagaggactaacagggcttcatgggagatgggatcctggggccatgcttagcacttgaggcctggtgctcaggtggaactccctagatcatgaggggagctgttagagtgtctgcactgagttggataatcctgcatagaacatctcctgtgtgccatgccagtagcatttccatgaagaaatactggtctgggcaaaagatagggatctgaatcaacaccatagcaatgggcatgaagtggttggggttgataggagagacttagagaaggagaatgatggaagatgattccaaggtttcttgcttaaatgatccagtgggtggtgcagtcattacctgaaatagggcataccagagaaggaacaatatttggggagcaggtgttgcgcagttctagagatgctgagtctgagggtctagtgtgtctcagtgtgggggagacgtcacatgcatcagtcttgagattaggggaaaagagtggagttagcaaaggtagtagtagttaaaattaggaaagaaggtgacattttctagatggagcatgaagackgagaagagagttaagggtagaacactgggaataccatcagttttagagaagaaagatacacccacaaaggagactgagaaggaacagccagagatggggaaggaccccgagagattgttgtcatggggaccagaggaagagacagcagggagtgttctttcattccgagagagttaggaggcctaagcagtgtcatcagagcctttactccttgacctgccccaatcagactatagtccttacagttccagtgcctgggctgggacactgtaccctgctggctctcagagtggattccatgtttgaggaatggatttaaaagaagattctcacttgtgtaaacatgtcacaaggtgctaggaagggggctattagaggttgggacaaaggaaaggggtgaatgatgagcccaggtcctaatcccagaaactaaccttgaagagaacaatggactcggtctttctgagtgaggaaaacctgggtgcagactaggtgtgctgttgcacatttacttgaaatagcggacctttgatagattcctggggggaaatttttgctggcttgagtgctcttaaagaatgattttgttggccgggcgcagtggctcacgcctataatcccagcacttygggaggccgaggcgggcagatcatgtgaggttgggagttcgagaccagcctgaccaacatggagaaaccgtgtctctactaaaaacacaatattagtcaggcatggtggtgcatgcctgtaatcccagctactcgggaggctgaggcaggagaattgtttgaacccaggagacggaggttgtggtgagccgaaactgcgccattacactccagcctgggcaacaagagcgaaactctgtctcaaaaaaaaaaaaaaagaatggctatgtctgtgtatcccgttttgaatactaaaattgtaacaatctgtagctcggttttgagcaagtaagcatgttttcaggtttttaaaagagttattcatatgactaatcactgatattttatataaaaattgctagccagcagttgccaagtgccacaagcaaagtagtagcaggagaccaaagggaaagcatctttttaaaactgctgctctgctgccccagtgatgctgtatcaaggagggtggggtgtgtacaatgtgttcatgggagaaggggagtgatggtcgtgaaagctccaatggcagctactgctaaggcactggaggtaggagtcaacaagacaaagatcctgcctcaacctctggttttggacatgttgagtttgagatgtctggtagacatcccagtggaaatgttgggatatgtgaggctggagttttgggagagagctgggctcgaaataaacatttgggaaggtggggttggcataaggacagtattggaatccatgagtctggatgaaatcactgagggagtgaatgcagatgagaaggggatgagggaccaaacgttggggcacctagacatcaagcaggaggctggaaaggaactgctcaaagcggcagaggaggagtgaccagtaggaaggagccaggtgaagccgtgtgttgtaggatgagggagggactcagacgctactgagagttaagaaccaagagcattggatttagcaaagtggaggtcattgagcatgcttcagacagcagcttgggagagtggtaggggtgaaagccaaatcggggggtggggtggggggcgagttggggagagaatgggaggagtggagctggaggtactgaggagtgcagagtgagtaagaggacagcagtggctgaggaagaggagtcgctcgggggtgtgcagaggagaggagcggaggaggatgggcctgtgtgctgacggaaacgatcacagaaagagggatgccatgtccataagcttggttctgtcttctctccttccgtgtcacctggaattcttgctagttttgcttatttgaagggaaataaagtgagctgttctggtaataggagtataaagcttttctccctcatctttagttcccttgtctttaatggtagggcaggagcagcttaaagctgtaatcatggtgtgaaacctgtgtggacagtttttgatagccatgattttgaaaaggcttgaaatcatctggagatcccattgcacatgaaaatttggtccagttattagtttctacttccaaatttgataaaacagggattctctctctctcaatcaaagcttaaactcgcttttcttctcactttatcttaatagttattttgtaacacactgatgataataagcatttagtaactattagttcttattaagagtctcctacttagtgtagcaatgcaactagtttgttgaaaaaatggaattggtctgcatattgttaacagaatttgtgtgtacatttcagaatatttgctttgtttgctgagctacatgaaattatatgtaaatccctcaactttaatcaggtagccttctttagaaccttctgtgccttctcttctcttaacatagccgtattcacgctcccacgcccttccttacccttgtcagctgtgcggcacttctcctgcagcccctaattactgcttcttcaagtttaactaatctccggacccaaagtgtatgttattaagctgatttcattagtgcatgtgagcgtaggaggagagggagtggttgaaatgtccagcttttagggctcccactagagcaggctcttaagccatcttctcaaccaaaacactcaattagcatcagtatttagcacggatacctgtaaagtcataaccctgaagcatagcaaatgtgcattttgcaatttttaaattcttagatactaatttccaaagcattaataacctcagccggaacatttcactcttcagttatgttagaagagaaccgattatgagcctaacctgaattttccacctctaaatcctaagtatatcctgccctgtattctttgtgttttatcctctgctatagctttctcatcatgggactcatagttgtgcttgccatcaattgtctacttgataatttttctaactcttgaagtttactgttaatcagaatgcctgagcagtagcattcacttttgcactcgaacatttaacaaacaggtattagtaataacaaatcatctttctcttcctatttagctctgtaagaagcatcattttggtattaacaaaccagagaagatcataccatctcctgatgactcaaagtttctactgaagacctttacgcatattaaatccaatgtgtctgctcctaataaaaagaaagtaagagtttaattgatataggctttgaattcacctttgattagttttaaatagagagataattctccactcagaaaatttatttttaaaccatttgttgtattgaagcaccatctccttatgcccttgggattattttcacttctgtcttagsaatttatgtgttatccccagactactttacatttaatttctgtagtaatagtagattaatttcttataggttaaggaaagtaaagagaaggagaagttggagaggagattacttgaagagttgctgaagatgttcatggactcagaatccttttattatagcttgacctatgacctgaccaattccgtgcagaggcagagcactggggagagggacggtcggcccctctggcagaaggtaccactcacagctcgtagagcagggtttgcmcttgggaagaagtgatgrcctgttttggcttttgtaggaaaactgaaataatgtgtttctgaactattgttcctgcaccttttctaggttgatgaccgatttttttggaataaatacatgatacaagatcttactgagattggtgtgagtagttgtttctaaaatttcctaaccgtaatgaaattggtctgtttgtttctaaaacgtctggttataattgttaagcaaatgttttttaattatattaagatacatttttaaagatcactacgttttcccctatggaatgggaatcatttagccaggaaaaccaaggcattattttaaggcagtttacaatttcactgcctcgtcacaggcctgtctttttagcacattcccataggataatggtaagttaaggctgtggaactcatgttcatagacttcctgcaaaagaggtattttctttctacccattgggaatgtttgagcccagttttcctgaaatggtaccagttttttttttttttttttttttaaccttcgccggacttctgttttctatctgggaattggaatagccaaatctctgaggccattgctgtactaccagtatttgatagggggaagatacagaatatgatgagattattgcaagaagttcctttggtttgatgattatttttttccttttcttggtcatgtatgttggaaaattgactgtctaaagacaattcattcaatcaacaaatatttatggaaggcctgttatgtgccacttgtcttttagacattaaacaaagcaggcaaataggtgaataaagtcatatgttatcttttaacctttcagaaatttcacaccttttccttttggtttctcccctttagtggtggttagtatcaatgattttcacataatctagtggtgtcttcgctagatacccatcaattgcctctatggagaatgaggcctgagattattcttacctctgtttgcaatgctgatcaaactgtgaccaccaaaacccagtggtagaggagaaaagcaggggcatctgtaatgagcatttgtcctgtgtgctgacaatatcgagctctaacatgttttgccgagtttttgtcagaatgcttttacattaccatttaaaactgacgacttgaagtcgtcatattcaaaggtgacatttggcagcataaatttctctatgcctgtcaagagttttgcatttattgctagaacagaaatacaaataatgggaatggtgataagaatgcaggtagatcctttacctcactattttcaactttagccaccttcctaagatcctatctgcaggctgcataaaacaaaacaaaacaaaacaaaacaaaacaaaacaaaacaaaactgagataggacctggagtgtttggtgatggaagaagaggtggatttgaagtggatgctgagattaaggctgggtacacttacggagataagagagaaaggacaaagaagaactctctggagcatttttatcctttactgtctctgcagataataagttgagaaatctgtcttcttagtctgaaagagacagaagaagaaatctttattttatttatttgttttttttgacacagtatctctctgtcacccaggctggagtgcagtggcacgatctcagcccactgcaacttcacctcccgggttcaagtgattctcctgtctcagcctcccaartagctgggattacagcttgcgccccaggcccagctaattttttgtatttttrgtagagacggggtttcaccatgttggccaggctggtctcagactcctggcctcaagtgaatagcccacctcagcctcctaaagtgctgggattacaggcattgatccactgcaactgaccagaagaagaaatctttaatcagtactctcctaattatgttggatgacattttatttttatttttattttttatgtttgcattttctttttttattgatcattcttgggtgtttctcgcagagggggatttggcagggtcacaggacaatagtggagggaaggtcagcagataaacaagtgaacaaaggtctctggttttcctaggcagaggaccctgcggccttccgcagtgtttgtgtccctgggtacttgagattagggagtggtgatgactcttaaagagcatgctgccttcaagcatctgtttaacaaagcacatcttgcaccgcccttaatccattcaaccctgagtggatacagcacatgtttcagagagcacagggttggggggtaaggtcacagatcaacaggatcccaaggcagaagaatttttcttagtgcagaacaaaatgaaaagtctcccacgtctacctctttctacacagacacggcaaccatccgatttctcaatcttttccccacctttcccccctttctattccacaaaaccgccattgtcatcatggcccgttctcaatgagctgttgggtacacctcccagacggggtggtggccgggcagaggggctcctcactttccagtaggggcggccgggcaaaggcgcccctcacctcccgtacggggcggctggccaggtggggggctgaccccccacctccctcccggacggggcggctggccaggcggggggctgaccccccacctccctcccggacggggcggctggccaggtgggggggctgacccccccacctccctcccggacggggcggctggccgggcggggggctgacccccccacctccctccctcccagaaggggcggctggccgggcgggggtctgaccccctccccacctccctcccggacggggcggctggccgggcggggggctgacccccccacctccctcccggatggggcggctggccgggcagaggggctcctcacttcccagtaggggtggccgggcagaggcgcccctcacttcccggatggggcggctggccgggcggggggctgacccccccacctccctcccggatggggcggctggccgggcggggggctgacccccccacctccctccctcccggacggggcggctggccgggcggggggctgacccccccacctccctcccagacggggcggctggccgggcagaggggctcctcacttcccagaaggggcagccgggcagaggcgcccctcacctcctggacggggcggctggccgggcggggggctgacccccctacctccctcgcggacgaggtggctgccaggcggagacgctcctcacttcccagacggggtggctgctgggcggaggggctcctcacttctcagacggggcggctgccaggcggaggggctcctcacttctcagatggggcggccgggcagagacgctcctcacatcccagacggggcggcagggcagaggtgctccccacctctcagacgatgggcggccgggcagagacgctcctcacttcccagatgtgatggcggctgggaagaggcgctcctcacttcctagatgggatggcggccgggcagagacgctcctcactttccagactgggcagccaggcagaggggctcctcacatcccagacgatgggtggccaggcggagacgctcctcacttcccagacggggtggcggccgggcagaggctgcaatctcggcactttgggaggccaaggcaggctgctgggaggtggaggttgtagccagccgagatcatgccactgcactccagcctgggcaccattgagcactgagtgaacgagactccgtctgcaatccyggcacctcgggaggccaaggctggcggatcactcgcggttaggagctggagaccagcccggccaacacggggaaaccccgtctccaccaaaaaaataygaaaaccagtcaggcgtggcggcgcgcgcctgcaatcgcaggcactcggcaggctgaggcaggagaatcaggcagggaggttgcagtgagccgagatggcagcagtaccgtccagcttcggctgggcatcagagggagaccgtggggagagggagagggggagggggagggggagagggagagggagagctggatgacattttaaaataagacatttatgaaatgggttttttctttttggtttcatttattacttagattttagcttcaggaattgagactttttttttctaagccagaaaataaagccgacctatgtgttttataataaagtgatcagagttggttgtattttattaaagccttaatacaattgggagttgagaatcataatcataaacatttgttaaatacttcccatatggcaggcactgtgctaaacactacgtgtattatccatttaattttcacaattcatgaagtagttgttactatttcacggagaaggacagcgacggcaagggtgactcccctcggtgagttaataaatggtgagcttggatttgtacccaggcagcctggctcttaggctgtgttcaccataaagaaaaggaaagacctcctctgtccgttccttacgtggtgttcttcaataagcagaaaatatggttgaataatggraggtttctgcttctaataaactgagaaatatgtgctgactactgtttgggtttaagaaagtagcagtgctgtacagaatagaaacgatatcatgttcattttgttttcagactccagatgtggacttttggattatccccatratccaaggttttgtgcagattgaagaacttgtggttaattataccgaatcatctgatgatgagaaaagcagcccagagaccccccctcaggagtccacctgtgtagatgatattcacccacgatttctagtggctctcatttcacgccgaagtaggcacagagcaggtgagtggagggctgtaatagcatkcaaatcaaatccaggcgagaatggaaaagctgcagatgtgttgaaatgctaatgacaataatggatttgggaacacagttggcttcaaagtgcttggggactctaaatactgtgatgtaattggggacaaatttttgaagaggggtgaataagagagagttagcaaaatgagaaggaaaaggaggtacatatatagagagaagggaaaaagtcacttgagatgtgcttcagaatactggcactccactgacagcctgtatcaccgtgataaatccttcctatgtgctagtgcctttgggaagacctttctctttcagttcagaggaactgagcttcaacttgttaaaaacaatgatgcatacagttacgattttgggtaagttgatactgttctgcttggcagttgcacactgaatccccaaggctatcctggaagacatacatttgattaggaagcataatctagccagactaaataaattttytaaaatrttgctgttttctgttttaattttctttcaggaatgcgctataaacgaagaggagtggataaaaatggaaatgttgccaattatgtggagactgagcagttgattcatgttcataatcataccctgtcatttgttcaaacacgaggctctgtgcctgtcttttggagccaggttgggtatcgatataacccaagaccgcggctggacagaagtaagcaggtcaattattgggtttgcaaatgatgatttcagagagaatagtttttaagaaattagttacctgttaggtttggatttgctttgccagatacttctttcaaaacgataacttgtatttgaaaaatgtaatagaaagtaatgtaataatcatagtaaaaatagttgactaagtcatttatttaacaataaaaaatttctctaacagtagagcaaaacggcttacctcagagattttaaattgctatcgctttgaagagtactttattgaatgtttaactttggaaaggagcgaatctagccaatatttgtagaagcaggaactatcttaagatggaatctaccaaaaatcaataagatgcctttactcaaatatttttctgtgaaagtttttttttttgttttgtttttcttttttaatcgaatattttgtttcttctagtattttaactttggtcttggaatagctaagtcatttaaatctaattagattactgaatgagcttgattttaaaaaaaatgktaaagtaaatttctctctcaacttagttggtattctttgtgagaattcagtaaagctttggtttttaaaatattgttttagaggggtttttattctcttataaactacgtgaaarcttttctgagaagtaggctrgatatataaataatcttataatgtcatagtttgcactttcagatatattttagtgtagtgtaactggaaaaaaaatcagatctttgacttagcatttcatttttaaatgatggttttagacaatcttagttcatttgggctgtcaataaattatttaaaagtaagaataaagatggagtagacactaatatgtcttaaacatgggaaggaaaaaaagattttgtatcacttctttgtaggtgaaaaggaaactgttgcctatttctgtgcccatttcgaagaacaactgaacatttacaaaaaacaggtgggctttgatttacagtagtaaaatgttccttcatctttagaaataactttttctttaagtttcataaaaataacattgtactattcaaaattaaagcatttgtcatgaagtttaacacatttaagctaagagttttcttaatattctttaagaataatcattgagtcagctactttttttttttttttttttttttttaaagagacactgtcttgctatattgcccaggctggactcaaactgctgggctcaagcaatcttctctcctcagcctcccgagtagctgggactgcaggcaygtgccactgtgcccggcagggtcagctactttagactgtgtttggatagcgtgaagaggttagattgctatcaattaattataacaatctaagaagcatctagaccaaggaatgaaagtcatgtctcagtaccacctacagttcaacctcctggagataacttgttatgtatttttcagtatgtttttttctctgctcaccttcatattcactcacatataagaatgcaagtgtataaaccaaaatcaactgaaaactggtaggtgagatacaagttcaatgattttgatacaagatgaatatataatagtaattctgttatccattagcagtgaccagtgtgaatgagtaatgccgtggaatgtgtaatgaataggtaaatgcatttttttttcagcaacaaaaatgaagtaggaagaaacagcctaaaataacatacaaaaagatagcatgtatatggaggaaaaaaaagaaaaaaactactgaagaacacaacagaaaacctgacttaagtggagagaaaataccatgttcctggaagggaagtctcaatattaaatagatttcagttcttcctaaattaatatataaattttgggcaatcacaaagtctcagcagggaaatagcaaaccctcaaattgaaaaaaaatatgaggtttgatgataagaattaaaaggggcgagtatttaggttttgaaataactctcacacattggttgaaggagcctaagttggtacagccattttgaaggtattatcaattaaattaaacatacttatactgcttagcccagtaattttaatttttgatatctatcctatataccctatacaaaaatcagttgagatggattatgaacctaaatgtgaaaggttaagcaataaaacttttagaagaaaaaatagacatctttttgacctggtgacttaaataggactttaaaaagcactaactattgtcttcccatgttttcaatgtattattatgtatcacatattttattagttgtttaatgagaggtaatgcccatctaggaaatagtttttatttttaaaaaacactctaatgaaaaaaatgataaattagactttaaattcgtttttattaaaactttactaaattataaatattaaaatactgttgtaaatattattaaaattttattaaaattatataggactttagaaaacaccatagtgaaaaaaacttgatacatttggctttattaaaataaaaaacttgtatttgttaagacacaagagaatggaaaggcagttcacaaagtggtagaagatatttaagatttttcagtgtatgtatgacaaaggtctcatatctagagtatatttaaaaatgcctgctgggcgtggtggctcacgcctgtaatcccagcactttgggaggccaacgtgggcggatcacgaggtcaggagtttgagaccaccctggtcagcatggtgaaaccctgtctctactgaaaaaaaaaaaaaaaaaattaaccaggcatggtggcttgtgcctgtaatcctagcttctcgggaggctgaggcaggagaattgcttgaacccaggaggcagaggttgcagtaagccaaggttgcgccactgcactcctggacgacagagtgagattccatctcaaaaaaaaaaaacaaaaaccaaaaaaacctaaaagtttattcaaaaggatgtacaacccaaaagagagctggacaaaagaggatatccagaaagtcagtagatgtatgcaaaagggctccacttcattagctgtcagggaaatgcaaattaaagccgctactcaacacaccagaatggctaacataaaaaagttaagaagcttaggtaacatggagaaatcctttctctactaaaaatacaaaaattagctgggcacggtgggatgcacctgtagtcccagctactcaggaggctgaagtgggagaatcacttgagcccaggaagcggaggttgcagtgagccaagatcataccactgtgctccagcaggtgacagagcaacactctgtctcaaaaaaaaaaaaaaaaaaaagtggagggataccaagttttgacaaggacatggagcaactagaactgtaatagaaaaaatttttaaatctgtctgagagaaacatattcagtcaaggaggcatgtacaagaacactcattgcagcatagaaacaacctaattgttcatcaggaggacaataggtgggaaaatcaggcatggcacatctaaagtattgaatataaatgatggaaaagaatgaggtagatccacgtgtactaatgggaagatcttaaaatcaccttgtggggtaagaagagaaaacttttaacagcgtatggtatgttagccatttaaaaaatcccacaaaacaaaattaggtcatttacatacagttggttctcttccatttattctatccacacacatatgacatgcatatttgtacagaaatgcatttatgtgggctgaatggggatacacccaactgataacaggagttacctccagggagggccataggattgggttgtggtcaggaaggatttgaccttattttacatttgaatttgtttcagtgtaaataaattcatgtattagcaatgtgtgtaattataagtagatataaagaatagagcctgtctgtacaaaaaaatttaaaaattagccaggcctggtggcacatggctgtagtcccagctacacaaaaggctgaagtgggagaatcacttgagcccagcaggtgaaggctgcagtgagccatgattgtgccactgcactccagcctgggtgatggagtgagactctgtctccaaaataagtaaataaataaaattaaaaaataaaaatmcaataatgaataaaccacattttaagtgtaacgtgcaattataaaacaaaacaatactaaggtgtgcaagcagaggaaataaccgcctcccacactcatcctgctccctgttgacattcacatcaattttctaggtgtgtgtattgagcagatacttcctgatttcgaacagtaccccaacagtgttcatttatccaccttttcctgggtaattactttccagggcgttgggcccacagtcggtctgactcagccatggtggtcccattgctgtcaccagtgattggttcaggcacggacctgtgtatgttcattggggatttagccaatgagataggtgatgtgggggaagtctcctgggaggcttctgggaacaggttttctgctctaataagagatacaggaaccaatagtccctctgtggttgctgtttctgggtttgatgtggaactgctacagctctctcaagactgtgaaggaaccagcctcaggatcagccgatatgctggcagaataaaaaagatgggaagaatggcagagtaaagggatggaaagaacctgtgtccttaatggtattgggaatcactattaagccatgttggaaccgtcctacctccagacttgttctgaggtatgagtcagttgactcaaatttgtcatccgcagcaaaaaaagccaccttgacacatgcatatacacaataaaaaactcaagtcaaaacaaaactatgccatatatactattgtgcagctgttttcatttaaggtctcatggctgctgtttaatcatttctctattggtggacctttaggatatactagttattttgctattataaagactccagaaaatatctttcttttttaaaaactccatggactaggaacagaacgcattttatatattttgggatacttgtatgttttatagaataaatttatggaaatgaaattgctggatcagacattatgtatatttaaatttgataccactctgttgcttctgaaaagatcacaccaggttttttaaaaaaaattgttttaaagcaacagtaggagctagtgcccatttcctcacatattgaccagtgcggtctgtgtttagtattcacgtttgcctaggtataggtgaaaactcattttctgttttaaattgcatttctttgagtattaaagttgtcatctcttcattgagtataggttcagaaattgtagtctcatgtttattagctatttgtatatttttttcatgtggattttctctgtatcctttaccatttttttccgtattggatttaggactctttatgcattattggtttttatgttgcaggtatattctcctaggtagcactttgctttcttacctttgcttatactgtcatttggtacacaggcttaaaattttttaaagttatgcttagaaagtcatgctccaacctacatttatagaagcattattctgagttttcttctagctctattatcattagaaaaactatttagattcttaatgcatctaaaatttatttgtgtataattaatgagatgtagggagctaatgtaagtttctccttaccccacacatagacatcccagtatcatttatagactagtccatatttgccccacagtggtatcatgagcatagcttagattcttcagtgtttacataggtctgcttctgggccaccattcctgttctgttgagtcacttagctatttctacgctagtatgacagttttaattgctacagatttagagtatgttttgctttccaatgggacaagtcccttttttattattagcttccaaattttttccacatatttactcttccagatgaacttttgagttgttaagttcattaacagatcctgattgaattttgattgggatggttgagtgtatagattaattgggggagacttgaaatctttacaatattgaatcttgctgcctagtaacatggtatatgtttctgttaattcaggttttctatcatatgctttatgtacttcagcagcattttatcatgttcagtatttaggctttctttatttctttttaaatctagatatctaaaatatttgctgttacaaaggaccttgttttcattatttcattctaattggttattgcaaatatatagaaaagctattaatgtcattgatgtcaattctcacaaacttaaatgtatgtaacaaatgaaaattttataggaaaaaaattgatgtttgagtggattaatttctaagtatggctataaaatatttctaacacataattccaaattattaaaaaccacactgtgattctaacatctaattaaattttaaaccacattgtgattctaaaatctaactaaattttttctgtttctttgctcttataggttattattaacttggtagaccaggcaggaagagagaagattattggcgatgcttacctgaagcaagtgttgcttttcaacaactcacacctcacttacgtttcgtttgacttccatgagcactggtaagatggctttcggagaatagtgttgatcaattgcagtgtttttggtagatgctgccacagggaccttagtttctcttctttgctgggaataaaaatttcttctcattgttggaaagaaaaagggtatcattcatttactttgttttaattttcatgtgggcattattttggctaaaatttagagttgattccaaaatatttacagtcgttctgttccagaagatcttggagatgtggagttccctttttgctttgatcacaccagctaaagaactgatggcattgcctttctgcttgggtctgagcctagcagaagtaatagaatttccttaagagtatcttgctggctcctcttcatgtctggtagtgatacttctttctcgatgggtaaacttcactagaggaaaacaacaacaatcagggcatcttttttttttttaaggacaggtctcactctgtcgcccaggctgaagtggagtgcggtggtgtgatctgggctcactgcaacctccactttctggcttcaagggattctcctgcctcagcctcccgagtagctgggactacggcacgctccactatgcccggctaacttctgtattttttgatagagatggggtttcaccatgttggccaggctggtctcaaactcctgacctcaagtcatccgcccaccttggcctcccaaagtactgggattacaggcatgagccaatgtgcccggcccagtgaatcattttgatggtgcctttaacgtgtgtattctgacagcaaggttcttttgccataatcctggttctaacttaggttaatttacctaagtattgaaatttggtggggaaagaagcttctgatgtctgtagtatgttttaatgtgtttttaagtatgctttatttcacaatgcagattagctataaacatttacctaattgcctatataatatatagtagtattaacctcatatatgtacagcaacaattctttttaatttttcgaagctacattaaatagcatatcttaagttttaaaaaaatctatgattaarttaaagattttttctttcttttggcatggattttagccgaggaatgaagtttgagaatgttcagacactaacagatgccatttatgacattattcttgatatgaagtggtgttggtaagtattttacaagaactcctttttacagactctgggatstgtaaaatagtaccactgagcattaaactgatagcagcatgcagagacagcatttttttttgttcgttttgcttcccagttcctattcttttcaagagaatgttgctgacccttaggcaggtggtgttagctttgaacagggagagggtrtgaaatggtcaggccaaatgaagtgaaacgctctgactgttctttaaggacatgaatttattccttctcatgccccacggtccacattttctctytctcctctttctcactgttcctaacacaggaaggaagtcttagaggtactttgtctcagttttcaggcatttcaaaattatcagagacggaaaatgattctgagtacaggaggtttaaattggcttaaaggacagaagagaacatttgattagatgttaagactacacgggtggccagagaaattagatgagcaagccatgctgtgtgcctcctcactggggggtaaaataacttcgtctgttttggagagtttaggtgcatttctactttaaaggaacaacggtgttttaaagtgccttctgtttttttacatgtaggaaaacataacttgggatgatgtcagctctgcctagtagttataggacttggcaagtctctctgcaccccagtttttttttttccttaagatgaggataatatcttccttgctatgttattgtgtaaattaacaatgatgtctataaatgactcaataatgcatagcatataaagatacaccaagcaaattacagccagtgctgctgttttattgatatactttaaagaattgtgtcttttgaaaaccctattattttatatwgtaaaataattctgtattatttttaaaaagggttgatgaagctggggtaatatgtaagcaggaagggrtttttcgtgttaattgtatggactgcctggatcgcaccaacgtggtccaagctgccatcgcgagagtggtcatggaacagcaggtaatttggagtctgttggattgcaaatattcatttcgaaatgctttttttttccatgagtaagcaaatagctaaatatttttcaaatgtcaaatattctttacaacatttacaatatacaaacacccttgttgcattaaaatctggaaagcacaacctgcactgaaaatcagttaaataaagtgagattttcttaatcactcatttcaaaaatgtgacggccaacrttttaaagtccattgggtggcattgtgtggtcatttaccttttccctctcacctccaagcccacccttctgtgtttggggctggragtcttgatactgcatttcttttttttttttttgagatgcagtcttgctctgttgcccaggctgttggggagggagctgctgacgggaggaacacaggtgaaggagcctgtgtctttttcttcctcctgtctcatgggcttccttgagtgcctcctattggcagatccagcaggccaagcagaaatgtggtgtgtaggctgggcgcagtggctcatgcctataatccaagcactttgggaggctgaggtgggtggatcacctgaggtcaggagtttgagaccagcctggccaaaatggcgagaccccctgtctactaaaatcccgtccctactagctgggcgtggtggccgtcatctgtaatccccgctactcgggaggctaaggcatgaaaatcacttgaacccaggaggcggaggttgtagtgagcccagatcgtgccactgcactctagcttgggagatagagtaagactctatcttcaaaataaaaataaaaataaaaaaataaaatacataaaataaccttgtgactgtactttgaggacacgaatctgtttatcttatgtacagtgtttaagcagccaggtttgagtttaagccctggctctaccacatacaaggttttgactctgtacaaagaacttaacctttccaaacctcagtctcataatttgtaaaatgtaggtgataacagtatcaattacatagtggtgttaggactagtgaatgtgaaaaaactgtgtaaaaaagctcttagaaccctagccttggcacagagttaacatttactaggcacttaactattctgccactattagtattgtttctgtgtgcttttttgatattcagtttcacttcataggcaaatttaaaacaaagacaaaatataatagtatgatcctgcacattaaaaattgtaccaaaacagtataaatatttcattatatttattcaacttgtagcaatttataaagccatctttcaagcacyactttattaaaaatgagtctgaaaagaccatttctcttatttaagggtcctaaattgtatatgaatatgtttcctttttctgcagtacacattttttgctatggtttcctggcccatatacagttaatccaccaatgtgttcattttagctgaaaaaattaggtgtgatgcccccggaacagccattacctgtgaaatgtaatcgcatctaccagataatgtgggccaataatggtgactccattagcagacagtatgctgggacagctgctctgaaggtaaatacttgcaggaagcatctgtgggtcattatgtaggacacagcttagactatggtttaaaaccacagaaatgtgtgtgggttccagattgcagatgtgtgtagttgactcttttctgaaatggttggctaagsmagggccaggtaatgtgactcaagcaggccacacwttacatcagagggagagggggctgtgtgggcctgaggaggagtgtgtgctctctctggaggggcctatgttgccagaccctccagtttttcaagggattctggaaatccagaattttatatgaaatggttggttttcaaaactgacaaaacagagcatgtctgctggcaggttttggccaccagtgtcatacttcatctttgagtttgaatcccaaccctgcttcttaactagctgtgaccttgggcaagtcacttaaccactctcatttgtcacacaggaattatactagacctatttcaaaagactgttatgggatcatatgagtcaatgcatgtaagggcttagaatattctctgacacacgtaaatgcggaagaaatgttttagttactgttaaaagtaaagtcctttgaagatcctatagagctagtcctcatagaatattaagttaaatataaaatatattctctagtaaataaattactcagtctgagggcgttgtcctctgtggcagtaggaagtgttagaatttgtttaaattaggtttatgttaatcattcttcaaggttctagttcatctcaaggtacttcttacacagattgtaccatcaaggacttaacaagcatcagtccttcttttgcattgagtgataaatatcaaaagctttttattaattacagaaagtaaactttggaagtcctggtaaagaccaggtacagtggctcaaccctgtaatcccagcactttaggaggctgaggcrggtggatcacctgaggtcaggcattcaagaccagcctggccaacaaggtgaaaccctgtctctacaaaaatataaaaattagctgggcatggtggcgtgcgcctgtaatcccagctactcactcagatggctgaggtgtgagaatcacttgaacccgggaggcagaggttgcagtragccgagattgtgccattgcactccagcctgggcgacagagcgagactctgtctcaaaaaaaaaaaaaaaaaaaaagcctggttcaagttagtgattaaagagaaatacttctcttttttgccccttgattttaaacttcttcgggatgagtattataccttttttctgtaatagagacttgttgctctactaatattccctgagactgacctaattggcagcatgttcttcctaaattgtcggtttttggactgagatttctgagattgccttggagagaaatagaggggttgggatggggaaaaagagactacaccttccttgccttaagtttaagtcaccacttctctagggacttgctctgacatctttgttgtgaaaagcgcaagggaaacaaaacagtttaagttgtcactgggttgttctacaggtgctggtgatgtgcagcaaggtaaggaaactcctgcttttcctccctgtgtagagctgctcatctgcacacccaggctaaaagcccattgtgatcaactctagggaactagccacattttcccatgtcagaaacatcggtttttgaatattacaccagtttgagatgtaaataatttttattgttttggtgtttgtcatataatttgttttgacctgtaaattctagaaattctacaaattgccaagaatggctttaccctaaagcaccatctaactgtgaagacttgatgccacaaatagcatttgacaagcttagatcagggtagaatactagtagatattttaatttaactatactatttgaaaattatagaagtcagaccttggaaattataaaagcctgtagaattctagacttgaactgaaagcccacaatttattttgggggcattcttgtgtttaaataagatgtcaaaatcagtttttgtttgacagggtgactttacaaggacaggagaaaggaagttagcaggagttatgaaagatggagtgaactcagcaaacagatattacctcaaccgatttaaggatgcttataggcaagctgttataggtaagaagcagaaaagcttttctttcctcaaaatttatgtcttctgtgactaatattttacagaaaccagcttcattaacataattcatattttgtaatatacttgtgtttctgtatygagcatcttacccaatatatcaaattcaaatttttacaagattagaatttgacaaatatttttggctggagcaacaaaagaaaccatctattttycatgcatatttgtcagtttattactcaggtaatagaaagcagggtttgaagctcctggagtgtggaataaggtgccctaaaacctcaacaattaaaaacttcatattccgtttgttttctcattactcaaggctgagcaatgtaaccagattatttttcctgtatattatttgttctgtgttcttgctgtggacaaatataccarccttttccataagcatggtttatcagaatattagggtaccagatttagagattaccctaaccaactcatcatttttttggaagaggaaatggaaggatagattgcccagtagaatgtatgcattgacattttaaaaatttaatactcatgaagatgttactgtataggattaaagtaaatgcagagtgttctggattagaaccaaatgtaacatagctgacctgtggtccctgagggtctttttgaaatcttatttcttcacctgatgatttagtgcacacatcagactagtagggcctagacacaggccacttaggaatttgagaagtctgatgtgaagatgtttgacttatttgccagacatggagggtgcatgctgtgactacagaattggattttagcagttgatattcaaggaaaaaagaagatatcttacttccattcgttgacctagctactcagttatatcactgaggacctcagttctgtcctctcagttcagccatccacagcatcagctgcatccagatcctgaagctggctgagagatcttcaaggttgagagatagaagccagtagcaatctgtgcttgtctctttcctgtgtagggccagtggttggcaggtcttctttcgctgaagcctcctcgagtgtcattgtcccatgagacaatgagatagggaggaataactccatagggaatgggattataatgatttattaaggctgcgccgcatgccccaccaagaggaagttagcttgtctgttcagatctttgctcattttacaattgccttatctttttattattgatttataccagatagatgaattgtaaatattttctcctgttctaggggttatcttttcacttttgtgatgktgccctttgaaacacagtttttaatttttatgatgtccagtttgtctgttttttcttcttttattgcttatgattttagtgtsatatcttaaaaatcatgcctaatccaaggttacaaagatttatgcttgtgttttcttccaagagctttacagttttaggtcttacattctcttttgttttttaaaaatatattagtaaactaaaatgatgatagatattaacaattccaccctagatttgatgcaaggcattccagtgacagaagatctttattccatatttaccaaggagaaagaacatgaagctttgcataaggaaaatcagagaagccaccaggaactaattagccagctcttacaaagttacatgaagttactactgcctgatgatgagaagttccatgggggctgggccctcattgactgtgaccctaggtgagttggagtggtgtccaggtgaccagcttgcttaacygatgttgggaagttgtcatgattaacactggcagttgtccctaaagctgtgggcatggatgcatggcgcgtgactatttcctctatgagctggtagtgaggcaagctgactgaggcacttgccttggatgcaaaattaagggggttctaaaaacttggtaatgaagaaaaatattttagtgcagtatttgattaaacaaaattcaaattgccaaactacagcctgcagctggctgtgggttccccactccctgccctagaatctaggtttattgtattaatgcacataagtgagtgcaacaagaggtgtagtgaggctgggtatttttattggttataaagtggtcctggccttttataaaataaataggtcaactaatattcttttttttttttttttaacaaaaaccggtttcaagtggttcttcaaaatatcaatgaatagtgggatctaaatttatccactagattgaatgcttgcctttaggctgaaatctaaaatcataatctttaatattataaatcagagacattttgggaaattgtagcccaagctttaagaataaagcactctagttctattttatctcatacgttttgtgtgtttttagtaagaggggcataaaatgtgcttgaaagtacaattaaagatagtatttatgtattaaaaggaataaaaaacgttgactgtggattcatagggaaacatcccatgatattaatctcatggatttttttcactttgatagtaaatactgttatgtatggatataatatgtggactttaaaaataagagatgaattttcctcacacacaacctagcagaaggtttttgtgtttgtttaagccatttggtaaagctattttgattcatgtccttcacttgtatttttagtggcagcaatccaacttaatatagcaccaaaaaaaaaaaaaagagtacttttacttcccattcagaaataactgctggcagcacacctgcattttccttgagttttaactgcacttagatttttaagagggtatcaatatcatgattgtcaatatcatctttcttcagtcaagtgtttttgtgtctactttgggataatcaaaattgggaaaaaccaaaaggtttatttctagtgttggctacgattttgtagggtcacattacacttgatgatttgatttccaattctgtaatttttatggaaaattggtaccctggggtgaagagtattagaaaatgtaaagtgtatatagctttgctatttaaagtttgcaacaaagtctgggtaaggatgctttaagagtcattagaagcctcttgcaaagattcataaaaacatacttatttctggcaattatattaataaaaataatgaataatggtgtggtggcttgcacctataaccccagcactttgggaggccaaggcaagaggatcatttgagtccaggagtttgagacctcatctctacaaaaaaattttaaaattagcctggtattgtggtgcacagctatgatcccagctactcgggaggctgaggtgagaggaactcaagagcccaggcatttgaggctgcagtgagccatgactgcagcactgaacaccagcctgggtgacagagtgagaccctgtctcaaaaaaaacaaaacaaaacaaacaaaaaaactcaaaaaaacactatggtgaaacaagaatagtcttctaggattaggtctttaaatcactggctgggcacagtagctcacacctgtaatcccagtgcttggggacgctgagtttggagggtcacttgaggccagcagttcaagaccagcctggrcaatgtagtgagacactgtctcttaaaaaaagtcaccattgggtgattagagtctcaaatcttttaagtcctcagctaccaaatatctgcctcagaaatgacattgtgcttcagttttcttttcttcattaacatgatgaaatgcttctctttttttttcctgatttttgactcccacctctgtccagtgcccagtaaatgcatcctatttttctttaatccagcactatagaatttgacttcccgataacagggagccagtgagtatcttctgttcatcttctttaattaaagttcctagggccgggcacggtggctcacgcctgtaatcccagcactttggaaggctgaggcgggcagatcacaaggtcaggagttcgagaccagcctgaccaacatggagaaacctcgtctctactaaaaataaaattagctgggcatggtggtgcgtgcctgtagtctcagctacttgggaggcctaggcaggtgaattgcttgaacccggcaggcggaggttgcagtgagccgagatcacaccattgcaccccaacctaggtgacagagtgaggctccatctcaaaataaataaataaataaataaataaataataaaagttcccaatgaagaataacttaccatgagtcacacgtaacttatcatcagtcacacgtaacttaccatcagtgacacgtgttagacagcaagggccagtgcatccttcctgtttctcattgctgcctttgggctgtacagctgaggagttcttccccaaaaagcagctgcccactctccttcatgacaagtgaagctgaaacacacgcattcagtgcgttatcaggttttcagcacatggggctacccctaaagatgacccagatagtctcacatggcatgatggacaatgaaacctttaagttcattttgtttaatccttattgctgctttgcctttagatgctaacctggtccagggcttgcagctgccccactgtgggtctcaggctgagctttctgctgagtttgccttttagttgtatgtttgtttcttgtttcttctactttttttgtttttttttggacagcgtctcgctctgtcgcccaggctggagtgcagtggcgcgatctcggctcactgcaagttccgcctcctgggttcacgccattcttctgcctcagcctcctgagtagctgggactataggcacctgacaccacgcccggctaattttttgtatttttartagagatggcgtttcaccstgttagccaggatggtctcgatctcctgacctcgtgatccacccgcttcggcctcccaaagtgctgggattacaggtgtgaaccactgtgcccagccctctacttctttattgttttgggatagcttccaytgggggcctctaagtctcccaattactttccaatttgttgtcggattccctgactctcttgctcagatgttgctaaacagtgttttttcctctgattctttcttagatggtcagttgccaagagtgattgtgagagtattctttacctgtgttacgtgccagagcctccactgccatccttatcttcttccttgtggtcattggtatccaaaatagacccgtcagagtcactggctcagtgattccctttgatcttcatcctttgggacactgaaagattctgaagatcttcccatcaatgtaggaatcattagctgaggtgctgtctttcctgatgtattgttggttgtgaaaatgttgtcttctctgatgtgtaaaccagtgtctgatgcagagtggttctgtctgttggctcttcagtccagagaagctgacttgggtctaaggcagagatgggcaggggagctccatcactaaccaggacagcaggagtgtctgagggaatgacgtgttaattgtcaagaggaggaggtagaacacaggacacaagggtcactgacttgtggaatttgtgtgtggtctgctctttggagacaggcatggctgctaaattttgagactctccactctgttccggaaagatctcctctaaagctcaccacgccagactgattgcatctcacaatggttgaggtgttggccgcttgctagattttccttgctgttggtggtccccgtggttaacgttttgctagaaacttgttcctttgaaggttggggacaggatgaggtggatgtaggagctagtgaagccaatactttggagccaacagcttctcaggtcatgttttccttgttggcttgcgtagcaggatgaggcctgcctaccaggagtcttggtatttttctaatggaaggcacttaatgtccctgtggctggctccactgtgagccccttttggagagccaggtggtttaggggtttaggctggggcacaggaggagctagctggaggaggtggagcaggggctggctctcagaatggttttcaagtgttttcttttcttctagaggtgatgctttttcaaatagagaactgttaccttcttcctacattttcctcttccgtggattatggattactcttggtggacagcggatgtcatgtgctgtttgagttttcaaagtaactattgcgtttccatctagattacagaattctttattaactcctctttgtacaggcatgtctttgtcttgtgggtgtgattcttgctaataatactgctgagatttctttgaatttgccaccgatatttttcttccacttactgcaaggcttaaagattttcctagtggtgctctgttcccctttctcttgatgagagatttggaaacctgctcttgggccgagtttgctatagaacctctgtacagtccatcagctcagctggagatgttgacccagaacagaggctcctggtggaggacaagaggtggccctggaagtggaagtggggttgcgggtctctggagagccaggcagcggaaggctcagctcccagacytggggacttgctctcactgcctgcctgaaccatccactcctggaatatgtgtgtgtgtttaaacagttttattgagacatataattcatataccatataattcacctatttaaaatatataattcagtggtttgtagtatattcagagttgtgcagccatcaccatggtcaattttaggacattttcatcaccacaaagagaagcccygtactttttagctgtcacttccttaccctccacactaccatccctaagcaaccactaatctacttcgtctctgcatttgcgtattctagacatttcattcaagtggaataatataatacgtggccttttgtgactggctgctttcagttagcataatgttttccaggttaatccatgttgtggcatgtgtcagaacttcattcctttttgtagctgaatagtatttcattatagaccacattttgttcattcttctcttgatgggcatttgggttatttccacattttaaccattgtaagtagtgctgctatgaacatttgtgtacaggttttcatttgaacacctgtctctattaaatagttcttttgggtggaaatggccagattatctgataatcctgtttaacttttgagaaactgccaaactrttttctacagtggccacgccgttttacgtttccaccagcaatgtatttcagtacattccagtttggagggttccaatatctccaatctttgccaacacttattttcctttttttctaaatgcagtcatcctacttagtgtgaagtggtatctcattgtggttttgatttgcatttccctgatgacaaacgatgttaaggattttttttttgtacttgttggctatttctgtgtcttagttggaaaaacatgtattcaaacgctttgccaagtttttaattgggttgttgatttgtaaataaagttttgttgggaacagggttgggattagggtcaagtgagtgaggtacgattatgcaactacagggatgtattctatcttaaatgtttgatgctttgtccatcatatttatcatatttttgcattaattttgattttaaaaaatattgcaccaattgtcttgttgacaaaattaatgacaccctttaaaatctgtaccagagaccagtacctcactcacctcactgcagtcccagctgcgtttaaatatctggtggaaaaacaggcaagcattctggaaatgcgcagtcccagcagggaagtaggcctggctgcggggtcgcggcctagggcattggtcgccggatacagagaactagaaaccgggaactgtccagcacgcccgtgcctgtcctggcccttctcccatgcaaggctgagcgcagctctgtccgggctaccttagacagactccatcgtggccagggccgacctctctgcctttcttgtcctttcccgcccgttatcgcaggaaacccccgactctatcgacagcgggaaagaggctctgagactggagaggaaaccacggacctgcagggcccgcctcgcctctccgctaagccaagtggtgttcccaacttgcttcgacttgcttccgtgcgctcaggtcgcctgcccggtccagcagtggtaatggagtggccaggcacgcggcagccactgtctcttaggcatgcgatggcctaggggccagacgctcggtgcagtaccctcgcccggcccgccagcgcccccctccagccgcaggcactgtccctgacgaaggcgaaggcgccagcgaactctcgcgggagtggccaccctggcgcccctcccccgccgggccggggtctgtgccctcgttggtaggcgtaggatgcgcaggatggagcgcgcatgcgcactggccgccagccgaggacggaagtgggcgtccggaagctagacgtgtcccctgggcgtgacttggcactgccgcgtcgcagttgccgcattcgccgcattcgctgcaggcgcgaggttgggtgcaggcagctgtttgagcctcgaggcatcgacggacggacagacggacggactgactgacgatgccgcgctctcacaggcctccgcctaccgcgcagcgggctgccactgccgcagcagccgagcccaagtctgagggcgttgtggctatgactttcaagatttttctcctttttgcagggcttatggttaaagttcctgtggggttatatttttcctgcaaattacttcttttccaaagtctgatgttgatgtcccctgaagacagcggcttttatgcgaccattgttgcagtggtcgggcttcatgtggtgctggcaattttcgtcttcatagtgtggaaggagggcttgccccagtggcgggaaaacaaaaacgaatagagcagcttcttcagagctgcagacgtggggggtggggaaatacctaaagggtttttgtcttgtttcttgttcgtattgaacgtgctttttttttttttttttttttttttaaaggggaagggtgggtggggagggaattaaatatttactgcagctaagacttcagtaaaattgggggtggggggagggttgacattttccgactgcctgttacgtgccaagtgctttttgttaaggacataatgtttttgactggggatcatgtttggctgatgtaaatattaatgccaaaataggagctaggatgaaagtaacactgtaattagtagtagaatttatttcatattaaaatgtgtcatgacgtaatttttatggcttggctcaagcaacaattytcagagtgcacgtaagtatcaacgcgtaaaacttaacattttacagtgttatttggtattattctctatgaagctgtctggatcggtctccttttcccattggttaattggttaatgctcagattttggctcctagaatcgatctgtgtgttcccggtcttggcatctcattatgtcatttgctgtattttttgatatattattgtacgtgcaaattgaggtgaatttgttgttttagattaagactgttggactcaagctacaacgaggtgtctctgatgtaaaaaactgcagtttaagattatggtaaatccttccctgcagtacctgttaaacaatgacctcattcttacgcagatttaataaattttttttccactattattttctgcttgttattagtagcattttgataaggtctagggaataggtatgaaatcccaagggagaaatgtcggctttcttacagtggaatttggagaccagcataagaatgcagaaacatctctcttttgctggaaaggctattattgttagattaatattagactaaaagtttcaccttaattcagattctgcctgtgttgttaattatttgtagattttatactttaagaattttcttattggtaattttacaaggatgtacattttactgtagttttggtttcatggttcatgaacactacctggattctaattcttrttttcatcattgattttagaatgggtataaatatggcaaaatggaataaggaagtgtttgtttattgaaagccaaataatctataatgacaaaaatgcaaaagtagcttggacttgttccatttttgcacataaatactgtattaatgtaaaagtctttcaaaagatgccttccacatgaatgtaaagatatcctgaatgtatagtgtgttattttgaagattagataatgtgagatagtttagatgatttctcccttctcactctcacrtatttctttcttcttcccttaactgcttctctatcatcctccaataccaccagtcccccacctcaaattatcccatttcctgagggactccttcctcctttggctgcctttctctacgctccatccctcacttcccacatctgcttttccttgttttttaaagactgtccaaatggatagattgtattacatctaactgcagtagaactcattgattaccttcttcttttccctccccctggccaattttttgtcctaagtagctctgctgtagaaatatgcttggcaaaaaatgcagatggaaatgaaaatacttaatctcctgtgtcatatttgtttagcctcattgatgctactcacagagacgtggatgtgctgttactgctttctaactctgcctactacgtggcctagtaagttgcttattgatttaaaggttttgattttgttttttaaacttgagtaaattttctttttagaattcgtaacaaaaaaatgtgagaatatggttttgttatgtattttatgaaacttcattgaacccctttaccttatataactgttacgtcattctaacttccttttatctttatcggtttgaaagcaagattttacagttaaattagtatgtttatgttatagtgtattcttttggcatttggtgttatttcctatatatttcccaggttttgatgtattccatacgtttttatcactaatgaccacgtatcattgtttgcattactatagtgaagtttttcctcactgttaggtattaaattacttacaattttttgttactaccaatgatgcagttgtctttatgcaataacgtgtgtgtgtgtgtgtgtgtgtgtkcatgtgcctgygcacttctttggttacaagggtatgatgaattatgacttttgtggtttgttgtcagattgatctccagaaagactctcaatgaacagtgctagtagcaaaatacaagcacctgtttcctcacaccttaccagaattgttctaatttgtatttactaagtaaatattcaatttatttttggctttgtgtaaactattgttttttagtcatttgcccagatgcctgttggcatatatcatatggatttttcattctcgattttggatatcagatttaacagctgtattgttcccaaatacatagtttgtttctctttctgtctttctccctcctctctctctctccctcccttcatctctgcctccctccgtctcttgctctgtgtgtgtgtgcacacgcgcgcgcatgtgtttgccttgtaagttaggttttaggtttgttttcattttatatgagtttttataaaacttaaaatattttaaccttgtagttgcttttttttttttttttttttgagatggagtttcgctctttttgcccaggctggagtgcaatggcatgatctctgctcactgcaacctccgcctctcgggttcaagtgattctcctcctgggttcaagtgattctcctgcttcagcctcctgagtagctgggattacaggcgcctgccacgacgcccagctaattttgtatttttagtaaagacggggtttctccgtgttggtcaggctggtctcgaactcctgacctcatgatccacccgcctcggccccctaaagtgctgggattacaggtgtgagccaccacgcctggccgtagttgctttttttaactgttagatgtgtaaacttattttcccttagctgttgaactatatatatgttattcttgtttaatttttaacagagttcttatgtttaacattttaccccagaatgtatgtgctgtggaagattttgttaactgtatgtaacagtttgcagctattatgccttccctgacaagccaaatatgcttttgatttaaatcctcttttaacttcatttccttttatctagttatgatgatgaagttgataaagtaaaccagtatcaacgactaagtctasaaaacctggaaaaaattgaaataggtaagttttaacatactaatcaagtcatcaaaagcaaatgctgttgtttccaagagggggtcaaattatttaagcaagaacctggtttaagtttcacctacaaatgcttttcttcactattattttccatttgttgttagtagcattttgatgaggtctagggaataggtatgaaatcctaaggcagaaatgtcggctcttcttacagtggaatttggagaccagtataacatctgttagaaaccagaaagggatattccaagctgtctacttcttagaacttcctttctattcattataggttagtgatagatatggtcttatcataataactgtgttccttttattatttaccttgtgaagattaccccagggatcaagaaagcttaaatgattgaaattgaaagagttcttctagccttatcaaaccaaatggtcaccagaagtttgtattttgtgtgctgtcatttatattatgaagaaaaatgtgttgggtctttttaagataatagaagaaaatgttatgtgaaacatttaacyttataygtattcatttgggattttaggccctgaacccactctttttggtaagccaaagttctcctgcatgcgactgcactacagatacaaagaagcgagtggctatttccacacattgcgagctgtaatgcgtaatcctgaagaggatggaaaaggtaaaaagaggaagagatgaaagtattcagtgaaaactttctatttattcttaaaagcccaaatggaattggggacatttcatatcataaccaactgaatgagagagggtccagggaatagctttggaatatgagaccttgaaatagcaactctgtttccagcaacccagggaaattatctgaatgtattatttagtctggggcaagggaatctttagcggggattctcagggagtttggccccatcagtgatcgtatgggtgtcaaggctcttcacatgtcatgttcttttcatttgtagcaggtaggaatcatgcctgtctcattcatggctgttgccttggcatctgtcacagtgcttgaacaaacatgaactagaacaaacttttaattccccgatttcattcttttgcttttgttcttttaaaatgttagaacattgtgaattaagtgggggagactagtgaacaggtggcagttttctataaatcgaagcaaataaatttgtatttaattatacgacgacaaatttcattcagcgctaaatgggttagaactgctattttttttagtatgtttatggagaaattggcaggcagttatatttgggttgcagatacccttcagtgcattgcagagatgctgcagatcaccaagcaagccatgggatcggatttacccataattgagaagaaacttgagaggtgagtatactgcttctctcaagaataaaggcattcttatccaaggtcttatttgtttaaaattatttgcagggggaaaggggaggagatcacattatggtaaggtgttggtatttagagaggtaaggatcaaatttctgcagatcaaaatactttcaacattcttcatgtatacaattttcaggtaagttttagacttacagaagagttgcacaggtagtttagagggtttccatgtactcttccttcggcttccctttatattaccgacttataaccatagaccatttatcaaaacttaagaaagtaaccttggcacggtaagattaaccaaagtacagatttcactaggtgttcactagcatcctttttctgttccaggatccagtctgggattccacactgcatttagttgtctctrtagtttaatgttatttcctcaatcttgtcttttctttcataactttgacattttttaagagtactggtcagctgttttgtagaacatccctccatgtaggtttgtccagtgttctttcctgatgaagctraggttatgcatggtcaggaaggacaccacagaagccacgtgcacttcttagtgcctcgtgctgtggggagggagggcgtgatggcctgtgtagtattgttgaggttaagcttgattacttggctggggtagcatctgccaggattctgcactgcaaactttgtgttttcctctttataattgctaaatatttaggggaaattactttgagactatgtaaatattgtttctgtgtaaacctaagactattcattttcataaccattgtggatcttttctataataattattcctgtcatgatctatggtcatttttctaattttcattccttctacacttgttaattggaattcttctgtaaagccactgcacccagcctcttgtacacatttttaacctatacagattaataaccttttattgccaaagattgtattttatgcattttccacattactgtagaattcataactaccatttaaatagatgcctcctgtgatcagtttggaaatgtattgtgtgggttcagaacatggactctgwgactcctggttctatcaattactctttaaccttggaaaacatactcctttacttcagttttgttatctgtaagatgagagaaaatccatgtcagtgcattgcatgaactgaataacgcactcagacctggcacacagctattaaactcaattgccaagaattttggtygctaagcattttttccttttataaagaagtcatgacagatacctttgtcatgtattactttttcatgtttaggatgatttctttagaatagcatcctcaggttgtgaatctggattaaaagatgtgggtatttcacttgtccctaacagtgccatacaaaggttattgcttatcctcagtttcaagaaaaactctgaagacccagagtttcattatcttgagtgatatggcatttaaaatatgcttaggatatccctctaggtgtgtttaaaagttttgatacagagtaacactgactgtctccacaagtatttacgtaggtggtattttgccaagagaaccggtctgagagcaagggccctgcaaggattttgccatccttgacacaactcacgtggccacaagtgatacatttttaactcctaagtaaactgatgagaggaaacattgaaattttttctaaatactttgtagagaaaatagtatgttttaaacaytaggcttttgaatttggaaaaagaatgcctatcaacagattatttcatatttaaaaagtgtggcttttctttctaatgagcatctgtcaggttttgtggtccacattctgctagtgaagagagccatttggccggaagaaaattgttcaggcttttgttaaagaattactttaacccataatttttctgcagtatgctcatgatcagtgatcttgcatgatccaacagtacaaatgcacacactgagacatttgtggcaaatagcatcaacttttctttcttatttatagctgtcatgagggataccaaaggagagaagacactaattgttaaatgtcccaaatcttttaaaatcaggtaacccacaggacatataagaaaatggaagtcttactcctgtctccccccactatctgaatttgagycacactgggatgtgtatagataaccttagttaaggtgctgcagattcccatttacagtcagagatgtctttgctgattgtacagatggtggctgtgctagacccgcactgctcacaatggtagccactcaccacatgtggttgtgaagccttttagaatgcgactaggctgaattcaggtgtgctgtaattatagaacaccacacattgcctatattgaattagtccaaaaaggaatattaatcatcttttaatatttttatgttgaaatattttgtatatattgggttaaatgaaatgctgctaatttcactgctgctttctaatgtggctgctagaaaaattgtaattatgcatgtatttcatatatttctattggatagcactgttttaatgtcaactctgagggttatctgtcagttagcaatgcactgttttcaagaagttgggaccaatttgaataactgttttcacttatgttaataactggaactggcatattggattccatggggaattaactttttttctcttctaatttgtaggaagagcagtaaacctcacgaagacatcattggtatcaggtctcaaaaccaaggttctttggcccagggaaagaattttttaatgagcaaattttcatctctaaatcaaaaagtgaagcagaccaaatccaatgtaaatattggcaacctccgaaagctaggaaactttaccaaacctgaaatraaagttaactttctaaaaccaaacttaaaagtaaatctttggaaatcagatagtagtcttgaaactatggaaaacacaggagtgatggataaggttcaggcagagtctgatggggacatgtcttcrgataatgactcataccactctgatgaattccttacaaattctaagtctgatgaagacaggcagctagctaactcattagagagtgtagggccaatagattacgttcttcctagttgtggtattattgcctcagcgcctcgattgggcagtcggtcccagtctcttagcagcacagayagtagcgttcatgctccttcagagattactgttgctcatgggagtgggcttggaaaaggccasgagtctcctttgaagaaaagtccttctgctggcgacgtacacatattgactggctttgccaagcctatggatatttactgccacagatttgtgcaagatgcacagaacaaagtgacccacctatcagagaccagrtctgtgtctcagcaggctagtcaggaaagaaatcaaatgaccaatcaagtttcaratgaaacccaatcagaatcaacagaacagacacyttctcggccatcgcaattagatgtctctctttctgcaacaggcccacagtttttgtcagttgagccagcgcattcagttgcatctcaaaaaacccccacctccgcttccagcatgcttgaacttgagacagggcttcatgtaactccttctccttcagagagcagtagcagcagagcagtctctccctttgccaagattcgaagttccatggtccaggttgctagtattacccaagctggattaacccatgggataaactttgcagtgtcaaaagttcagaagagtcctccagaacctgaaatcattaatcaagtccagcaaaatgaacttaaaaagatgtttatacaatgccagacacggataattcagatttagcttttagccataagaatccttccatggcttttatttaaaaatatgaaattttcacctcttggggtattttaattgtactgtctgaacccagggatcacaaattctgttcattggaaagggttttaaacggagtcggaacctgagtagatttccaaattttacagccaggactacagaagtgcatcattctagaatgtgtagacctgagtagcttatacactacagagcactttgcttatttgaaagtaattcagcaacaggtcactttgggatataacctgaacctttttttggagtggggtgggtagactacagtagacacaagggctggacatgcagatgcttaggggattagcgtttttcataatttgttctgtttgtcagttcattcctgtgtgttcttacctctacaaagtaaattacacatttagtttttagtgactttaacatgttactgaagcatttgaatataaagctattttagttttgatggcttaactgttccctgaggagttgagggttattgacactagagaaatgaattctcatttgatcctaattttccccgtattctacttgaacacattaaaaatactctgctgcctatayaatgtaaacctaggagcattaagacttgtcacacagtaaacctgatacatcagaggtgaataccagcacctattaggtttcattttgcygttttcaggaatgtaagaacacccatattggctactggaaattctagmagtcagtcaggttttaatttattccagraggggcatcctcgacatcttatgtagatgatccacaacttcaaaatttagtctgggcctagtgcagtggctcacacctataatcccaacactttgggaggccaggagttttgagaccagcctgggaaacatctgyctctacaaaaaaatacaaaaattagctgggcatagtggtgcatgcctgtgtttctagctaygcaggaggattgcttgagcccatgagattgaggctgcagtgagctgtgatcgtgccactgacctccagcctgggggacagagcaagaccgtgtctcaaaaacaatttagtctgaaacacaattgtgctgaatctgtctgactataactctgaccacacagaaccagggctgcccctgtaatccccacagtaagaaagttgtatggcatattccaacaagtattggttcgtctggtgtctttagagctttactctgttraagtgactgattctcarctgaacattatgtcgtwactttgataagcattccacttttgttatttattagtgctatcttttttttttacgtgttaaatcttgtgattattaaaataaagtaccattgtaatttaaagtgacaaatgggtatgagaattccttgcataacagattaaagaatttgtaaacggcagatttgctataactgaacacttggtctagctgttgccagtatgttactcctttgaaatatactcatgatgtaaaaagggaaatggatcagaaactatactttaaatccaaacattcaaaactgaatgcttgcttctaccaacttttcttccgggtcctgaaaatattaagggttcccaacatgggagaaaatacaacccaacattaggtgataaaatacacgtttaaactctacagaaattagttcgaaagagatctttgaaaaatcattttaagaaggcaaagttccaaacagggttacacaggagtctactcagtttcctggccatacaggattaacgctgtgccttacgttagagcaacaaacttgactgtccgtgtatatataggtgagggacaaagggtttctgcagccaagcactgcactccattccgctgcctgggcgggccttgagcaggaaggtccctcttgcaccacctcctccacttcagttcagctctctcatgtcttccaccaagaggacatggtctttttccacacagatcacatgggatggtgaatcttcttactcatgaaaaacagcccaaggtactgctaatttgggacgttttatttattggaaaggttctttcaagggaacttttctgcaagaccaagcaatgtatgtatttttctttggtaaattacaakttacattggcacaaaaaacacatggtgactaatgtactttgctctaggacaattaaagaaaatgtattttatcctcacaaatccagtgaagccttcattttatttctaaaagtttaaggaaggtctagtctaccagttataaaaatgaaaaccagttcaactctaatataaacmttatttacatttgtttataaaaatagatttgagtttaggaaaagttgaacaactagttatttttacttcagttattaggtacaatgaattccttgatttttcaaggctgaccctgtttccttggttaacaatttcaatttaggccttataggaaaaaacgtaagggatcctttatctgcctccaactaggtaagttatttgataccactgacagcttaaaaagtaatgtcctaacctttctgaagattctggttgccataaccatgctactacagtctgttgttagtttgctctattaaaactaattggtctggagaaaacctacctgcagttgtacgaggctgttactggagtagcagatgttagctgatctaacatacttggaaccaactgatgatcccataaaaaatgccaaaaatccaatagaatcaaagcaactcaatgacatttaagaaaataaaaactttctaaagggggtattgctttttaagtttcctattttgttttcatatttgggcacagctttgtagcacagcattcccttatgcatggttctcaaatgcactgggataggagaaaataaagacaatgtagtgtcttggtttcttttgcccccaaaagccacattcattccgtttaaaggactcctcttattcagagatagattgtcctttccttttatgaaaaaaatggtgataatacagtgatttattcggattacttggcaaggtaaattggcaaccttatagtaccccagatttttggaaatattactaccggtccataaaatacaaaagtctgggaaccactgccatgtacaagtttagttttgcaggctgttaacaaatgttaagtgggaaaaagtttctgtggccaaacatctgggaaatgacagtacagaatttcatgtagtcatgtgaatcaatggcaagtacgcctccgttccccaaagatggactactgaatgcaccccaacccactgtgaactggaaaaacagagaactagaaaacataagaaatccgaagcacgattcctctgactttgaaactgcaacaaccttcttcatttcagcatttcaacagtctggcctatgactcagctgaagctaaggaaatggtacaatcagcaacattatcaatattaaacttttaatatcaaatactttttttacatcattactaatttatataattattataaaacaaacttcaaaagctccatgaaatcagtaaggtaaaagtccttactgaatatcatataaacatcaggtgttaccaggcttgatttcaggaaatgtcactggtttgtgatagaaattacctataaaacaatgtggtataaatgaatatctgaattttacaattatgtggctacagtttgcccattactcttcataggtattacatctttaaagttcatttccattcacacatttttgctgctgaagcctcgttcttcttaaagactctagctgctttgctctcagccatcgttctcttgacagcgttgtctgaccagcactgagasacagacacctggtttgaaacacagaaacaaatttaagtctagagctgggatagtaagttttaaattttttttaagacctaggaatactttgtgaaaacacagagcacgttaggagacaagaccgtatggtagttacacacaagtcaacagccaagttaggcttctaaaaagaaatcgttgaagagtcagaattggaaagtggctcactctttgaagcttagagaacaagcagcatgcctgttccactgaagagatcaccagccaaactcgattccccctcaatgagccctttcatacagcgtttttaaaaggaaaagttcatttccgtttttagaattctgcctcagttactgctgaataactcagaagacatatacacaagcttaccgaaacagcaataatggacrtgcgccacttaccgagccaccacgagcagctggtgaagatcatcagcagtgatgctctgagggtcgttcttccgcatttccacaaagtcatcttcaactgcctttatcaaaagagtaaatgtaaatgatgtgcatttttgtaaggaaaagaaaattaacatggttccttgactgatgtagtaaggtgcatgtcagcctcttagacaaaggaggcaatatgggtgaaagtaccaaagcatatacatacataatgctgctgatgaaaataaaataatgaaactcagattcatttaaggtcaagcaaacatataaatcagcaactggcataggaaacaatgcttttccacaaaggaagagtgatgttagtgaaaatggcagagaagggaccgcagaaaactgtctctactgttaacactgatcaaaatcagctttttaaaaactagaaataaaaccatacttgcagcaatccagagagcatttatgcaagaaaaccaggtgattattggtaagaatgttgagcctggcagcattttaacatgtcctactcctaaattccaaccccttcccctccaggcgataattagtagcttcaaaaatcaacagcctggcagccaccggagagagaacagggctagggctccttccaagtgccattcccggagaactgtcatctgaccacctgtctggtggctccctggaaggacccatttgcaaggttgtctttatttaacctgactggaagcctgtctactatgaaccacctctttccccagggcatttatcaaaaacaatcggaagaaattaccaatcaccttagctacctgagacactgggtaacagctgcggcagacagactaacccaaacccttcaatggaaaagctagctgggaaatgacatgtctgtagagggctctgaaaaccttaagtatgtaactcctaggaactcagaaggctgcagacatgctcagagaccatagctcccacctctgcatgacctggaggctctgtgcgagcaggaaatgaaggctaaggcttgtaaattgcatggctaagtgttgaactgagggcttgccccaacttttatttttatttatgattattattcacccgtagactgggagactactacccagcatttaaggaaatttctttccaatcattaaccacaaaactaacagagcagagacttcagtgcccacatgtgacaaagatacagactttatagaattagtcaaaaaagttactaaacaacctaccaacagtaacaaacagcaacaacaataaaccctagggaggtttaatttccagagtaacttccaaagcagagttgccatattatataatttaaaatgtctggttgtggctagatgtggtggcttacacctgtaatcccaacacattgggaggccaaggtgggaggactacttgaagccaggagttgaccagcctaggcaataaagcaagacctcatcactacaaaaaaaaaaagaaagaaaaaaaaagaaaagaaaaaacaaaaaaacaaaactttagttgggcatggtggtgcacacctatggtcccagctactgaggcaagaggatcacttgagcccagcagtttaaggctgcagtgagctgtggctgtgctacttactattccagcctgggtgatacagtgagaccccactgaccaaataaaatgtctggttttcaacaaaaaagtacaaagaaaccagaaggtatggctcacactttggggataagggagtcagtagaaaactgtcccagaggaaactcaaacattagacaaaaagactctaaattggctattttaaacattcaaagaaataaaggaaaccacataaaaagaacttcaggaaaatatgagaatcaccaaatagagagtatcaataaaaagagagaaataattttttagaagaaggaaataaaaattctggagttgaaaaatatagtaaaaattctctagaggtgctcagatttgatcaggcagaagaaaatcactaaatttgaagataagttcactgagattagtctaagaaacagaacaaaaaaagaagaatgagggaaaatgaacagagccttgaagacctgtgggataccattaaatgcaacatcagatacacagtggtagtgtcagaaggagagcagagagaaatgaggcagaaagaaacatggccaaaaccttcccaaacttgttgaaaacttccccaaaatatgaattattctgcacctccaagaagctcaacaaactccatgtaggataaactcagagatccacacatagacacatcataatcgaaactgtcaaaagccacaaaatcttgaaagcagtgacagaaaaatgactcagtgtgtacaaaggatccttatcagaaactagttggcttctcagtagaaaccagaggccagaaagtggtgggaggacatattcgaaatgatgagacaaagactataaaccaagaattctacatccagcaaaactagccttaaggagaaattaagacattcccagataaacaaaaacttaaaagagggctgggcgaggtagctcacacctctaattccagaatttcgggaggctaaggagagaggatcacttgaacccaggagttcgagactagcctgggcaacataaagagatcccctatctgcacacacacaaacacacacacacacccaaacaaaacaaaaaaacccaaaaaacaaagaattagctgggcacagtggcacatgcctgtggtcccaactactcaggaggctgaagtgggaggatcgcttgaacctgggggggttgaggctgcagtgagccatgatcacaacactgcactctagcctggatgacacagcgagaccctgtctcaaaaaaaaaaaaaaaaaaaaaaaaagaatttgcacaagtagacctgccatgcaagaaacactaaagacagttcttcaggctgaaatgaaaagatactagacagtaacatgaacccacatgaggaaataaagggtgctggtaaaagtgattgcataggcaaatagaaaaaatagtacagaagtcttttccatttctaacttttttctctaaaagacaactgcaaaagcagtaattctaaatgtgttgatggacatacaatgtactgagaggtaattgtatgacag

SEQ ID NO: 96000 - DNA, 114980 bp, Homo sapiens
  misc_feature (1)...(114980): n = A,T,C or G
tttgcttctatcctcagaaacctcttgtggctcccatgcctacagtatcaacattctccagagcctagtctactttggagctttcacatctatacaaatgttctacttcaaacttctgctttgctgtcttcatgcttatcacttctcttgcctgggcgttctacttcctgttcaaacctaatttaacttaccctttaaggtctacctctgtgaccaccccatgctgacagcccggtccacaattctctctcctcagaactgttaaatcacttattatctgtatcactctttcacatttattaacttaaagtaactaagagtttattgtttttcctgtctcctgaactaagatattcattccttaggagtaggagccatctctataacatttttgtatctgacacacacagcataaaccctcatatgttgatatgttaaaaagccatatgtagattgaaacaagacctaaatgtattgaaaagaagaaaaagccactttgagaggccgaggtgggtggatcacgaggtcaggagatcgagaccatcctggctaacatggtgaaaccctgtctctactaaaaatacaaaaaaattagtcaggcatgggggcgggcgcctgtagtccaagctactcgggaggctgaggcaggagaatggcatggaacccgggaggtggagcttgcagtgagccgagatcacgccactgcactccagcctgggcgacagagtgagactttgtctcaaaaaaaaaaaaaaaaagaagaagaagaagaagaagaagaaaaagctagcaaggtaccaaggaaagcactgctaagcctttccaaagaactgaaatcctggcggggcttggtggttcacgcctgtaatcccagcactttgggaggccgaggtgggttaatcatttgaggtcaggggttcgagactagcctggccaacgttgtgaaaccccatctctactaaaaattcaaaaaaattagccgggcgtggtggcaggcacctgtaagcccagctactgggaggctgaggcaggagaatcacttgaaccaggaggctcaggttgcagtgagccgagatcgcgccactgcactccagcctgtgcgactaaggaagactccatctcaaaaaagaaaaaaaaagaaaaaaaagaattgaaatccttggagatagtttacataaattttcccaaacctagcagtagatgccaaaggtagccgctgagaactcaagaaactctcaagtgttgcaagaaagagagagaagcttgccaataagacgaaacattttaaaaaagactaaaaacaccagccaaaatgggactcaataccttaaacaagtaacacttcttacccaacactataccaaaccgtactagactgttacacaacttgttcagcatatcttctttaccgatcattgtctggttggtacattcttttgaaccatcaaaagcagaggcacttctgatcatccttccatttctcttcctacagtcgaatttctctcccatttctgaggggaaagggccatctacaataagcatgatcaagccctgattctggcatttcctcacatcccgtgaaactcagtctcagtatctggttaaagtaaaatactgcgggcccttttttcaaataaagtttaccttagaaattaaactattcctctaagtgaatttttgaaatacagagcaaaactgtatctctttgcatgcacacacatatataaatgcataggaaaaaatttggaagggcataacttgaagtgcatttttttcttttttcttttttttgtttttttgtttttgttttgttttgttttgttttttattgatcattcttgggtgtttctcacagagggggatttggcagggtcataggacaatagtggagggaaggtcagcagataaacaagtgaacaaaggtctttggttttcctaggcagaggaccctgcggccttccgcagcgtttgtgtccctgggtacttgagattagggagtggtgatgactcttaatgagcatgctgccttcaagcatctgtttaacaaagcacatcttgcaccgcccttcatccatttaactctgagtggacacagcacatgtttcagagagcacagggttgggggtaaggtcacagatcaacaggatcccaaggcagaagaatttttcttagtacagaacaaaatgaaaagtctcccatgtctacttctacacagacacggcaaccatccgacttctcaatcttttccccacctttcccccctttctattccacaaagccgccattgtcatcctggccgttctcaatgagctgctgggcacacctcccagacggggtggtggccgggcagaggggctcctcacttcccagtaggggcggccgggcagaggcgcccctcacctcccggaagggacggctggccgggcggggggccgacccccccacctcccacccggacggggcggctggccaggcagaggggctccccacctcccagtaggggcggccgggcagaggcgcccctcacctcccggacgggacggctggccgggcggggggctgacccccccacctccctcccggacggggcggctggccgggcagggggctgacccccccacctccctcccggactgggcggctggccgggcggggggctgaccccccccacctccctcccggactgggcggctggccgggcggggggctgacccccccacctccctcccggacggggcggctggccgggcagagggactcctcacttcccagtaggggcggccgggcagaggcgcccctcacctcctggacggggcggctggcgggcggggggctgacccccccacctccctcccggacggggcgactggccgggcgggtctgacccccccacctccctccggacggggcgactggcctggccggcggctgacccccccacctccctcccggacggggcggctggcctggcggggggctgaccccccccacctccctccgggacagggtggctgccaggcggagacgctcctcacttcccagacggggtggctgccgggcggagggtctcctcacttctcagacggggcagccgggcagagacgctcctcacctcccagacggggtggcagccgggcaggggcgctcctcacatcccagacggggcggcggggcagaggcgctccccacatcccagacgatgggcggccgggcagagacgctcctcacttcctagatgtgatggcggccggaagaggcgctcctcacttcccagatgggatggcggccgggcagagaggctcctcacttcctagatgtgatggcggccaggcagagacgctcctcacttctcagacggggtggcggccgggcagaggctgcaatctcggcactttgggaggccaaggcaggcggctggaaggtggaggttgtagcgagccgagatcacgccactgcactccagcctgggcaccattgagcactgagtgaaccagactccgtctgcaatcccggcacctcgggaggccgaggctggcggatcactcgcggttaggagctggagaccagcccggccaacacagcgaaaccccgtttccaccaaaaaaatacgaaaaccagtcaggcgtggcggcgcgcgcctgcaattgcaggcactccgcaggcggaggcaggagaatcaggcagggaggctcttttttttttttagagacagagtttcgctcttgttgcccaggctggagtgcaatggcgtgatctcgctcaatgcaacctccgcctcctgggttcaagcaattctcctgcctcagcctcctgactagctgggattacaggcatgcgtcaccacgcccggctaattttttgtatttttagtaaagacggggttggtttcaccatattggccaggctggtcttgaactcctgacctcaggtgatccgcccgcctcggcctcccaaagggttgggattacaggtgtgaaccatcgcgcctggcctttttatttttattttttgagacagactctcgctctttcacccaggctggagtgtggtggcacgacctcggctcactgcaatctccgcctctcaggttcaggcgattcttctgcctcagcctctggagtacctgggactacaggcgtgcaccaccacacccggctttgtatttttagcagagacagggtttcaccatatcggccaggttggtctcgaactcctgacctcaagtgatccacccaactcggcctcccgaagtgctaggattacaggtgtgagccactgcacctggtctgaagtgcatatttctggagtggatgtattagttggattattttaacagaaatattttcctttttttgaagaagtaaataaactatatcctgttacacctattttcttttcttttttttttttttgagacagggcctcactcccgtcgcccaggttggggtgcaatggtgtgatcacagctcactgcaacctccgcctcccgggttcaggtgatcctcccatctcggcctcccaaagtgctgggattacaggcgtgagccaccgcgcccggcctacacctattttcttcaatgagtttttcactaaattccatagtgctcctaactttcatctgagaaagtattctaccactgatatttcctattataaccaaattcgctgaccaatctgctctgtaaaaaaaggtttgtgggtataaatgacgaaagtcagttcatggatcaaatccttcagttctgtcacattgtgagaggccactgttgtgaaagtaaaataacttctattctagttacggctctgctaagaatacgctgggggatgtcaggaagtcgctttatttgtaaaatgatgagttagaccagaatatattctctgatagaagtttacaaagatgaataaagatttataggctaggcgcggtggctcacgcctaaaatcccaacactttcggaagctgaggatccctagtgcacaggaattcgagatcagcctgggcaacctggtgagacccccttctctaccaaaaataaataaataaataaataataaatttttaaaatgtattagctgggcttggtgacgtastgaggcaggaggatgccttgagcccaggagttcaaggctgcagcgagccgtgatcatagcactgcactttggcatgggagatagagcaagaccttagctctaaaaaaaaaaaaaaaaaaaaattaatagatttataaagtccattctatggaggaaagtctcttattcagttatgaactgctgcgaacctaaaggcaggaaggcaaattcccttcagttcggcaaacacgaagaccccacattcgcgtcgtctgtgaagaaggcactccgaacctcaggcgctcactcgccaggtttaagaggatgagcaaagaataaaagtcctctcacccaggaagcgtttcgcttcccttagctggagccacgctccaaggtgccaaagcctaattgctgtccactctcaccaatccgttagcaagatgagcatctacctgctgcgaacgtggcggtgacactactacagctcccagcctgcctcccgcccgcccccactcctggactccacagaccgtgacttgtagtcccagcccacggctggcggcggtgcgggactcctgaaaactgcttttcctccctagtaggcggtgagaccgcaaattccatcagaatcctactctgacccactagggcttggcccgctcagagtcgcattccctcctccaaatgaaccaactctcctcccagcgatactccgacctctgagcaccccgggcggggccacgccccggaaatggagtcaggtctccaggccgcccgctgaagtgccttccagccactccaagcggggctggggccggcggggcgggcttgggggcgtggccgggaggcgggcggggatgcatctgcgggcgcagcgcttggggcggagccgcagcgcgaggccgcgcatctgggtggcggcggggacgcgcccgtggggagaggcggctgcggctgcggctgcggctgctggcggggggtgggggggaggaggaaccgggaagggggggcagggcgagcggagagctagctgtgttcctgaggcggcggcggcggcggcggcggcggcggcgtctccgacggaggaggagggcggggaaggaggatggagcaagctgggggttggggttggcgctagcgcagcggctcgcctggtactgtgggagagcggcggctgctcctggaagttgtggtgtcgggagcccagccggtgccgccgcagccgccgcctagggcggtggggaggaggagggagccgcggggcttggcggggtcgggagggagggacgtgctgggggaacgagctggggaagacggagcgggctctgtgccgggcgggcgggcggcgggggggccagcgaccgcagccggggggacgcgggaggatggagcaagtggagatcctgaggaaattcatccagaggrtccaggccatgaagagtcctgaccacaatggggaggacaacttcgcccgggacttcatggtgagtctctcccctcgctgtcgcgttttcttgccggcgccggagcccatcgccgcctctcccggccgggccgccagtgctttgtgtacctctgtgaggagaggggcggagggggcgcgcaccagccgggtgagccgggtggtctcggaggccagcgggaggcgagagcgcctccccccgtggcctcctttcttctcccatgttcgcgacccccgcgcgggttcccgggacgcgaagggagcggccgcgcggccgagcccgcagcctgcaccgtggctcgcgaccacctattgtttaccgggccgggagccgtaggcaagtgaggtgcaggccgggggggggggctcgcgtttccacacctccccgcgcagttcgctcctcccaggagggtcgaggcaaggtatctggctgtgaccgggaggagtgcagatcgtggctgacagaggaacgggggtattgaggttggcactaactcctgggatccctttgctctagctggtctcaaagcgggcagggtaggacttaggccgtttctggggtcgcagtcatgatctccaacgcttgggaaaggattgcccataaggaatctcatgggtttacctaatttccatttacccgcgtcccgcttctcctctcctgaggcccaggtttgaggtggtcttggggtccgtgtgactataggttcaggggataagtgtgggtgggggaattatcctgaaggaagccagccgacttcggactccccaggggatattgccgaaggcggaggggatgtgactatcacttcctatccggggtgggggtggggaacttgggaacaatagtcctggtggggcggaggcgacgctacgggccgaagccctgaactgggagataaccttcccagcgcccccccgcctccgccaccccctactttccgccctctgcttgtgcaggcagtcttgagaggaggtgaaggttaaaagtcttgttcatgaaattgctctagatacactattgctttagcacactgtgagggggtcagatccgaaggcgtgagaccagaagtcgacttcctacgttacccacccccccaacccccgccctttttatttttctgctggacaatgttccctctagggttgtttcccggcttaggaggcggtggttgcggctgctgctcctacggatattgcgcaagactggggcgttggaaaccctgtaggtctggggaatgaaaaaggaagtgggactttgggaagtggttgctccttagtcttggcgggggttgggaatgggaaataagctggggaaaatttttatcttgggtaaggtacacctcgaagaataatcacttaattctgaaatctgattatgagaaggatacacagttaatgcctgtaaaatgaatgggcagcaaacattggctagtttttattttttrtttaaaaagtacagtagtttttatggtggaggtgatatgacttagtagtgaatactttttcacgttttaaagagactggtctagtaaagctttagcgttaaatttttaacagcttataaaataggcccttgaccatacacagtattatactagcatcgttgagctttgtgattcccgcctccccagaccaataatagaggacggaagtaaagttttctcagtatcttttgaagattgaaaatataagttaaataatctaacttattccttattaaaaataaaaatattgcttatatttaaacatttgctcttgatatttagcctatgtatttttgaaaaattactttttgatctgaaagggttaaggaaaacggcattttccctttttactattgagagtttttattgtcttggtatcttttgaatggtgtcatttacagcaattggatggagtcccttttttactactttctagcaaaagtagaagaaaatactttgaatatttaagatgtttaaaactagtttttttgggttttgttgtttggttggttggttggttggttttttttttgagacggagtctcgctctacgctctgtcgccccggctggagtgcagcggcgcaatctcagctcactgcaacctctgcctcccagattcaagcgatgctcctgcctcagcctcctgagtagctgagattataggcacgtgccaccacgcccggctaatttttgtccgaagtagccgggactacaggcgcaagctaccacgccctgctaattttgtatttttagtagagatggggtttcgccatatttgcaggctgctctcgaactcctcatctcaagtgatccatctgctttggcctcccaaagtgctgggattacaggcgtgagccaccatgcccggcctaaaactagttttttaccgtcttactttggttatggaagaagagatggtgtggtccctggtcatttcttgtttgcatgctagtcaccttgttatccctaggcatataccgtcaggaaggagcattgtttggtgatgcgggccatcaggacaggttgcccagcctctgaactcctgtactggagaagtggccttagggttcatgctttggggatgagtcagggattcctattggagagttcatttctttctttctttctttctttyttttttttttgagatgtaacacctcgctgtgtcgcccaggttggagtgcagtggctcaatctcggctcactgcatcctccacctcccaggttcaagcgattctcctgcctcagcctcctgagtagctgagattacaggcgcatgccaccacgcctggctaatttttgtatttttagtagagatgggatttcaccatattggccagactggtcttgaactttsatctgactgactttgtgatctgcccgcctcagcctcccaaagtgctaggattacaggcatgagccaccgagagttcatttctccaagagtaaatgagtttcctttttcttccatgatacctaggtatagctaggtgattctacattagagatttgatgactaaggctattcttttatagggctttttttttttttaatttcctgacttgataagcaatagctgtaattaagacagccggtagttggtgctgctttttcccctgactggaaggctggagaggaactatgttctcctggcatggaaagagaaaaaaaagattagcttatagattctattatttttaaattctgatgtcgattaaaaatgcattttaaattcttaacattttatgactgagccttagagataatgtagctgatataactgttccatcataaaataatgtttattccaaatttggaaattaatagaataataataatgccttacacttagaccacagttcaaatgaacactccacttgcctgactggtgatgatgctcttttcgctctatccagctgtcctacagtcctgtcatttaaaggctacctctgttaatattttttggttttgttttgttttgttgttttgttctgtttttgagacagggtctcactctgtcacccaggctggagtgcatggttgcgatcctggctcacggcagcgtcggtctccctgggctcaggtgatcctcccacttcagcctccagagtagctggggctatgggcccaccccaccaagccctgctgatttttgtattttttgtagagayagggtttccccatgttgcccaggctggtctcaaactcctgggctcaagcaatccacctgcctcagcctcaaagtgctggggttacaggtgtgagccaccgtagccggcctactacttggtaactatcttatatcttaattttgtttctttatgtttgagtatttaggtcattctactttctgctgttacatatagtaattctgtgattaacatttttgctgaaactgacatttttcactgttgcataagatagcttcccaggagtactaggtagacgtatataaacatttaatacatgttcataaacttgaaaaagttttgtcagtttatacaactgtcataatgtatgagtgttcatattataattttcttgatctttatttgatggttgaaaactgatatcttgttttaacttgaatttcttgattactattgaggatagaaattttccacctgtcattactattctatgagtgtctattcctggccttggttgtgccccatactgttaaagaggagacagctaaggtacccagactgtgcagaactatgttgcctagatggttatttgcatgttgaaaacatgctaattttgctaataaattagcaaatagctaatttgtggctgatccagaatttgatctcaattatctctacttttaatatttacaaaatgagagataaatgtataaagtagggtggtgcacattcatgtttgacagacctaggttttactccacacagactcyctctgatggctgggggttggggaggtggtcctggaccatactttgagaaccagtgagctaatacatggtaaatgataaaggtaatgctgggaaagttaggtagaggtctttttgtgaaggatcttacatctatgctatacttagattttattctacagaccgataatagcaattctggacagtctgcattgtaactcctagagacatggagaaagtagggaggtgttaagaaaatagacatgctggtccactccagcgtcattcccccayctcaccttctccagcctgctccttgagttgtactctgaaccttcacttacttagataggttctggtagaaaaggtgagaatcattagtctgggtttctggagcactactgagtcttttaagaaaggtaaacagtcatttgtgttttacaaagttgaatctgatagcagtatgaagggtggcattttggaagctgttgaaatataagaagtgagatgtgagggcctgaagtgaactgagatggggaaatagagtgtatacaacacatctgataagaattaagaaaggagtctcaatgattcattagatgtaggtagtaaagaagaaaagagtatagtgttatgactcgcaaaatatctagcttggtatctgtcacccaagctagagaataccatttggtagagtaaggagtgagggaggagaaacaagtagaggagaccaaacaacattgtaggaggaagtttcagggggagaagaggataaatttaattttcaacatgttaaaactgcggtgcctctgagacatccagtagaaatgtagagctcaagatttctgacaggacggagttaaagatgtaggcatcataatataagcatgtaggagatagtcgacagcatgggagtgaatgagcttattccaacaaacttatagagtgaccagctttaggttgaagaacatcagtcttaaaataacagccaaaagaaggatatactagtgattgttcctgagaaggtgtggtcaaggaggagggaggagaaccagagatgtcagaaaagccagggagagtttcaagaaaggagttattaccagagtcaaataatgctgggaggaccggtaaggtgaggttgagaaagtacctattccatttggcacataggagtgctttggtgactagaaaaaacagtttgggttggggtatgggaagaagctagattatagggtgaagggtgggtttagtgtctttccattttttttaacattttgaaagtagatggtaggagctagaggaagattggttgaaggagagtgtgccccttccactgccttttttttttttttttaaagagagaactagagaatatttttcttattatttcttgtctatgtgtatatcctctttagcctgggaagatcttatgttgcagtcttgataaatataaaaattttaatcatttgtttattcagtgttgtagcttataggtttaaaaaaactaataatagctttattgagatataagtacctaccataagatttattcatttaaagtctatgattcactagttttttattacattgatgaagttatgcaacaataaccataatcaattttaggacattttcttcactttctgtacccattagcagtcactccccgccttcccataagccccaggcaaccacaaatctaccttctgtttccatagatttaagtattctggacattttatataaatggaatcatacaatatgtggtgttttgtgactgactccacctaacatgatgatttcaagtttcatccatgttatagtattgatccgtagtacttttggcctttttatggctgaataatattctattgtatarataccacattttgtttatccattcatcgtgttgatgggtatttgaattgtttccactttttggctaatgtgaataatgcarctatgaacatttgtgtacaagtttctgtgtggacacattttcaggtctcttgggtatatatctaagtgtggaattgctcagtcacgtggtaacactatgtttaacattttgcggaactgccagactgttatccaaagctgctgcacatattacattccaatcaggaatatatgagggttccasttcctctacatcttcaccgatacttgttgctgtctttttgattataggcatcctactgggtgtgaagtggtatcttcttgtggttagcttgtaagattttgtgtgtcttaatttgtctttcaaagctagagtgataggaaatattttccagtccttgcatttgagctaatcttagtgcttacccagtgccactggtttagttatggttttcttatccatcctttgatgagtattcacctaaayatatttacatcaactaacttcagaagtggaagtgaacttttaagtaactctccagacatggttcactgagacagtaaactaaaaatttactttaagcattctcaagaatgttttactttatttactttcaaaatatattaacttttttccatcaatatttgatatttaacttggaaaaaggatttttaaaggatgaaactgaaagtaagacattaacatttaggtggctgtaggttttttgttcatatgttaaatacttctgtgtttctgtagcactgagttcattagattcataaatatttacatttctgtcttccccagactgaacgcctcccaggctagagactgggacttaattatccctgtatccccattgcttaatatagtgcttggcatttaataggcactaatrtccattgcatgtgcagacattgtagacaaacttaatgctgtaagacagatttattcttcaggtgaattcttcagtggtccaagggtttgtcttctagacgatcatgagaactgcttcttcccctcctacacagatgtgctcacataactcgttgtattttcagtatccactgaaaaagaaaatacaagataagagctacattgaattcaaatattttaaataaatatgattttattagctgcagtttcttaaggtaacttctgtatttgtgcatcccacacccaatggatcatactttgttgacattgtcttagagtattaataaaatgtcttttaaacttttggctttggacttaataaaatcaagatatcatgtcatcggtatctcttcaaaaatagtgaatttgtgggtatttagagagtgattacaagtgatatctgttgttctctacttgcctctagtttctttcctcatccagtccattcaacacatcatactcactttcaagtggcagcatctgtaggctaatggaaaccatactggttgtacaatcaggagatgtgggctgcactggaagcatggtttaatttttattattaaaaatataagttaaaaaaactcattgctccctttgatgaccattacaattattggaaattttaaatgtgtattttgaaagtcaattcaaaacatatgatccaagtgctgctcctttttcaaactgtaattatgtctgtctctctttccagagagatttgattccctgatttttccsttctcagctccctccaattttaaatatatatatatagttttttttaataattaaaaaaaaatacttcacctggaagttttcatccaattttgtaactttggtcctagttgagaatcacaggcctataggataaagtctgtacttcttagcctggcattccagaaccttcttaacataatgtcacagtacctttccagtgttaaacttctatactctggtatgtatcctctcttctttttgaaggaagctattcctggtccttgagcatacctactaaatgaatgaaatcttgcttatctgtggttgtactgttgaacatactttttccctcagaaagcttcccttttattttattttattttatttttttgagacaaagtcttgctttgttgccaggctggagtgcagtggcaccatctcagctcactgcaacctccgcctcctgggttcaagcaattctgctgcctcggtctcctgagtagctgggattacgggcgcccgtgaccacacacagctactttttttatttttagtagagatggggtttcaccatgttggccaggatggtctccccttttattttataaaccagtacttggaagatgagaaagctaaaaatttaaaatgacttcaccatgttcaccaaaaactcagaagcaaaaatgtgattaattctcaccttctagaataaatattttagcacagttaatcttaaagcactttttctcctttgtaaagtttgatctttaatatcacaagaaaaaaagcctttcattagatttgagttgaaaacttgataaggtaaatcaggtgatatgcaatttctaaaccactagtcttttccaaatatgagttgaactcctcttccagcattttatatttcctgtagtatttaagtttctttagattcatgcagtcaaaccttgacaattatctccttccttctgaaatcacacaaaaatcttgtttgcatttgtacagtattgtagggtctgtagctggcctatggcagatataagaagcaaacagtagttgctccctaaaagttttttttggagaaagtggagtgtggactgtattartccattttcacactgctatgaagaactgcccgagactgggtaatttataaaggaaagaggtttaattgactcacagttcagcatggctggggaggcctcaggaaacttacgattgtggtggaaggtgaaggggaagcaaggcaccttcttcacaaggtggcaggaaggagaatgaacatgggaggaactaccaaacatttgtaaaaccatcagatcttgtgagaactcactatcaggagaayagcatgggggattataattacatagggattataattcaagatgagatttggtggggacacaaagcctagtcatatcgtggaccatgataatctcagaggctttgggaagtgtgctaatatctacatttcctgtaataacttttatatctaatcggcatttaaaaagctattttaacaacatttgagtgactgtcctgataggctctgaaggaatgcaaagatttgtctctgtcatccatccatggtctctgtcatccatccatggtctctatcatttatccattcatacagaaggtatttatggagatacctgagtgcccactatgccctaggtactgtgtttttgaattgacagttgaaaacatggcagtactctgttcaggaagtttactaactgaacagacctgtgagaagcagcgggacttttcctgggggcagtgggtgggcttcaggggaatctttgaacccttttaaattatatataatattttttgtgtgtaagcccattttagggggaagaaagttcatagctcttagtttctcaaggagtttgggtcccttagactagtggaaagataaggagtttaggagctatacagtcattaatttctatcctggccctgctgtgattctgagcagattatctagagaagttggggctctaatacatacctggaaagaacaagataatatatgtaaagtttctaacatagtatatagaaggtagtcaaaggaatttgagatgacatactgctccagtggaagtatattcggaatataagccagagagacaggagagcctaaatctgtctgaatagatcatggacagtttccacaaagatgctacatttgagctggtttttgaaggaagagtttgtcaggtgaactaggtgagtaaaaggcaacaacactttcaaagacttggagataaacagagatagaactgtgggttttagatgggaagaacagggtcagtgtgtataaaataagaaaatcttatgtacccaaataataggatttccaaaggaatatcagcttaaatgctattatgaaattggcctgtgttcctgagtgttttgatgaggagtgttttgatgttccattattatggcatagttgtttgatcttacagtaggaccttttaaaaattgagtccttgtcacatggtaaatgttcttaaatctggtaattttactttatctcaggtatataaagtagtactctctctgtttacacagttcttagatgactagattagtgtttctcattggcatctatcagatatgtttaaagtgccctgtagaaagaaattacatttaaaaagccttcaggactaaggcagcttatttataatggtgggtctcttgcttagtttggattcctcagcgaattgagttttccataagatgactctgaagaggttttgagactgcatttgtgaccagaaccaacgtgagaaaggaagggagttctaggtcacatgctacaaaaccatgaagaataacttctctagacaccttcttccccattgtgtatgttggttttactcctgacgtcataaactctttagtgttagaaggaacataaaaactgtttagaaattaaggagcttgttacaggtcttgccatagaaaggtggtggaactgggttagacccaagttaggaaagcagatgctttttatatgacatgatgctgcttaggccaacattttcagtcttagggaaaaagtcaataaagccccacttcctacccccctagagtagagcataaatatcctcaaaattacaaaaaaagttttctgtcagtatagatttttggttgcagcctacttccaaaaagtagcttaagtgaagaaagaatttattgcaatggaatactgcccttgagcaggttgaagcatcagaaccaagaaatagagagcctgggtgactcctctctccatgccagcctctttgtctttctatggttttcaagtttccatgtctctggggctgcttggatacttctctttgcttctctgcacacctgctttactattacctctctctgcattttgactttcactgttttggcctgcatgtgctgaataaagacatcccttatggtaatctaacctgtctcattcacttttatctcaaattatggaaagagctcagaatgactagaattgctacatcttgttttcaatttcctgaagaaaataaccaacttgccagtgagatgggtgttgtataaggtggtgagcttattcatatgtgtatggaaggaaggaactttttttagagaaaggaagggatggcttgataactaggcgggcagtccaaagagtgtctagtagagaatccttgaagcaaaattgaaaaaaaatttactattttaaggtttcagctccatatgaactccacccaccttctttcagagatggaaaaagcacaaagagtccttgtgacttgagagaacaatttgttggctctggcagagcattatttcacatttacagttagacattaaacatcaggcaaaattttaaggtttctgtgtagcaaactaaaattaagattatctataagctgcttatttatggtacctaaatttaaattataatttttcaacattaaaatatggaaccttcttgcaaggaaatcctgttttaaagtttgggtttttgtttgtttgttttttttttttttaagagatagggtcctgctttgtcacacaggctggagtgcagtggtgtaatcatagctcactgcagccctgacctcctgggctcaagtgatcctctcacctcactcctgagtagctaggactacaagcatgttgccaccatgtcctactaatttttttaccttttttgtagagacgaggtcttactatgttgcccagctggtctcagactcctggcctaaagcaatccttccatcttggctccccaagtgctgggattataggtgtgagcgactgtgcctggccctaaggatcacttttatcaaagtagtcactatgatttactccctgatcatatgtcagaaatatatcactatctgaaaaactaacatattttcttcacaataggttttgcattgttaaaattatcctaactatagttcttttagttcatgaatcatctaaaatttatgtgttactatattcattgtgtttgcctggctattagtgtgcctgtctttgtgcctgtgtgtctgcctgcctgcctttgtgcctccctttgaaattctatttgcctactcacctttctctacctactcagtcagttggttgtctgtgcccaagatttattaatgtgtgttaacgtgtgggtagtagagatagactggaaggtactttgtagtttagaaatgtctgtaatttacacctagttgtttgtaattcatctaatacggtaaatagattatacaaggggacttcaaaaagctcatggaaaaatggaattaagtaaataaatgttatttattaataaatttataaatagaytaaaattaaaatataaagttaatttctgaacataaactccatcagtttacttttataagtgatgatacaccaaccattttgtttatccctaagaactgagggtcctagaaatttaaccatttcaatgcagtttttttacattattaactgaagagtaatgaatgccctttaaagatttttttgagattaggaaacaaaacgaaggcagaaggagccaaatcaggactgtaaggtggatgcctaatggcttcccatctgaactctcacaaaattgcccttgtttgatgagaggaatgagcaagaggcatttttgtgggtagaaaaggactctggtgacgctttcttggatgtttttctgctaaagatttggctgactttctcgaaacactctcataataagcagatgttgtctttccttggccctccagaaaaatcaacatgcataatgccttgagcatccccagaaactgttgccatgagctttgctcttgactggtccacttttgccttgactggaccactgccacctcttggtagattgctttgattgactttgtcttcaggatcatactggtaaagccatgtttcatctcctattacagtccttttaagaaatgcttcaggatcttgatcccacttgtttatttatttatttatttattatttttcattttgtttttgagatggagtctcgctctgtcacccaggctggggtgcaggggcatgatctctgctcactgcagtctccgcctcctgggttcaagcgattctccagcctcagcctcccaagtagctgggattacaggtgtgcgccaccacacccagctaatttttgtatttttagtatagacaaggttttgccatgttgtccaggctggtcttggactcctkacctcaggtaatccacccgccttggcctcccaaagtgctgagattacaggcatgacagtttaacatttccattgaaagctctgctcttgtctgtagctatctgggtgcaatcattttggcaccaaytgagtggcaatttgttcagctttaatttttcagtcagaattgtgtaagctgagcaacttaagatgtctgtggtgttggctattgtttatgctgttaattgcaggttctcttcagttagggcaagtgacaagatgaatttttttctcaaaaatcaatgtggatggtctgctgctacaggtttcttcaacatcacgttgtcctttcttaaaaagaggcatccatttgtaagctgctgatatttggggcattgtccccataaactttgcttcaccattcttccatccaagctttgccataaatttgatgttttgttcttgcttcagttttttagcagaattcatgttgttctgataggggctcttttcaaactgatatcttatacttcttagtgcttcaaatgagatcctgttcatcagacatgttataagaagttagtatgagtttattttggtgcaaaacaaaattgaaatccatgcatagttttttccatggtacatattttccatgaactttctgaagaccccttgtatgaatgccaaggagaaacatagggtgggtggttattagtaataggattttgcaactgaaataatyaaacatgttcagatatttatctccacacccattcactgacattattagatggtgcacaaaagtaaaaagtttattttaaaattactttataatttagatagaagattattaaaattcatttttaagaaacagagtctgtctctgttgctcaagcttgagtgcagtggcacaatcacagctcactgtagcctcaaactcctggactcaacagatccgcctgccttagcctcctaagtagataggactacaggcatgagccactgctccctggtggattacttttaaagtatgtttttttttttttgaaaatgcaacttaaactagaagtacaggatgaatatttaaccaatacatttaatttcttgtcattgctttattagatgctgtttttgtattgtttataaggtctcagcatcatatgtatgatattttcaaatatgttctaaaatgacctcatcatttatttctctagttgttaaagaaggtatagaggttttatcattttttaaaataggatgtaggttggattagatctataaattattattttgcctttaaaacaggttatagataaaagagggaaaggtaatctggtgatactactgggcaggaatctttaaattatttaaagagggtgtaaacgaaggaatgtacaaaagtaaaaataggcagggaagaaaagacctgatggaagtaacatatctttgttaggaatttgagtgtctagcattatagtggacagtccaatgatatggtttacaacagttatataggtattagacctggccattacttactatgtaatgttgagtacatgatttgaaccactctcaatcttagcttctttatcgttaaaacagaaatagtttgtaatgtttgaattagtaagaataaaggacacagtgtcagatgtgtcagaaggaagcatgattagggcattaagtgagaagttaaataaataggaggggaaaaaggccaccccttgctctttttctcttttggacctttttggtgacagagacagaaagaatgtgtatagtatatttaattatctgaaaatacagagctgagcatccctaatctgaagtttaaaatgcccctacatccaaaattttttgagtgccattatggtctgagagcagacattgtgtatgattgctgttttaaatttgttgaggtgtgtttaatggcccagaatttggtctgtcttgttgaatgtttcatgtaaacttgagaagaatgtgtattctgtagttgttgtcttaggtagtctatagacgtgcattatatatccagttgattgatgatgctgttaagttcatctgtgtccttactcatttcctgcttgcttgatctgtccatttctgatagaggagtacggaagtcttcaactataatagtggattcaaatatttctccttgcagttctatcagttttggctcacatatttttatgcacaattgttagacacatatggattaaggattatgctgtcttcttggagaactgacccctttatcatgwtgtaaagccaccctatccctgataactttacttgccatgaaatctgctttatctgaaattaataactagtctcattttatttttgtgttagctgatatatttttttccatccatttgcttttaatctgtgtgtgtttgtatatttaaagtggatctcttgtagacagcatatagttaggtcttggtttttaatccactctgacaatcttttaattggtacatttagaccattcacgttcagagtgattactgatagcattggattaatgtctaccatatttgccactattttctgttgtcattgttctttgttcctattttttttttttgtcttccactgtttttctgccttttgcagttttaattcaaaatatcatatgactgtcctttcttagcatgtcagttttacttcttttttttttactttttttgtttttggtcttttctaaagagacaaggtgtcgcttagttgcttaggctggaatgcagtggcatgtcatagctcactgtaacctcaaacttctgggctcacgtgatcctcctgcctcagyctcctgagtagctaggactacaagtgtgtgccaccaaccctcaagtaatgttttttattttttgtagagagaaggtcttaccatgttgcccaggctgtcaaactcctggcctcaagcaatcctcctgccttggcttcccaaagtattgggattataggcatgagccactgtgcccagctgggtgttttcacttttttaagtggttgctctggcatttgcaatgtatatttccagcaaatccaagtccattttcaggtaacactgtaccactttatggatggtgagattactttataatgacaaagtaaccctaattctatcccttgtatcattgctggcattatctcacttacaaataaacatacacacacaagcatatataaccaaatacatgtttgctgctattctgaataaacgtatcagatcaattaataagaaaaataaaagttttaattttactttcatttattctttctctcatttcttcttcctttctttatgtagatgtgaattccagactagaataatttgtcttctctctaaaaaatttattttaacatttctcacaaggtaggtctgtggcaacagattctcttaatcttttctgggggacagggtcttgctctgtctgtcatccaggctataatgcggtggcatgatcatggcacactgcagccttgacctgctgggctcaaccagtccttttgccctagcctccggagtagcagagactacaggcatgcaccgccatactcacttaagtttttttttgtttctgtttttgtagaaacgaggtctcactgtgttgcccaggttggtcttgaactcctgggctcaaaccatccacccacctcagcctcccaaagcattaggactacaggcatgaaccaccttgcccagccttaatttttgtttgttgagaaagtttttatttctctttggtttttgaaggataattttgcaaggttcaggattctaagttggtgggttttttcttctcaatatgatattttgtcactctcttcttgcttgcctagtttctgaaacagagtcagatgtaattcttattatacttgctcctctttaggtaagatgattttttttcctctggctttttaaacgatttgtttatcttttttttttttttgtagtttgaaagtgatatgcctacataagttatttctggcatttattctgatcagtgttctctgagctgcttggatctgtggtttggtttctgacattaatttggggaaattttcaatcattatttcaaatatttcttctgttcccttcttctctttctgttattacccttatgcatatttacatctcttgtagttgtccccacagtttttgcatattccattctgttgtttcagtttttttctagtctttttaatctcttttcagttttggaagcttttattgagatatcctcaagttgagagattctttcctcagccatgtctagtctactagtaagcccaccaacaacattcttcatttttgttacagttttttaaaaaaatctctagcgtttcttaggccgggcacggtggctcacgcctgtaatcccaggactttgggaggcagaggtgggtggatcgtgaggtcatgagatcgagaccatcctggctaacacggtgaaaccccatctctactaaaaatacaaaaaaattagctgggcgtggtggtgggcgcctgtagtcccagctactggggaggctgaggcaggagaatgtcgtgaacccaggaggcggagcttgcagtgagccgagatcacaccattgcactccagcctgggcgacagggcgagactccgtctcaaaaaaaaaaaatctctagtgtttctttttggttatttctttgaatttctgtctctttgcttatattgattgcccatctattctggcatactgtctactttatctgttagagttcttaggatattaatcatagggtgtttgtttgtttgtttgtttgtttgtgtgaaacagggttttgctttgtctcccaggctggagtgcagtgatacaatcatagctaactgcaacctccgcctcctgggctcaagcaatcctcccacctcagcctccccagtagctgggatcacaggcatgtgtgaacatgcctggctaagttttcatatttttttgtagagaaggggtttcgtcatgttgcccaggctggtctcgaactcctgggctgaagagacctgcctacctctgcctcccaaagtgctgggattacaggcatgagccacccagagccaaggtctcagtcttttagtgagcttgtttatggattttgaactatatcctgtttctcagcgcctcacccccaggatggcttgaatgacctgtagttgggtatttcccttacctcatgtaaataaggctctgttaaaaccccagcaggttaggctcaggttaaatcatttctccgcagggcagaccttgttaagaagaatggaatattcggccaggcacagtggctcacacctgtaatcccagcactttgggaggctgaggctggtggatcacaaggtcaagagatagagaccatcctggccaacatggtgaaaccccgtctctaataaaaattagctgagtgttcctgtagtcccagctactcgggaggctgaggcaggagaatcacttgaacccgggaggtggaggttgcagtgatccgagaccgcaccactgcactccagcctggtgacagagcaagactccatctcaaaaataaaaaataaaaatacaaaaaaagggattttctctaatacttactatgagaacctggtagagctcctggaggtaaaacaaaaatgtggggtcccctttggattgggtacaccaggagtttttgtttgtttgtttgtttttgtttgttttttttttagagcggtctcgctgttgtccaggctggagtgcaacggcacagccttggcacactgcagcctcaacctcgtggcctcatgtgatcctcccacctcagcctccctagtagctgggactacagatgtatgcaaccacacttatctatttttaaattttttgtagaggtggggtctcactgtgtttgcctaggctggtctcgaacccctgggctcaasaggtcctcccgcttccacctcccagagtacttggattacaagtatgagccactgcatccagcctcccctggagattttaaccctcatagttgttcacactgagcctctagcagttcatcaattacagttcaggtttcttatggaagtttgctgtgtgagtgtttctgctctgattactcgtgattctccgtattcaccttctgtctctccagtttgggggcagctgtttgacctgtgacttaacttctcttacagatctaagaaaagttgttgatttttcagtttgtttagctttttacttgctcttaagattgagtgacagatttttttttgcatttttttattgtgataaaatgtattaatacaaaacatttatcatttaagtgtacagttctgtggcattagatacattcacactgtgcaattaggactcttaaaaggaaaaagtcacatactgttagaagggtcatacaaggctttatagaaaggatttttaagatgagcttctatatatcaattaaaagaacatttcagtagaaacatgggcgtatggtatgataattaccagaagacaaatgcaaataagtgctgaacacaggaaaaaaataatcaacctctccaataatcagaaaaattgaagttaatcatcattaactgttgggggagtagctaccaaatttgataaaaactcaaaaattcgtaataattcagaaattgagaatagcggccgggcgtggtggctcacacctgtaattctagcactttgggaggctgaggcgggcagatcacgtgagctcagaagttcgagaccagcctggccaacatggcgaaaccccatctctactaaaaatagaaaaattagctgggcctggtggtgggcgcgtgtaatcccagctattcgggaggctgaggcaggagaatcgcttgaacccatgaggtggaggttgcagtcagccaagatcacgccactgcactccagcctgggcaatagagcaagactccatctcaaaaaaaaaaaaaaaaagaaaaagaaaaaagaaagaaaaagaaaatggtaaggatatagaaaactagtgtttctaggtccattaaggggagggtaaactggtgaagcctgttttggaaggcagtttggccacttctaatagaattgataaatgtacatactctttgatccagcatgtcaactttagggatctttccgtaaaaatacttgcatatgtgcataaaatagtatgtccaagtatgcaacaatttttgtgaaacaacctaaaatagctattagtaaggagactttgcataactggttacctaaaaggaaacagatgtggaggggagagagtttggctttttcattttatacctgtatgcagaaaagagtaacatagcaggcctaagactactatccttagaaaggcctgcttacaatgttatcccttggctggtgtctgggaacttagacttttgggagaatttccattatcccctgataagagtggttcactgtgcccaaactgtacaaacaatgtggtttatgrgctgggcccagtggctcaattgtgtaatctcagtgctttgggaggccgaggcaggaggattccttgaggccagcttgggccacatagtaagacctcatctctacaaaacatttttaaaaattagccagatgtcatggtgtgcacctgtgtagtcttagctactttgggaagctgaggcaggcagataacttgagtccagtagttcaaagttgcagtgagccttaatcatgccactgcactccagcatgggtagcagaacaagactctctctctgaaaaacaaaaataaaaaataatatggtttatgttgaacatctactttttttctgggagtctggaattttggtatattcttaggcagagtgcctgtgtaaccagcctccaataaaagccttgggcactttatttctaatgcgcttcccttgtggacaacgtttcacacatgttgtcacaacttatttctgcaggaattagaggatcgtgtgtaatttcattagaagaggatttttgaaagcttgtgcctagtttcttctggactttgcctcttgtgcctttttctttgctgcttttactttgtatcttttagctgtgataaattatagctctgagtatggttatattcagtgatatgttggatcagttgatatgctgagttttttacatgtgtgtattatctaacccctttattgtgcacattttcccttgatggtaaaacagtgaaagctttccttggtaacattgtaggtgatataataaagaagtgaatcaaaaagtgagtgtctttaggtatgttatttaggacaaggagatactactttaggtaaattattttaaattacacttccagtttttattaccttcatatgtcaataggatgctaaaccacagatgttaaatttcaaatagcattttaagttttgctctctagttttataaatcatattacataaacttactgaactaaatgtgaaaatagggtgccaattcactgactatgtgatgttccgaatgggttatcaatgtctattacgtctagcagacttgccctgctttgttgaatgtgtatttggaagacactaggctctgtgggggaagaaaaagaaataggttattatctgtgaggcagtgaattataatcttgggtgatggcggcattggtagtgatgggataaaatgtgtaaacatgatggatattaaaggcaagaatgacaagtactatatgactaggacatgtttttggaatatawgcctcattagagcagggattttgtcctgttcatctcttatcactagcacctaaaacagtccctgggcataggataggttaggtggagttaatgtgaagccagtcgtcgtcataaaagtgataattgagtttgaagaggaagttctttttattataaatctctgaatccagtatgtcagcaaacttaaaaatattttttgggaatatcataacagttaattcatgaataggtcagaactttctaatgttgtatgaatattatgtgacctggtaatctgagacactttaatggcgcttrcctgcaactagctgttctttttgatactggataggacatttaattctgtacaaacaactactaagggtttctttcccttaaaaaattttttttaattgtggtaaaatacatgtaacatgaaaacctatcatctaagccatttttaaatgtacagttcaatagcgttaagtacattcacattgttgtataaccaatctctagaactcttctcatcttagaaagctaaaactctgttcccattaaaccaccctctttattccaaactcattctcctccttcctccaacctgtagcaccattctattacactttctgtctgtatggatttgacaattctagrtgcctcatataattaggattataaaatattgtctttttgtgactggtgtatttcagttagcataatgtcctcagggttcatccatgttgtagtatgtgtcaaaatcttcctttttaaagggttgaaaaatactgcattgtatgtatatactacattttgtttatctatttgcccatagcatgacacttaggttgcttccaccttttggctattgtgaatgctcctgctgtgaacatggttgtacaaatatctgttcgagaccctgctttccgttctttggggtatatacccaaaaatggaattgctgaatgatatgataattctacttttactttttgaggaaccaccgtactgtttcctatagtaactgtatcattttacatttcacaacagagcacaagggttccagtttctccatatccttgccaatacctgttattctggcttgttttgttttgttttttgttttttgttttttatagagttgaggttttgctgtgttgcccagactggtcttgaactcctcaagtggcacaagcgatcctcctgccttggcctcccaaagtgcttgggttatagttatgagccactgtgcccagcctattttggttttttgatagtagccatcacaatggttcgagtggattgctaagtcatacagggatgtaaaattgtgtctgttgaatcatctatatgaaatacttcataggaattgaagctattaagattttgatgcctgttggagattattggtgacttgctaaaagtaattttagtagggtaataaagggaaaaatgaaattttcagagggtgtaggagttagtggttcaccaggaagtgtagtttctctttagaaagtttggtcagctgaccacagcactgtggcagtctccggccttgcaaaaataacttttttccatatagyggtcaataagtattgaggtctcttaaactacacaagtgactcttcctgtgctatatttgtttttgcagagagaagtgtgaattctgaatctctgctactaatttgggagtctttgttttatatttgtaatcggaggtaaagagaattgatgtaattgtggcttaatatgttaatactagaacttaatattctcaattttactgtatgtttttaattaattaattaattawttttatttatttatttatttatttttgagacagagtcttgctctgtcgcccaggctggaatgcagtggcacgatctcggctcactgcaagctccgcctcctgggttcatgccattctcctgcctcagcctcccaagtagctgggactacaagtgcccatcaccacgcccaactaatttttgtatttttagtagagacggggtttcaccgtgttagccaggatggtctcggtctcctgacctcatgatctgcccgcctcggcctaccaaagtgtatttatttattttttgagacagagtctcactctgttgcccaggctggagtgcagtggtgcagtctcggctcactgcaacctctgcctcctgggttcaagcgattctcctgccccagcctcccgagtagctggcattacaggcgcatgccaccacgcccagctaatttttgtattttttagtagagatggggtttcaccaccttggccaagctggtctcaaactcccaacctcaggtgatccacccacctcggccccaaagtgctgggattacaggagtgagccactgcttccggcctgctgtatgtttttattatatactatgagataatgagattagtgatggattgctttgtaatactttgggagtctgggtttggcagagtgtgcccctatgaagactaagtgggactataatgattgtgttttcttaaatcagaatcaggatgcataaccagatgaaggaagacatagtcgggagccatagttttaatatctagattttggaattttagggtgatttactatagggacaaagtatttgaaattgggattggcggaacatcagtggaaccagcgattgctaagttaaatatatacagggacattagataatggatgatgaggaaatgggtaaaagaaagtgagggccttgtgagttgaaacaaaaataatcaaacctggaacactttccatttattgtattagatatcttcatttcaataaaattaatgtatatgacaaaattttattgtcctcctagttcaagtggtattctacttttatttccataaaaatatactttcaggatagggaaagggtaaacttgcattataagtttgtattttctcacgaagggacaggagagaagaaaaaaatcatttgcttattgtctaggctatgcaaaaaaaaaaaaaaagaacagccttgtttttttattacattttttcatttagtttatgatttgccatatttattattttaaaacatgaagtctgtagtacaaggttttatttaaaaacattctcaaaatcaaggactattactacatgcattcagggaagattatctagctatattggagagatctccttcgctagtaattgatgaaacctaggaattgaaccccagcttctctgacttaaagctgccctattgtgaagtagaaatgaagtgtaagcaatatattcttaagtatactggtcaattctgatttacatagaagacctaacagtttatttactccctactatttgttatgggattatgctgatagtagctattactaatagaagatacggtctaaatcagggaattcgtgttctatcagggatggcatatgtgcatatctaaataattactgtacactgggatatgttctagataagaggtgtatataaagtagatagagatgaggaagtggatgatgggcctgtatgccagtactactatcaggaaaaatttcatgaagatgatttctgtattgggctagtaaaaagcagggagtttcttggcagacaattaggggaataagtgaagcatacattttgacatgagcaaagcacagaatcattttattactccaagactcataagactggccctgtttacttcaaagttactttctttattatcaatcctgagttggcttcaaatgaggaggcatagccatgcatttctgaaaaaaaagggagagaattagtctgttaggcagcagtgggtgaacagtgagcaaagataggaagatgaattttgataggcagagttgcatattttgcaactaaaggtagacattgcagttgtatagttgaaagaccctttggttattttagctgcttataaccattatcgttagtgatgtgcattttttctttttttttgagatggagctctgtcgcccaggctggagtgcagtggtgtgatctcggctcactgcaacctcagcctcctgagtagctgggactacgggcacacaccacgaggcttggctaatttttgtattttttggtagagattgggtttcaccatgttggccaggctggtcttgagctcctgacctcaagtgatctgcccaccttggcctcctaaagtgctgggattacaggcacaagccaccgtgcccagcccatatacatatttttatgtaagtatgtttgtaaagttagagataaaatagtgataatacagtgttactttgagatagtatagtgttactttggctggtactctaattttactgtatgctgctattaatttatatttggggttttaagaaattttggtttggttatcatgcagtttgtagggttaaattaatactattaagatggtgtggtttttcttactgaggacagttaaaattttcaaatataaagccagatgaatttatttatttaacaatggttattgaatgtgaactatgtcccaaacctgctaccgtttaaaattcagatgaattctccagtaattgcctcagaaattttccggagcaattaggtaaaaggagtatgattttatgggttaggtagccttaatattttgccacagtataactcttaagcttaaagtaatttccatttttatttactatacaaagtatagttttaatatttgtatattcttatatgcatatttactaaaagttgtgccttatgaaactcatactgtgttttgttgttgttttttgttgtcgtgttttttttttttttttttttttttttttttgagacggaatctcgcccttgtgccaggctggagtgcagtggcacgatctcagctcactgcaacctccgccttactggtttaagtgattctcctacctcagccttccgagtagcttggattacaggcatgcgccaccatgcccagctaatttttgtatttttagtagagatggggtttcaccatgttggccaggatggtctcgatctcctgacttcgtgatctaccagccttggcctcccaaagtgctgggattagaggcatgagccaccgcacccagctgaaactcgtactgtgttttaagtgttataacattgaggaatttgaggcagtggtgtgtggtctaataacagagcatgagagagcttcagctttgatacttaatttctatatatcccatcttattccgaaaggaatttcagttagcttaatttccattttagtgctgtttctttttgtgttaatttattgttttcttaattgtgctgatttaaaatccagccaacaaattaatttaacgcttgtctgtctaaatgtattttcacttcaaagtctcttcagtgaatatgaagacaattagctatatttttgctaacaagatttgctgatggggagaagagcgagataaaggaacaaatcaaggatgagtgttaggtttttggcttgaactactgttgaatggtggtggtttttggcttgaactgctgttgaatggtggtgctatttgggcatgtttgtgatgcccattacacatccagtggacaggccaatagacagctctttgactctggagagatttaacaaactttaaacattctcaggagcttagatgaacaatgaactgttccactcttttaagaacttgaatcttgacacacaagtgggtatcttaaagtcacattgcatgtgattttggaggcttttgagaatccatttattgatttaggattaggggaatacaaatttagtgttttaggaaattgtttaaagcaaagtgaatattaaactcgaattttgtttgtatcaaaaattctaagtattaaaaatgtttctctgacttgtctgagaaggctcagtaaataattcttcaatttgtaatgagagttttgctttgcattagctattggtctataaagtccagtaagatagtctaatctctgccttcagttttatagattagtggacgagacagacaagtactgaaatacttaagaaatacttttcacaagtggcaatagaacaatgtgttatggactcattgcagaaggctgaggagcagtaaaggagggaaggttcaagaaagccttcaaaaaggaaataacactttagccagagccctrctcaccagtaagagcaaaaattgtgcaactttgatatttaagaaatggagggttactgctagtcrtagtggtggtgagtaattctatatgactaaagcatcaaactctaataagagcattataaaaagaggctagaaaattggacaggcaacattcaacatatcttataattaaagatttggtagtttatgttagaggtgatagacacataggagagtttttaaatgtgggagtaaaatggtcagacttgactttttagaacagtaataaaggagtgcagttatttttggaattcatttatgtgactttttaaagacttctggggtaggctggtgcagtggcttatggctgtaatcccatcactttgggaggctaaggtgggcagatggcttcagtccaggagttcgagaccagcctggacaacgtggcgaaaccccatctctacaaaaaatacaattagccaggcgtggcggtgcgtgcctatagtcccagctactcgctaagggacgctgaggtgggagaatcacctgagcccaggagtttaagactgcagtgagctgtgattgcaccactgcattccagcctgggcaacagagtgagtccctgtctcaataaagatctttagggtagacttaattgcaaatgctttcttaaaggatttgtttgttttcttagcttttttttaaaaagtcacacgataaagggtgtggtgggtacctataacttaatacggacatcatttagctatatttttgcccagttaatacagtaaatgattaaaaattctttcttgctttaggattatatgaaataattaaattatataataaatgaattattttattaatgtttagtgctattctcatacagtctatgaataaggtttcttagtatattatgtttctcaataatacagaatttttttgtttctttcttagtaatagcttcatcagagacaatagaatagtggtcgggaagttaaaatgaaattatatgtgtagataattctgtttcatagagtttaaatgaactttggtgctacttctattcaggaactatttagacattaatgttgatgtgttaaaaaaaaaaaaaaacctgctctaggccaaatcagatcttaatctggtggtaattttgtacccacagagtttattgtttaacagggcaaattagatgtattctctttatatatttatcataagagtaagaaatgtaagtgttctaaaagtacatataaaggtaaaacaattcagaggggaagattatgtctggaggaagggcatcagaaactctgtaggagctagggcttaaaattaaaagataagtaagctttggaggtgtgcaagtggggagaccaccaacaagcaaagaaaaagcatacacaaagacacagaaaaatgattatcatgggattttttttaaagtagaatcttagcaacttttaaaaagacaaattatcaggcaattaccacctcagacctactgaatcagaaactactgggatgaggcccagcaatgtggccctccaggtgattctgaagcacactcaaatttgacaaactgctttgcaatttcaggcagataaattgacctggaatatgcaactctttctgatctttgatctaggaaaggttttaaagaaataaatctgaagtaacaacatttaaagagttccagtaattagttcaataataatagttaacatttattgagccattttatgtactagaccttttgctgagtaaaggttattatctcagttttatagatgagacacagagaggttaaatatgttaattgtcacacagctaagaaagtaccagatccagaattttaatttatgtagcttactataaagctgacatttttyggtgggaaataagttccaacttgtagatacctttttaaagtacaaaacaaagtttttacttgttttatggaccacttttgtatctctgatgggcatgaaaattgctaagaacactattgtagatttttattttaatagagcattctccattttaaactttaattatagaaagcattttaagaaatggcatgctaggctttaagaaaactggataaatgaaaatccaaacttaaataagataaatatttggacgcaaaagttctcaaggttcattatgagaaatgtagtcatttcacataaaagctttgttttgcacatttctcaataaygtaatttgtcatgtaaaagaagaaaagtctggagtgggccaggcatggtggcttacacttgtattccccagcactttggaatgttgaggcaggaggattgctggagcccaggagttcgagaccagcctccgcaacatacatggggagaccccagccctacaaaaaatagtaataataattagctgggcatggtgacatgagcctgtggttccagccactttggaggctgaggcaggaggatcatttgaacatgggagtttgaagctatggtgagccatgatcatgccactgcattccagtttagacaacagagtgagactccgtctgtgaatgagtgaatgaatgaatgaaaaagaaaaagcttagagtgattgtaccaggcattcctgaggtacattcacattttataattaaactcaaccactctttgtactaaattttttctcgctgacattgacctaagatatattcctttcccctctgtgtttctgcaactatttaagttgatatccttctctaagtcagattcaaaatratattttgaaatgcactgatactataagtatctaaaaatacatcttttcagatgcttaatctttgagcagagaaaatacaaacattctaattaaatgtgcaagatgcgtatataagtaaccatgaggatctttgttaatatggagtaacgacatcataaacaatcttttctactgtccttttttatttacgttcaattttttgaacaggcaatacagtcatacaatccaaaagatatgaaaagacataatagtaatgtctcattctcatccgtttcccttaggtacccatttcccttccccacagacacatactttgttaatagtttttcttccagagatgatatatgcatatgtacaagcaaatgcaaatgtttttatttctttttaacaccagtagtaatatattacatatatacatactgcactgtgtatataatgtacactattgtttcctgctttttacatttatacttaatatgtatttttcagatactgtcatcttactatatataaaaagctaactcatttgtttttcagctctctcwtatttgatggtatgaataaaacaaatttagccagttttgtattaagaggtttctttgattgtagttttttgctgttactaacaatgctgcagtggttgggcgcgtggctcacacctgtaatctcagcactttggaaggctgaggcgggtggatcacctaaggtcaggagttcaagaccagcctggataacatagtgaaacgctgtctctactaaaaatatgaaaattagctggacctggtggcacgcatctgtaattccagctactcaggaggctgaggcacaagaattgcttgaacctgggaagccgaggttgcagtgggccgagatcgcaccactgcactccagcctgggcaacagagtgagatcctgtctcaaaacaaacaaacaaagtgctgtggtatgtaactttgaatataaatcatttcatgtgtgtcccatttttatctggaggacaaagttgtagaagtacaattcagagacagggtcttgcattgttaagcaggctggtcttgaactcctggcttcaagcagtcctcccaaagtgctaggattacaagtgtgagccaccatgctcggcccccacttgcttttgaatacagtttttcctctgacacatgtatatatttggagaactctattaccacaggaaatcacaagaaatagcatcataaatgtggggaattttactttgacattgtgccagtgcagaataagattctagtaaatctttatcataaagaaaaaaatgtattcctgttgtaggtctctagtattgtgatgataaaatttagtcgtttttcaaagaaaaagaaaggtttataggcagttttagttccttaaatatcagtatcacaagtagcaaaaattaatgagaaagttaaattttatcagatttatttttcattttatttgtatttaataatttgttgaatggtaaaaccagaatgcttttaatatgtcttgaggcctgaaagaaagttcctttgaaattaaatttcagcaatgtagttgtgtagaatttgaacaattcacaatactgactttcagtgcttctgaaagcaggaagtgtattactgacacgcagaaatattccagcccaaagaacatccctactgccatatgtggtaagaatttgtcactaacccacaaactagttctgtaatgcagtgaataagcagaattggtctttgttggacatttccaattcaatatgaaagaactttgttttgcagtgtcttgtaagtaattattagcttatgccttgggagaaagcctggcacatcatgggtgcgtgctcatggtttattgagagaagaaaattcttttaggcatgtttttaaaacttggttattgtgacccttagttaaaacactgaaattactcgaatatgttaaagactgagttaaatattctgactcagcttattaatgatatctttaaattatattacttttattctgttttccctctttgctgctcatgtgaaataaatatgaatcttatgtttgcacttatgctataaaagaaattatccttggggttaattattaagggatggggaaattaagagctaagagacaggaaaatgagttgtgaggaattggggtcaccagatttcattaaaaatttgaaaatatcactgtttctctaaactttaatttttatttgttgtattttwagcggttaagaagattgtctaccaaatatagaacagaaaagatatatcccacagccactggagaaaaagaagaaaatgttaaaaagaacagatacaaggacatactgccatgtaagttggaaatgcccttgataaaatacatagaaatgctaattagccttttgtaacctaactagttttattcttcctgagtttcactgttaaggaagtagtaattaacctatctttcaaagtacatggaaagataataattcataattgtgctttttgtttttccttctgatcctaatttttgtttaatttttttcctgtaagtatcacagttgctctaatactaaattacttttaaatactgtaaatccaagtgaaaatatcttctgtcaactctctgttcaaagatgttatttcattaaaataatagacaactgaatacattttataaaatgctaacaatgttgatttttcatatatctatacataagaaccttaattgattaattatgcatgagaaaatgaagcataggatgactcaaacatctgtgtgtctactattctcagcagtctgaatatgtgcctctaagtatatgtcttagactgattgcattacattctaatgatattttatttatttatttatttatttrtttgtttgtttgtttgtttagaggtgggggttctcactgtgttccccaggctggtctcaaactcctgagctcatacgatcctcccacctcagcctccccaagtgttgtgattacaggtgtgagccactgcgccctgtctgtattcttaaatagcacagttttctggcaagataactttaactctgaaagtatacttaaggtgtgccatcactttatccagtaaaagctatacgtcatacttgctatcttttaaagctgccgtcgtttttctttcttcataagtattttgaaatatctacattccatcacatcatttcctcaattcttattcagtcttaaaggttgttctctctaaaatgcctttaaagttcttggtgacttttttttttttttttgtgacagtcttgctctgtagcccaggctggagtgcggtggtgggatcttggctcactgcaacctctgcctcccaggttcaagcgactcttgtaccttagcctcctgagagctgggacagctctaatacaggtgcctgccaccatacccagctaattttttgtattttagtagagacagggtttcaccatgttgcccagggcccagtggctttttaattgccagatttsgtggtctttttttactgtttattctaacaggaagaatattgattattcaagaatgttgaactattttgatgccattgatcaatccctatttttgaaattttcttcttccatgataactcttttaaaacacctcttccctctcatctctttccctcttttctccactaacttctttgcctcaatttaatccttcatccttttgttgttctacattattatcagctgtgggatatgtggatagcctgtgttggcagaattaacaagtggcaacataacataatggtatagtgttctgattctggaagttgaaatcctgactccaccagttgctagctatatgaccttggactgatcctctctgtgccttggttttgtcatccttaaaatggagattataataatactttttaggattatttgcacaataggttaatattaaatgcttaaaagtgtacccagtggccaggcgcggtggctcacgcctataatcccagcactttgggaggccgagactggtggatcacgaggtcaggagttcgcgaccagcctgaccaacatggtgaaaccccatctctatcaaaaatacaaaaattagccagatgtggtggcacgtgcctgtaattccagctactcaggaggctgaggcaggagaattgcctgaacccaggaggtggaggttgccatgagccgagattgcgccattgcattccagcctgggcgacagagtaagactctatctcaaaaaaaaaaaaaaaaaaaaaaaaaaaaaccagtgtacctagcacatagtaaccaatcattaagcttttgcaaaataaccagtatacctagcacatagtaaccaatcattaagcttttgcaaaatacactccacttttctcacctgttgtcttagtctgttcaggctattacagaaataccataaacagggttgcttattaataacagacatttgtatcttcaaattctagagactgggaagtccaagatgaaggcaccagcagatatgctgtctagtgaagggtcactctgsctcatagatggtgccttctcactgcacttcacatggtggaaggggcaaacaagctctctcgggcctctttagtaaaagctggtaatcccattcacaaggcataatctaatcatctcctaaaggccctaccacttaatactgttgcattggaatttatgttttaacttatgaatttgggaaggacacaaatattcagaccatagcaccagtctgcctcagaataggggatgacatggctttctggatacttcgtattaagcaagataattttaaggtgatcctacattgctctggaattattcatgcacacattcaaagagttagcctgtccactttctttttctgtcgtctagccgtaggtttctcttttcatatgatgtttcattttcttctttgtttttgaaacggtgtcttgctctgttgcccaggctggagtgcagtggtgcgatctccgcacactataacctctgcctaccagcttcaagctattttcctgcctcagcctcccaagtagctgggattacaggcacccgctgccacatccggctaatttttgtattgttagtagagacgtggtttcaccatgttggccaggctgctctcgaactcctaacgtcaggtcatccgcctcccttggcatttactcattttacagaaagcttctgagggtgtactgtatgctgggaatgcaacaaaaaacaaactggcaaaaatccctgcccttgtggagcttatatgttagtcaaggtgatggacgatacatattaacatatatggtctgtcatgtggtggtaattagtgttattgagagtgtggttcgaatgagggatagggagaaagcagagaatagaagggtaagtttacagttttggctggggtagtgggaaaggttagtggtgtagtgttaaactggtcctctgaaagttctgatttgtattgtttgctgatttctgtgataaatggattatttaccataatcatcacagcaaaactstgaggtaagtactgttatgtgccattttgcaaacaggaaactgagacagagaggttaaaaagcttgtcacacagttaaatattgtggggtaagaatttaaacacaggcggttttaaagccttcactagggtgattttgcctctcaagggacacttagcaatgtctggagagatttggttgtcacaactggggtaygggagtggacaggctgctaatggcatctaacaagtagaggctaggaatactgctacacatcctgcagtgcataggatgcagcccccttccccaaacaaagacttctcgccaaaatatatgagtgtcagcgttgagagaccttgtccaagagcttgagttcttaattactgtgcagtaatcagattgacagtgccttttttcctttaagttatttaaagtttgataagtaggtctccagtaaatttctagttattttgacttgggatttttttttcttttttttgagacagaatctcactcttgtcgccctggctggagtgcagtgtgggatctcggctcactgcaacctctatctcccgggtttaagcaattctcgtgcctcagcctcccaagtagctgggattacaagcaccygccaccatgcccagctaattttttggtatttttagtagagacagggtttcaccatgtyggccaggctggtctcaaactcctgacctcaggtgatccacccgcttcagcctcccaaagtactaggattactggtgtgagccactgcacctggcctggaaatttatattgaaagtaattgtactgagagatatgtgcttatttactgttagataactatttaattcattgcccgggcacagtggctcatgcatgtaatcccagcactttaggaggccaagctgggcagattatttgagctcaggagttcaagaccagcctgggcaacatagcaaaactcaacacacacacgcacgcacgcacgcacacacacatactctctctttctctctctcgtgtgtacacttgtggtcccagctactcagtaggctgatgtgggaggatcacttgagaccaggaggtcaaggctgcagtgaactatgattgcaccactgcactccagcctgggtaacagagcgagactgtctcaaaaaataagatggagaagaatttaattcactaacttcctttgcatgttttaacatgtgcagtgcttgcagaaatagaatttttaaaacaggtttgaggtataatttacatacccatgaaatttatccattttaattgtgcaattcaatgatttttttaaagtaaatttatagagttttgcaacaattaatacaatctagttttaggacatttccatcacccctaaaagatctgagtcttcagccctgggcagctgttaatcagctttctgtctgtatagattttccttttctgtgaatttaatataaatgtaatcatacaatatatagtcttttgtgtctagctcttttaacagtttttttttgagatgaagtctcattctgttgcccaggctggagtgcagtggcatgatctcggctcactgcgacctccgcctcccaggttcatgagattctcctgtctcagcctcctgagtagctgggattataggcgcacatcaccatgcctggctaattttttgtgttatttttagtagatacagggtttcactatgttggccagactggtctcgaactcctgacctcgtgatccgcctgcctcggcctcccaaagtgctgggattacaggcttgagccactgtgcccagcctcttgttaacacattttaaagattcattcacgatgtagcatgcatcgatagttcattcctttttgttgttgaataatattccattgtatgaatgatgaacatattgaataatgctgctatgaacatgtcatacaactctctgtgtggacctatggttttgtttctcttggttggatagctagcaaaaccatggagaggaataattgttttcatttttttgatatttagattatttctaaatatgcttaataagagcaccaatctggcagggcgaggtgactcatgtctgtaatcccaggactttgggaggccgaagcgggcagatcacttgagatcagatcaagaccagcctggccaatacggtgaaaccccgcctctactaaaaatacaaaaattagctaggcatgatggcacgtgcctgtagtcccagctacttgagaggctgaggcacgagaatcacttgaacctgggaggcagaggttgcagtgagccaagatggtgccactgcactccaacctgggtgacagagccagacactgtctcaaaaaaaaaagagcaccaatgaagaatattaaaacagccacccaagttctttctcgctacttctagttcccggcgctttgccgggtgttaatggtggcccaaaatcatgggtgctgtggctttctccctaaggtgtcacaggagctaagggtgccacttaacaaactgcagaagatgcaggcaggtgaaggacacccagtctgctgtggcagtggaatgtggcagaaaagccagctgggagggcggggagcaatcctggaaggcctggctgaccccacaattgaacagggtttggtgtgtcattgcttttaggccttttcagtggacagaactggggtggatatacactcatttatttgaaatcatgcatttgttccatactccaattccagcccaccccttctttgctctatggtcaagtgagtgagaacaggcggctacattttcagccttgttgctcaccgcttccttccagtagtcccatgttgcttcatatctcttcagtacatgtattatttagacccagagccttggcttttaaatcaggcagccccagtttcaaatgtgtcactgccatctcagttttgtgatttgggcatacctctgtctgtgcatagcgatattaacttctatctccatgggtgtgtggtgaggataaaattatgtgcttagaggaaacgttcattccatggtagctattttttattaattctatacttttgaacctattatgctrcctataatgccctattttttttttctttttaatcattggcaaacttctcattccctgagacccagcttgtcacacctctgaagactgctgatatcctcaagatgttccttactccctttccttgctactactttactatggatatatgaacaacattattgtgcttattacatgcaataaatatttattggatgaatgatactaaaattcacatttaaaatgccaaaatcaaaatacacatgatatgctgtataagtagcataatgttgatttttaaatctaatgtgctgtgggtacatagtagaaagcagtgactaccaaatttgcctgtgttttagaatttaaatggggagttttaaaaagggtatttctgtgccccatttttaatttactgaattgaacttactacaagatgtagtactccagaaatcttggattttaatttgctttccccagctgttgaatgattggggatagatgaaataagattggcaaaatgttgataatgaagctgggtaatggatatacaaagattcattatactgttctattttggtgtatgcttaaaattttccatcttagaaaattttttaaaaaaagaaattaccagcctgcatgtagccagcctggcaccagtcctaactatcatttgggagccactattctcatttggatttacagtcaccagaaactttactgaggacccagtggtaaaccagctattgtattctgcctttgagatactttgaatagaggctaatatgtcatatgaataagggtaattaactgagaccccttattactggcaaacatggtaagaggaagcttcctgtagttattcagccatcattatcctaaccactgaatattctattctcattttccagagtcatagcttttttttgtatgtgtatttcctatcccaaatggcatataaaaagggggatgggacatgtagggtggcgtgaaataaatgacagagcattgacaaacatattttaaacattctgtttcttagaatacagtgaggagatgaataattttcaccagaagcaagtatatcttccttatatgtgtcttctacaaatttctaaagaagacttttttaaaagtaaatttatcaattaaattagcagaactgggcctttagtgctatgtataaaatttgagccaatgaaaaataaattagttactattagttgttctttaatactttgctaagaagtttattcatgtctgttaacatttccgtatttccttttgtatttttactgcctttgatactcattcatggattagaagggattataatttgataataataatggcattttacatgttatatgttatggtcccttctaatccagaaacaatgaatactaggcaattctactttaggatttcataatctgaaagcgtctaacctcaaatacttactaactataaaagggaaaggcagtaactttcccttttggtaaccaagcaataccatattaaccaagtgaccaaggttaacatcacaagtactaaagcatatgtatatcatgtatcctctgatgtgttgtgctgagaaggacacaatatcgttctgtggtattaccaaaaattcataacttcgttccagtcatttaaaaaaaatcaatcagagaaacttttttagattgaaggagactaaggagaaataaaaattattattattattatcttgagatggagtcccactctgtcacccaggctggagtgcagtggcgcgatctcggcttaccacaacctccgcttcctgggttcaagtgattctcctgcctcagcctcccgagtagctgagattacaggcatgcgccacgatgccctgccaattttttttgtatttttagtagagatggggtttcgccatgtgggccaggctggtctcaaactcttaacctcatgtgatccgcccaccttggcctcccaaaatgctgggattacaggggtgagccactatgcctggccactaaaaattaaatttaatatgagatcctcgaaagagaaaaaagattagaaaacactgacttgtatagtcttgtttaattaatagttttataagtgttaattttgtggtattattgatcattgtcttatggttatataagatgttactattagaggaagttcagtgagaggcatgggaattctctgtactatttttacagtttttctataaatctaaaattagttctaaataaaaagttttaaacatcagcacaaactggaaaaaactatttgcacttcctgtgacagagggctgattttttctttttacatagatctcataaaaatcagtaggacaaaacagacgtggaaaaatgggcaaaggatataaacaagtggtttatggaaaaagaagtacacagaaccaataaatagattaaaacatacaatcctttgcataattcaagaaatggaaattaaaacaagatatttttactttttggtttgtcagtgatgaaaagtttggtaatacccagtcacccttattacataaccctgtataaattgtttcataccttttagaaggcaagtagcaattcctctgttaggaatttaccctacagcaatgctggtaacagctatatatacattagtgttcattgtagtaatgtttttaataggaaaaaaatggcccatcagtagagtagctaaataaagaatgaaacattcacatgatggaattctctgttacactaaaaagagtgagatagcctagtgcaagctgagtgcaatggttcacacctgtaatccaaacacttgggagcctgagccaggaagatctgtagtccaggagttttaggttcgaatgagctatgattgcagcactgcacttcagcctgagtgacagagtgagaccttgtctctgtattttaaaataatagtaaaaataataaagtaaatctttctgtgctttgggaagagttccaggatatactataaactgaaaagtaatgatacagaacagcatgtataggatgcttgcatttgtgtagtagtttttcaaagtatataactatatgtgtaataagtacacttggaatgggaaaagtaactttaatatagtatcttgatgggagagagccctggaattgaagggcaggggaggcttacttttcactttatacctttctttaaggtctaatttttaaaaattatatacatattcctttaaaagaaatcaataaaaacttaaaagaaaaatatacttcataaaattttttaaagatttttttactctattacctaataataactattattagccaagagcagtgttgaacactttttatatataatctcaattcattaatttgttataatttgctttttatagtttcttgtgaaatatgaaagttacattttttaaataagaattttagcatatgggcttgtgtatcactggttagtattcatcagccacttggtatgtttgttaaaagctgcagaggctgaaaccctagactctgctctagtaaatcagagataatgtcctggaatttgaattttaaaagagttccagagatgattcttattgcaactttaatacactgctttacgtcactggtggtggtgtttttttgttttgttttgttttgttttgtttttttgctgttgttgttttgttttaagacagaatcttcactctgtcgcccaggctagagtgcagtggcgcaatcttggctcactgcaacctctgcctcccagccagtttcaagtggttctcctgccacagcctcccgagtagctgggattacaggtgcctgccaggtggtggttgtctgaaaatttatttcatttcctttcagtttaatgttagaaattaccctgctggtacctagagtccattttcatccattgttttttaaaataaatgttcttaagctgtctatttaaccttacttacgcttcattagaaaatacctgtgtgtcaaccatrcatattttatgaatttttttctcgtagttgatcacagccgagttaaattgacattaaagactccttcacaagattcagactatatcaatgcaaattttataaaggtatgtactaactttaaatggtgtttctctgccatattaatgtctttctacatactagttttgtaaaaactttttgaattgctcaaacatgataccaacagcaaaagaaataaaaataaagccactgccctggcacaatgtttttatatgctttccttctagccttcttattcatatagataaatagtttctacttagttttgtgatagcagagataacattttcttttttatttcttctttcccatggaagtcttacctattactaaattattttctcagttatccctttggacacaaatgaacatcatcaatccccgttgttgacccatataggttgtttccaaatttttaaaatgataatattgcagtaaacatctttgttgttttgaataatttcttaggataaattactaggggtgggattactggataatactgatttaaaattmtagaacatagctttaaatgtaaaacttttggcagttgtcactgtttcaggtggcaacccaaaatccaagattaaatagtctcttttataacctttgtttggataccctttgatgaaaagcagtcaagttcttttttttttttttttttttttttttgagacggagtctcgctctgtctcccagtctggagtgcagtggcgctatctcggctcactgcaagctctgcttcccgggttcacgccattctcctgccttggtctcgatctcctgacctgtgatccacccgcctctgcctcccaaagtgctaggattataggcgtgagccactgcgcccagcgtcaagttctttatggtagcagtagagatagatgcaaagtgctacttgattcagtttaaataaaaggctttttttccatcagctaatctgtgatttttaatctttcaagtgatatgatagtataattttcatttattttatatatggtgtttatacatattttcatgtttttgttgataaaaatgttaactgataaaagtttatgccaggccgggcacggtggctcatgtccgtaatcccagcactttgggagacctaggcgggtggatcacctgagatcaggagttcgagaccagcctggccaacatggggaaacccagtctctactaaaaatacaaaaattagccggtcatggtggtgcatgcctgtaataccagcttctcgggagactgaggcaggagaatcgcctgaacccaggaggtggaagttgcagtaagccgagatcgtgccaatgcactccagtctgggtgacagagcaagactccgtctcaaaaaaaaaaaaaaaagtttatgtggtaaaattattatctatgtcaatattcagcagtcatggttttaaataaaaatttctttttttaacaaagttaaaaaccaaaatgaatacattaaataaaaactaataaattgatagtttgctatttcagatgttgtcaatgttcatattctttttttaaggctgtttgttaaaagttatagtttttacttatgcttaatgacactgattcattgtatgagtcagttatgtaccagtttagtattttagtcagtgacattgtttggtttatattctcatgttcattattaaaaacctgtatagtagatgcttgataaacttttgagttgaatagataatggaaggtagctatggaagaaactaagaaagagctcttcactagttttagtattgttttagaatcagagcatgctctgtatttctgccagttagctttgttgagtaggtattagggcttttgttattaaygcctagataagtaataatttttaattagcataaggcggttcttaaatacctattctgtgcaccatatccagtaaacacaaagtaatagcagtcatcaaaagcttaagtgaattgaatatattttgccatgctttaatatactatgaaagacacattatttggaaatggtttaagttaaaacaacaatattactaatacaatttgaaaccttatattttgggtaatgaaatatttttggtaatcaaaataaatgtgaaatttgcttttaaccatttttagggcgtctatgggccaaaagcatatgtagcaactcaaggacctttagcaaatacagtaatagatttttggaggatgatatgggagtataatgttgtggtaagtaatttacttttcacaataaattttgagaaatacttatgtaataacataggctattttactgaataaggaatgaggggatttttaaaaaatccataattatgtttacttattgctgatgtttactaaaaagatggacccatttttaggatgtctcattaaatttttacaaactaggctaaatattttaagaaggtgtgataataatttaaatcttgtcctaagtcagtaagtaatgatacagctatcaaacaacttataaaaagcagaaaaggattagtgctctaataggtcagtaaaatacttgatagtacagttatactcatttgagtccctcttctcaggaaaatatatataaacacataactataaatagactataaatatgcagtrtaagagaatttcatctatccctggagttcattcagtgccctcttgttcttttggatgaagggaaataatatgcccttagatttagaagcagagaaattagaatactgcraagagctaccctatactgctctgtagtattcttgaaacctaaccatgtgcattgatacttttcattgtgtggatgtggaaaatcagtaatgtgaaactttcatttttgtcttacggctttttaatggaattgtaatgattctaaagcattgacatsctctggtctttgaaagattaataaaaggggggaaattttccagttatttatatttgctgtacttcactttaaaaactagatgtgcttggggattgagaaagagcatgaagaaactttctggatgatgggaacatcctgtatcttgataagatttgtgttgcacagatgtgtgtatttgtccaaactcggagaatgttcactttaggatttgtgcatttcattatatgtaaaatttgcctcaagggaaaaatactggaaacaatataaaaattatgttctagattggccgcgtggggtggctcatgcctgtaatcccagcactttgggaggccgaggtgggcagatcacgaggtcaggagatcragaccatcctggctaacacggtgaaaccctgtctctactaaaaatacaaaaaattagctggacgtggtggcgggcgcctgtagtcccagctactcagcaggctaaggcaggagaatggcgtgaacccgggaggcagcgcttgcagtgagctgagatagcgccactgcactccagcctgggcgacagagcgagactccgtctcaaaaaaaaaaaaaaaaatttattgtgttctagataataatatgcatgctgaagtattttggggagagtgtactgatgttcacaacttactttgaaatgcatttttaaaataagatggattgatagagggatagctatgtgataaaacatggtgaaatgttaatgatagaatataggtgatggctatacaatgtttactgtaaaattctcaactatgctgtgtgttggaaagtttacattataaaatgggaaaaagcaggtgtgatcaacttttaaaatggtgttaaacgcattcaatatttaaataattataaatatatttttaattaatagtgctatttataattaggtaaatatcctaaaagtgatattttaatataatttcagaagtcacaaagtaaatctgtaagatttacatgatttaattcaaaccaaaaacatcatgttaattggaaccaatttaatttgttgctgtatagttagcccttgtttggaaagtctaattttgataatttctttaacttacacatttaatattgaaactacttttttaggcaagccaattatacttctcggtgcaaaattcttgaaatctgtattttattaaaaagtaaaattgtgtttaactgatacgttctttatctcactccccaccatcactttttagatcattgtaatggcctgccgagaatttgagatgggaagggtatgtataatctattcctcttactatttcatttttacggataaatattcttagtcttttattattatagtcttaacataagcggttaatgtagatacttcttttattttggggtactrctgttgcttttatttcatacaagggacaaaataatctctcaagcatgttgttttcttttatattttgtaagtatgttttatcacacacaggcatacctcagagatattataggttcagttccagaccaccacaatagcgcaattcaaacaaattttttgttttcttagtgcatataaaagtcatatttatactgtattatagtctgttaaatgttcagtagcattatacctataaaacacttcatgccttattttatttttttattttttctagacagagtctcgctctgttgcccaggctggagtgcagtggtacaatcttggctcactgcaacctccgcctcccaggttcaagcgactctcctgccttagccttctgagtagctgggattataggcatgtgccaccacaactggctaatttttrtagttttagtaaagatggggtttcaccatgttggccaggctggtttcgaactcctgacctcaggtgttctgcccacctcggcctcccaaagtgctaggattatagacgtgagccactgcgcctggccttccatgccttaatttaaaaataatttattgctaaaaaatgttaatgatcatctgagccttcagctagttgtaatctttatgctggtaaagggttttgttgacgttgatggctgccgactgatcaagttggtatttgctaaaggttggggtagctgtggcaatttttgataaaatacaagacaggaccaggaacggtagttcacatttgaatcccagcactttgggargtggaggtgggaggatcacttgagcccagaaggttgaggctgcggtgagctatgattatgctactgtactccagcctgggcagagggagactccacctataaaaacataaaataagaaacagtgaagtttgccacattgattgtctcttcctttcatgaaagattgctctgtagcatgccatgctgtttgatagcaacagcagttgctgttctacccacagtagaactacttggcaaattggagtcagtcctttcaaacccttccactgctttatcaactaagttgatttaatgtcctaaatcctttgttgtcatttcaagtgctcacagcatcttcaccaaaagtatattccatctcaagaaagtagattccatctcaagaaaccactttattttcttatccgtaagaagcaactcctcatccattccaggttttatcatgagattgtggcaattcatttccatcttcaagctccacttctgattctctttgttgtttccaccacatttgcagttacttcctctactgaagtcttgaacctctcaaagttatcacgagggttggaattaactttttccaaactcgtgttaatcttgatatttcgacctcctcccacgaatcatgaatgtaattaattgcatctagaatgctgaatcctttccagaaggttttcagttcactttccctagacccatcagagtaatcatgatttatggcagctttagctttacaaaatatgtttcttaaataataagacttgaaactcaaaattactccttgatccatgggctgcagaatggatgttgtattagcaggcatgaaaacatattaatctccttgtacatgtccatcagagcttttgggtgaccaggtgcgttgtaaacggaaatattttgaaaggaatttttttttccaaccagtagtccccagtagtgagcttaaaatattcattaaaccatgcaatagggatgggctgggggtggggttgaaaaaacaaaaacatgctgtaaacagatgtgctgacatccaggccttactccatttatagaggacagacagagtacatttggcatgatttttagagcccttaggattttcagaatggtaaatgagcattggcttcaacttaatgtcaccagctgcattaacccctaacaagagagtcagcatgtcctttgaagctttgaagctagacgttgacttcttttctctagttctgaaaatcctagatggcatcttcttccaatataaggatgtttcatccatactgaaaatatgtcatttagtatagcttgtttcatcagtgctcttagcttagatctttggataacttgctgcagcctctamatcagaatttggtgcttcatctcgcacttttatgttatggggacagcttctttccttaaacttcgtgaaccagcctttgctagcttctaactttccttctgcagcttcctcacactttatagaaatgaagggagttagtgccttgctctggattaggctttggcttgtagaaatgttgcagctggtttgatcttctatctagaccactaaaactttctccatgtaagcaataaggctgtttgacctacttaattkttgtgtgtttcctggagtagctcttttaatgtcctccaaaaacttttcctttttgttctaaacttggctgatwagtacaagakgcctacctttctgcctatctcagttttcaacatgccttctttactaagcttaatcatttttagcttttttatttaaagtgaaaagtttgtgacccttttcacttgaatactttgaggccattgtagggttattagttagtctaatttcaatattgtgtctcaggaaataggaaagcccaaggagaggaagagagactgtacaaaaacttgtcaatggaacagtgagaatgctcacaacatctgttgattaagtttgccattttatatgggagcagtttgtagcaccccaaaacagagtagtaacttcaaacatcactgatcagattacaataacagatatcatcataatgaaaaagtttggaatactgcaagagtttccaaaatgtgacacagacctgaagtgagcatatgctgttgaaaaaatgataccgatatacttgcttggtgcagggttgccrcaaaacttcaatttgtaaaatatgcagtgtctgagaaacacagtaaaatgaggtatgcctgtacttaacaataattaattaggtattgttacttagtaaacttcaaatattcagtggtgttgtaactagaatgctatctatggactgaaatagagaggtatttttaaataggaataaaattgaacaagtggaaatacattttaaaaatctggttatcattaatatatggtttgaatttttgtttgtttgtttgttttgagactgtgagacagaatcctgctgtgtcagtcaggctggagtgcagtggcgcgatctcggctcactgcaacctccatctcccgggttcaggtatatttcctgtctcagcctcccgagtagctgggactacaggcgcctaccaccatggctcagctcatttttgtatttttagtagagatggggtttcactgtgttggccaggctggtctcgaactcctgacctcaggtgatccgaccgcctttgtctcccaaagtgctgggattacaggcatataatcccatgtaatccaccgcaccaggcctgaatatcttgattagtctgtttgttaataccacagtatgttttgtttgtttcctatcttcaaaactgagagaagataatttcttaccctgattttctaacattggtatttttatgctatgtcgaagtaaaatttatttcaaagctattctggtatcctacagcatcatattctgtcctcactgtaggaggtaatgatatatttacagataattcatatttaaataaaacttataaagtgtggtcttctataaatatggcatacaaatcaaacttacaaattacatagtgattttatttgaagttttttaatactaatgtagttaatatatttaaaattatctttagtttgtaaatatgttaattttttcagtaagcaatatattgcaaaagatacatctttcagttatattacataaataattgggaagccttaatttattccattactcccaactatttcctatgtcagtattaagtaatgttggacagaaagtgaataaaatgagaaaatataaaaactgagaaattattaagtaatcaagttatctatttaagggttgtcaatatatacattaatattattaatcaattgtctaagagaatttaaatgtcattctcctaatgttttaagttactgttaaggtttaggatgtatttctcttttcattatattagtaagctcatagtatgtatcaagttattgatgaaaaatcaagtagcattgagtacataatkttttgaagcgaaaggtttttgtgattcactgtgtcttattagtaatagattatgagcaagttaggaactatgaaattatctgataaccttgactttgatcttgactttgaatgtgacctggtggaaaaagcatagataattaaatcagacaaacctaccttttacaagcattttgaccatggtgcagtacagttcactctgagcttcagtttcctcacatttgaaaggaaataatacccaccttgcagtgttagagattatgtatgtatgatatttaacacatagtttttgatatcattattagttttataccaggaatataagtaccaatataatcttattactgctcatctgaatgaggggcattgttagtcacaccgctttctattcttaactaaattaatctcttacaacttgttttctatctgtttcaaagtattaaagttttgtcaggtaaaagattaaaaaaatgttttttaaactctcaaaaataatttaaggtccaagtgtaagtatagtggctcacacctgtaatcccagctacttgggaggctagggtgggagaattgcttgagcccaggagtttgagaccagctttggcaacatggcaagaccccatctctattttttttaaatcttttttttttttttgtggggagagacagtctcgctctgtcgcccaggcttgagtgcagtggcacaatctcagctctttgcaacctgcatctcccaggttcaaacgattctcatgtctcagcctcctgagtagctgggattaaaggcatgtgccaccatgcctggctaatttttttgtatttttgagtagagacaaggttttgccatgttggccagtctggtcttgaactccttgccttaagtcatccacccacgttggccttccaaagtgctgggattataggcatgagccaccacgcccggcctccatctattaaaaaaaaaaaaaattagccggttgtggtggcacacgcctgtggtcccagctactcaggaggctgaggtgggaagatcacttgagcccagaaggtagaggctgcagtgagcygtgattgcaccactgcacactccagcctgggtgacaaagtgagaccctatctaaaaaaagagagaatttaatttaatcattttctgtaaacatctcttggaaaatgagatttggaagttacctgtgtttttaagcctctaaaatgttagctaacccaacataccagacagttctactttgtttctctgtgagcattactgtcaacttatagttcattcagcctataggtaataactccatttactgtatttggaactgtgaagatttaattaggaattcattaaccaatgcatttcccactgcttaaaaggtttatttaagctagatggtcacttagagactttgattttattgggccttgatacaaattgcatcatttcttaatacctgaatcattctattttccataaagttaggcttttcattcacttaactgattttctaaaatgatgaggtgcttgatattagaaactgatgaaaatttatcattctttttctatacctgtttaaaataggaaggtaagaggagaaattatttgactacactttctgtaatctctaataaaattgaatagttaatacatcatgtttgtgtagggsttttaccatctgtggtacatttgaaatacactgttatttaacaaacatgcaacaactctgtaagataaggattattattcctatttttacagataaagaaactaaaggtcaataaaggagtagaattagtacttgcaaaattcttctgattccaagtagaatattctttccacttcatcacatattttacatttaatgagaattcagccagatatttgtagagattgtcatgttacaagcaatacaacttacctagcaacctttataccaaatacctccttgtaccagacacttttttaaaattagtttttcttgtctagaggaggatctttggtctactctgtagacctggcagatagcaatgaacagttatgcacttaagtcagtaaggttcttatgactattcttggagaagacacagtagcctattttttaaaacaactgggtaaatctaagctctctcagctccatgcctgctaatgtgggtttttctgttttggggaagtagaagtaagcagaacctcaggacacaaaatatttataacagtttaagaaaaacttacatgaattacttactaatttttttttttggatgacagaaaaaatgtgagcgctattggcctttgtatggagaagaccccataacgtttgcaccatttaaaatttcttgtgtaagtatccatttttgtaaacacttttttcagaaaattggcatgctatactgatgaataattaaattataatgtggtatgaacccaggcttatagacgccaaggactcacaaacctatgcttacatttaaaaaaattttgtttatatactgcttttaaatttggaagcttttgggttgacttcataaatgcatattttccttgtatcttactatattgattgtgtgttagtctttgtatatcaattgatagtaggtgtttacatgtaaatgaagtaactgtgcttttaatatttggaaatcgtgtattcatttcaaattgattaaatgggaaagacttggtaactggagtacagtgtatcatattaacccttcatatctaattgtgctctcaaaaattgttataattatatataaagataagtttaagacctaccatactggaagtaaagattggtcctgtctggcagattatttgatatgaaacttaaaatgttttcttaatatgtaatgacctctggaaatgaattaaattcaagctcaaaagctaacacagcaaaaatctgagaaaatgaataaaaaaatgaaaacagtgaaggaaataggagtaggaaaaagaaaggcatggacaaaaagaaggaaaatataagtgaattttaaaatagaaccaagttttctttaggtgccataaaaagactgtaattgaacataacctaaaaatcaattaatttaggccaggcacagtagctcatgcctgtatcctaccactttgagaggccaaggcgagtggatcacttgaggtcaggagttcgagaccagcctggacaacatggcaaaactccttttctactaaaaatacaaaaattagctgggtatggtggtgggcacctgtaatcccagctacttgggaggctgaggcacgagaattgcttgaatctgggaggtggaggttgcagtgagctgaaattgcaccactgcactccagtctgggcgacaagggtgaaactccatctcaaaaaaaaaaaaaattaatgaatttgcctatattagggttctccagagaagcagaaccaatagaataagagtgtgtgtgcatgcgtctgtgtgcatgtgtatacatttaaggagatttattacgaggaattggctcaggcagttatggaggctggccagtccaaaatctgcagggtaggctggagatcctggagagccaatgctgcagtttcagtctgaatgctgataagctggagacccaggagagctgatgttcagttctagttggaaaagtctgttgtagaatcaggatgagccgatgttgcagatgaaggcagcctgctggagaattctgtcttgcttcaggaggctggtccttttgttgtattcaggccttcaacagattggatgaggcccaacaacattatggaggacagtttgctttactcagagactaccagtttaaatgttaatcttctccaaaaacagtgtcacagaaataactagaataatgtttgaccaaatattctgggcacactgtggcccagccaagttgacagataaaattaaatatcacattscttattcagagtttcttgtttttgactttgttttccatgattaaacgaaatataatttctgtggttttacttgtcattgctgagttcttgaactccataattttatgacttagttayactcatgacttctgaattcctctcatacatacccaaagtttagtgctttctaggttgacataaaaaaggacaggactgwatctgtattatgctgtctactttataaatcaatgttgtttttataatgttaactataactcaccattgaactttttggatgtagtatttagtcaatattcttaaggtgctgattagaattaactatttgtggggtaaatgtaaaaattttaggccaggtgcagtggctcacacctgtcatcccagcactttgggaggctgaggtggggaggattgcttgagcccaggagtttgagacaagcccgggcaaaatagtgagacattattaacatttttaaaaacgttaaaaatcccactgcatttccttttatttggcttgaataatacccaatacacaccacactgtctacttcagtggggaaataccaaccctccttcaccaatccagaaagaaatctgtaatattagattcctcgacagtgtagaaacctagttctgtgtagtatggttgttttggacatttgtaaatttatttttaaagttttatttgtatatatctttttgagacaggattttgccctgtcagccaggttggagtgcagtggtctgatcatggcccactgcagcctcaatcccccaggctcaagtgattctctcacctcagcttcccaagtagtcggggctgctggcatgggccactactaatttttgtctttttgtagagacgaggtctccctgtgttgcccaggctgattttaaactcctgagctcaagcagtttgcccgccttggcctcccaaagtactaggactacaggccaccacacccggccaaacatttgtaaatttagatgtaataagataactatagtgaatattataattcaagagaaaatacagtgcttaacatcaacaacaaaccaacttgaaatttttgaacatttgagagtcaggaatagtaaacaatttacaataatggatataaggcagaatgcaatagtttataatgtagaaaatgaattgattcttgggggatggtttttcaattaaactaaaaggtatatctctataaatggttcacaaagaaaaaacaaaacatggagaaagatttattaaaaagaaaacagataacttgaaaggtctctagataagtggtttggtttgatttgattagtaacgacttggtttaatttgtcagcgtcaggattgatccatgctgaagaaatattttctttgataattttaaaatggaaggtaatttgtttgtcttataattggttcagacaactcgggatttgttatcattgacttaactgcaaagaaaaatcaaatttataaatagcatgttggtaaaaatattcgtagtaagtcatttgactacttggcagtcagagtttgagactgagaaatgactgtcttttctagagctctctctcgatgtgggatgaggacaagggtaaagtggtggtgaaagggtgaagactggttagcaggagctcaatcacatgttgccacatgtaagcacttagactggatgtcagcacactacccatggctcagatctagcccactgcctgtttcgtaaataaagttttgttagaacacatctatatgcattaatttatgaatttgtctatcacaatagcaaagttgtgtagacaaagactttgtggcccaaaaagccaaaaatatttactatctggtcctttacagaaatatttgaaaaagttcaaatattatttgaaaagttcaaagtaaattactgtaattttaaaaattaaagcaggtataatagtattatttttattaataaaacaacatacactgttgttcttcataatccttgttctaaactatctgtagttttaaccaataaggcaaaaagaataatttgcttagtgatagactgatgtagattaacactttgactaaatcacagtaagagacctttaaagtggttatgttatcaacaaccacaataataataataatttggggtgttcttccctcttccttcttcagttgctatccagttaattgaaacttgaatgttagggaaaatcatgtgttatggaaaggtaaaatggttgaagataggatatggtggttggtactgaggaatgacattctatgtatatttacatgattctgggggtggttactactttgcagatattttattgggtggtagatgcttaagtaattcgtttagacacttttttttaggtataagtaaaacttacaaaagcaaattgatgtttttttctttactgtctatacaaatttttttaatgaattttttttcttcaagtttcttagtttagtaggtaacttgattcccaaattcacttctcttatttgtacatattgtttgggtctatctgttaggagactttatctgataggagacttcattttaaggtttttaaaaaaattttttttttagtgttttttgttttgagacagggtctcactgtgtcacccagactggaatgcagcgacgtgatcgcagctcactatatagccttggcctcactgctgggcttagtgatccacctacctcagcctcccaagtagctgagascacaggcttacgcctcaatgtccagctagtttttgtatttttttgtagagacagggttctgctatattgttcaggctggtcttgaacccctaggctaaagcgatccgtccacctcagcctctcaaactactggcattacaggtgtgagccactgcctaactttttcaagactattttttttagagcagttttaggtttacagcaaaattgagaggaaggtacagagatttcttatatacaccctgtccccacacatgtagccctcattatcaacattccctaccagagcagtctctttgttacaattcacaaacctacattgacaagtcattatcaccaagagttcacattttacattagggttcattcttggtgctatacattctgtgggtttgaagaaatatatgatgacgtgtatccaccattgtggtatcatacagaatagtgtcattgctctaaaagtcctgtgctccacctattcattcatctcacccccttcccaaccctaggtagtcattatttttactgtctccatagttttgcctttttcagaagtcatatagtttgtttttgtttgtttgtttgtttgttttgagacrgagtcttgctctgtcgcccaggctggagtgcggtggcactatctcagctcactataacctctgcctcctgggttcaagcaattctactgcctcaacctcctgagtagctgggattacaggtgcgcgccaccacacacagctaagttttgtattttcgtagagatggggttttaccatgttggccaggctggtctcgaactcctgacctcaagtgatccacctgcctcagcctcctgaagtgctggaattacaggcatgagccactgctcccagctcagaagtcatatagtttgaatcatacagtatgtagccttttcagattggcttatttcacttagtaatgtgcatttagggttcatccatgtcttttcatggcttactagctctttttttccttttattatttttaattgacacatagtatctatacttattaatggggtacatgtgattttggtacatgtatgtgtaatttaaaatgtggagtgactaaatcaggataattagcatgtctatcacttcaaacatttcaaatgtttgatgacttttagaatttttttataattatcaggtacatctggaattttaaagattaattttatattgtggactttgatacaagtattttatttgttttgatgtgtctttttgttttaacgttttcactgacttagaaatgtttctctttatttaggaggatgaacaagcaagaacagactacttcatcaggacactcttacttgaatttcaaaatgtaggtacttaccatttatagactatctgtaagaatagttttcaggctgggtgcagtggctcatgcctgtaatcccaacactttgggaggctgaagtgggagggtgacttgagtccaggggttcaagactagcctgggcaacatagtgagatcttgtgtctacaaaaagaaaaaagttagccgggcatggtggcatgtgcccatagtcccactcactcagaaggctgagcccgggaggttgaggctgcagtgagccatgattgtgccactgcactccagcctgggcaacagagggagactctcaaaaatggttttgagaatagagaatagttttcaaagagaagacatagagagggaggggagcgtgggctgaaaaaccacctattgggtagtatgctcactcctttggtaaggatcatttgtattccagacctcagcattatacaatacacccatgtaagctgcacatgtaccccttaatccaaaataaaagttgaggccaggtatggtggctcactcctgtaatccccaacactttgggtggctgaggtgggttggtcacttgaggccaggagttcaagaccagcctggccaacacggcgaagccccatctctactaaaaaatactaaaattagctgggcatggtggtgcacacctataatcccagctactcaggaggctgaggcacttgaattgcttgagcctgggagacagaggttgcaataagccgagatggtgccactgcactctagcctgggcaacagagcaagactctgtctcaaaaaataaaataaaaaataaaataaatgttttaaaaatagaaaatataatactactacctaaatgttttatttggtaaaatgggtttgctagaaaattattttgctttatatctgcaaaatgcaaataatatatataatatatattattattttgctttatatctgctttatagttttttgtaagtaaaaaaagtaacagcaatttttatttttaaagcatgtgaagttagtttttgtctttgcaaactaatcaacttttagctactaaaaaaataaaacaagctatataaatagtatactatgttatttaacataattaatgaaatttggtaattttttagttacgaagatgaaatgagagtgtaatatttagtcttgacatttatgcttatcacattacataaaaagtaatattaattataacataccctaaatttgttaaatttggaatagttatascttctttgcagcaaatatttttattctattgcagtaagcaggttattgcattgtttatataattattaccctgttttactggtttacaatttgttaaagaaaagtcactatcaaagctaagtcttcatttagatatatattgtttttagttgaaaccccccacagcgccccgacttttttttttttttttttggcaacagggtctcactatatattgcccaggctggactcaaactcctgagctcaagcagtcctcccatctccaccttcctagtatctgagactatagggatgagccaccaaacccagctaaattttttatagtttatagagatgaagtcttgccatgttgctcaggctgctgtcaaattcctggccttgagtgatcttgccttttgcattggccacccaaagtgttgggattacagatgtgagccactgaatctggactggttgctaattttttaatctacggtaataataataagtaccttaatgaatttctgtggtagatcaggcatcttaattctgctaactgcatcatatccagatactgttacgtctgttgcacatagatgaagatacagaagctttaagaagttaaatagcttacctgaagttatttaggaaatggccaaagtaggaatttgagtatggtttgcttarattccgagtattgctctttctgttaaacacctgcaataaccattctcaaaacatttgacatcagtactcctttacattcttcaaagttattgaggatcccaaagtttttgtttctgggggttrtatctttcagtatatactatatttgaaattaaaactgagaaatttttaaaaaacatgaatacataagcatatattgtattggctgttaaagaataaggcacgtracattttagtattattctgagaattatttaaagctcatagactccctcaaaagggttgaggggagggggtacccagaccgtatattgagaaccactaatctgtaagaagactagtgagtttggcattggacaaattcatctctccattctttttcagtttaatgttctgttagtcttctgattacaatgratactactctaacctactctaacatggtgcttacggtatattgctcatccatttaatagtgtagattagttaaatagtatatatagtgttatgtttacagtacatgctctggaagtagaactgcctggtttagagcccacacttgtcacttcttaggaaagtttgggcaagttattttatctgtatatctcagttataaaatgaggatggtattaacagtactttcctcatggaaattaaattgttacatgtgaagcccttaggtatttggcatgtgtttaacagtcaataagtgttggctattatttatttgggtttttttaaaagcagtgctaaatgccacacaaatttcttagaaatggcagtttaaatgagctgtgcaactttaaactttgcaaagtattttcataattgttgactttctgtttttcttgaaggaatctcgtaggctgtatcagtttcattatgtgaactggccagaccatgatgttccttcatcatttgattctattctggacatgataagcttaatgaggaaatatcaagaacatgaagatgttcctatttgtattcattgcaggtacaaaagaatttcccaagtttataaatacattatttaagtttgatgttacacaaggttttatttctgcattaatatgttagtaatcttgaatttctcctagccttgatacaatgtttgggactagggccttgtaagttgatgtggtctcatttggttgacagaccgtttagagtattgttgcattaaaacacaggatcatctatttgaaaatagtattcacatggtgggaagctatagaacatactctttttactgttcactgattagagcatataatctcagatcctcatcatactctactttctaaagtcagtatggtagtattttcttttaatcaatttccctgaaacaatgaccaagcaattttcattcctgataaacactgacatgagatttttaaaaacaggatattgctctgatgcccaggttggagtgcagtggcacaatcatagcttactgtaaactcaaactcctggcctgacgtgatccttctgcctcagcttcccaagtagctaggactacaggcatgtgctaccacactgaactaattttttttaattaaaaaaaattttttttaagagaccaagtcttgctctgttgcccaggctgatccgaactcctgtcctcaagtgattctcccactttgctctcccagagtcttgggcttacaggcgtgagccactacgcctggcaacatgactttctttttttaatatatgtaagatgtacatacgtaggtcttattgatctaagatatcatcaattctaagacacaccattattatatatattaacagtaaaaaaatcactgccaattataaggggacaatgtcatttgtaagaagccattggtggtaagatacataccaatctcagagctgttacattgagatgaaaaagtgtgttttagtttgatgaaaaactaaatgctgtttttattcttggggaacatcagtttccacgtttgcaccacttcctgtcatatcatgaaattttataatttatagctactgaaaaatttaaagccggaagcaagcattcttgtagtaaagtaataaaaactattgatacacatttactagacatttttattatgttttatagtagattacttcattataaggattacataaaattcaatgattactgacctagttaagctacctctgaatgtgaaaggacaagtataggtgcacctactttaaattgcacaatataaatcttttcatttattcaaataatatttgaagttcagttaggttttgcaaaattactcgtttggatgtgttaagaaatcatgtaaactcttcctttgactttgggggaatgaacatgagatttgtttattcttggggggcrgttaattttgtattctagaaggggggttaatgtataatatattktagctaagagaaatcagtttaagataaccaacttttcttaatctaacattttggcttatttctgtcatctggtcattctcatacaaataatacaaagctaaatatacataatacatatgcacatatatgtatatgtatacattatatgtaatacataaaacaaagctaaatttgtattatggatttaggagtgtaatggaaaatacccctttaagaggaaaagcacaaaactgaattagtcaagaaaataataaatgtttgcaataagtgtcatgaccgggtatagtggctcagtgctttgggaggccgaggcaggatgattgcttgagcccagaactttgaggctgcagtagacaccaattacactactgcactccagcctgggtgacatagtagaccctatcttttaaaaaaaaaaaaagaatataggtatcattataatatgggtgatacaggatattttgaaacctaatttttggaatttcattatataggtatgggtttctacatagtagaagctacttgaatccttagacagtttttctactctgaatttttagtttacattagattcttctaaaggccttacagtcatagtacttacttcataagactgctatcaatttattcctctaagggacttgttatctgcattcacatttgttataaaaagtaaatgagatttttcaaacttaagagatttattttttattatttacatagttaaaatattttttcagtggagttgaagcattgaagatagttttcttattcacttggtttgaccgtaatgctcataattaacgaagtaaaagggctactttttattcatgggccaggaaagtaacttgctggtggagatgtgggaatcagttaacaacttggttcattaaaactatttttttctgtggttaattcagtggttagttgaccatttaattaagtaggattgaccagttaaaaataaacaatatgtttaattatagaattaaaagataaagaaattgctttcactttgacttcttataagttagttaaaataatttcctgttcaatcataaatccatttgtataggaaggcttttcatcaaaaactaaattgaccgttaaatatttttagacaatcaaaacagtacgttaactgtaaggacttagaaaacacrtccataaaagcaagaaaattcttttgctttccactagttccactggagataaccattgttaaaactcgagaatgtgtcctttcagtgtgtgtatgtgtacatacagtattgttttgttttattttgtttgacggagttttgctcttgttgcccaggctggagtgcagtggcacaatctcggctcactgcaacctccgcctcaactattttaaacagcagtttaaatgcttagtggccactctgtttttttgtttttaatttactttaatggccatcttattgttaaatctttgagcacatctgcagttattaggacaaagttattattggataaatatccagaagtgagatttgttggtcaaggacataaacttttaaagtattttaatgagtattttttaatgtgttatccagaaaattgatgctacttaattctgccactggcagtatgtgagagtacctatttccctataccttccccaatactgtgtgttatctttttgtttgctttttttttttttttttttttttgagacagagtcttgcactgtcgcccgggctggagtgcaatggcacgatctcagctcactgcaacctctgcctcctgggttcatgcgattctcctgcctcagcctcccgagtactgggattacaggcacacaccactacacccagctaattttgggtattttttagtagagacggggtttcactatgttggccagactggtcttgaactcctgacctcatgatctgcccgcctccacctcccaaagtgctgggattacaggtgtgagccacggttcccagcctttgtttgcatttttttcttcccttttttttttttttttttttttttgagacggagtcttgggctgtcgcctgggctggagtgcaatggtgcgatcttggcttgctgcaacctctgcctcctgggttcaagtgattctcctgcctcagcctcccgagtagctgggattataggcatgcaccaccacacccggttaattttatatttttagtagagttggggattctccatgtttgtcaggctggtcttgaactcctgacctcaggtgatcacctgcctcggcctcccaaagtgctgggattacaggcgtgaaccactgcgcccggcctcatcttttaatagttatacaagtgctttatatattgaggacattaacttttattcatgttgtaagtaccatggtttttcctgtcttctgcctgtttgcaatacataagtttcattttgtcatgtcagatttttgaatggtttttgtccattgagatatttgtacatagaaagtctttccctaacacaatagtgtatatattttgcatatatttttagtactttcatagatttactttttaacatttatcattggataaatatccaatatgtttatatcatatatatatatatatttttatccacctggattttttatggttaaggtatgtgatcagaatttaattttttgctcttcattgatagctaacttctcctttgccacttactgaacggtctgatctctggagaattcactgttatgtaagaaatgttacatgtactcagatctgttcctgaactttctattgtgtttcattgatctggttatctgtatctttatgttatacttttaactatcaaattttagatatatataatttatcccagtaactcaactaaaattctataaatgttttgatgcacagaattcacaaatgtatcaactaaaaattaatataattgattatgtttattaagagttttaaaaaatctttctaggttgtttatagtgtacttttatcaggaattttaggttacatgtttaacaaactgctgataggtatacatttcaaaatatgcattaaaatgttacacaactttgtgggggtttttgccaaagattattctggtgatgtcagtaacatcttataattactcatagtgattttcaattctaagatgcataagcctttctctagttgagaagcagttactttaaaatacttttgtcatgaggtttttttttttttttttttttttttttgagacggagtctcgctctgtcgcccaagctggagtgcaatggcgtgatctcagctcactgcaacctccgcctcccaggttcaagtgattctcctgcctcagcctcccaagtagctgggattacaggcgcccactaccacgcccggctaatttttttttttgtatttgcagtagagacggggtttcaccacgttggccaggcttgtctcctgacctcaggtgatccgccctccttggcctcccattgtgttgggattacaggcgtgagccactgagcccagcctgtcatgttttaaaataaaaaaacctatggtatgttactctaaagtccccagctcccattagttttttgggatatgagagcatatcattgtcttgttcttttgtggaaatcactgctgttgctcaatccgttttctagggcttatagcattcttcacctttcctataccttctatagattgaaatgatgtaccatttcctcctgtactctaaaacaagagccatcttttttttttttttttttttttttttgagttggagttttactcytgctgcccaagctggagtgcaatggcacgatcttgggtcactgcaacctccacttccccggttcaagtgattctcctgcctcagcctcctgaatagctgggattgcgtgtgtctgccagcacgcccagctaattatgtgttttcagtagagatggggtttcaccgtgttggccagggtggtctcaaactcctgacctcaagtgatccaccggcctcaggctcccaaagtgctgagattacaggcatgagcccctgcgcccagccacaagagccatcttgaacatagaataaatgtctctgtaagacgttgttagctagtcacattttctgatgtagcattagacttccagagtgacaacttagtagctattctctgtgtcacttactcttggaagttccttaaattaatttttgtttttctttttgagatgaagtcacactctgttacccaggctggaatgcattggtgccatcatggcttactgcagcctcgacctcccaggctcaagcaatccttctgccttggcctcccaaagtgctgggacaacaggcatgagccactgcgcccaaccccttaaaaatgaaatgtttaaaagatagaagacaataggccttccttattcaagacttcactgtcctcagtttcagttactcatagttcaaaaatatcaaatggaaaatttcagaagtaaacactttgtaagttttaaatgctgcaccattctgagaagcatggggaagtatgtcctgcttgcaagataaatcatcccatggtccagtgtgtacacactgtagactctaccagcccattagtcacatagtagatactgcagttaccagayggactgtcatggtgtcccagtggttatgttcacatgacccttattttayttataatggcccaaacctcaacagtagtgaggtagtgactagtgatagattgttataattgttctaatgtattattagttattgttgttaatctcttgttgtgcctgatttataaattaaactttatcataggtatgtacatataggaaaaatcatagtgtatatgtatatgtattctgtgtaacagatgttgccatgaacacactgtaagttgtattttgtttattactaagtagaattttgtcaaacttcttaaatgattttttgtttctgaatattaacatgtctatccacatttattttatagttgttttatcacaaaaatcaattgtttttcaaactttatatccttagtgcaggctgtggaagaacaggtgccatttgtgccatagattatacgtggaatttactaaaagctggggtaagaataattttttgtagcattatgttcaattgatctattatgattttcaaacttaattataattgcagtaaattatagtgtatattttattatacatgttattttttccaaagtagttttattaagtaagaaataaaggtagtgaaggccgggcacagtggcttacgcctgtaatcctagcactttgggaggccaaggtgggaggatcgcttgagccctggggctcgagaccagcctggggaacatagggagacccccgtctctaaaaataattaaaaaataaaatgattataaaaaataaaggtggagaaaaggtataattgctgcatattgcctttgataggatgcattgggcaacaatgtgacagtgttctaggtgagtgaatacttgcattaggatataaactgttactgacttttccaatactaaattttcattgcctttttttttttttcttttttttccgagatagagtttcactcttgttgcccaggctggagtgcgatggtgcgatctcagctcactgcaacctccacctcctgggttgaagccattctcctgcttcagcctccctagcagctgggattacaggtgcctgccatcacgcccagctaatgttttatatttttggtacagacagggtttcaccatgttggccaggctggtctcgaacttctgacctcaggtgatccactcatctcggccttccaaagtgccgggattgtaggcrtgagctacggtgcctggcccattgccttttatgtttactctaggtataagtgtatttcactcagtatgtatttatgcctgctggagacattatagtattgtagtctatgaatgctgactcgagccaaattgcccagattataattctggctttctcatttactagctgtgggatcttggtcaaaatactaatcccatagtgcctctatttctttatcagaaaataggggtcatagtagtagtaatgcataagaattaaataacttttgtgaagttcttcagaactatgtggtaaattgtaagtactcagtttattgttagtgttgattactgttgctgttgtgattgttgttcctactactgctttttccaagaaatagtgtttgatactgtggatgatacagagataaataagatacagccttcattatagatttgaaaaacaagtctcttcattatgtatacatttgattcttttgctggttccataatgtgttcatttctagagaggcgcctttaatccttcatagctttatagtttccatgaattgttcatctttgtcttgtacagagtagaattaataaaatgtttattttttctttttcttccttcttccccttatttctcttttttccctgccatctctccattttttattgttgcaaggaaatatttacatgttaaacagttccttaaaaagccctctggggttaaatatttttttcctcaaaaactataatcatctaattctcaaatgaaaatgcttaagtgaacaaaatttaactggaattcgatcacattttaacataaaagtcaaagattaaaattggartgagaagggacacataaatgaatgctagcaaacaaaacaaacatttggtcattttaaaagttgtgtattttggataggtgccatggcttatgccataattccagcacttttgaaggctgaggtgggcggatcacctgaggtcaggagtttgagaccaacctggccaacatggtgaaaccccatttctactaaaaatacaaaaattagccaggcgtggtggccggcgcctgtaatcccagttacttgtcaggctgaggcaggagaattgcttgaacctggaaggcagaggttgcagtgagccgagattgtgccattgcactgcaaactgggtgacagagcaagactccgtctcaaaaaataaaataaaataaaagttgtgtattttgaacatagttctctctctctcttttttttttttttttgagatggagtctcactctgttgcctaggctggagggcagtggtgtaatctcggctcactgcaacctctgactctcaggttcaagcgattctcctgccttagtctcccgagtagctgggattacatgcacgcggcaccatgcctggctaatttttgtatttttagtagagatggggtttcaccgtgtttcgggctggtctcaaactcctgacctcaggtgatccgcctgccttggcctctcaaagtgctgggattacagacatgagccactgcacccggcctagttgttaagtcttcatgtaaaaatcttggctgggcgcggtggctcacgcctgtaatcccagcacttcgggaagccgaggcgggcggatcacgaggtcagcagattgagaccaccctggctaacacggtgaaaccctgtctctactaaaaatataaaaaaaatcgccaggcgtagtggcgggggcctgtagtcccagctactccggaggctgaggcaggagaatggcgtgaacccgggaggcggagcttgcagtgagcggatatcacgccaccgtactccagcctgggcgacagagcgagactccgtctcaaaaaaaaaacaacaaaaaaaaaacccaaaaatcttatgatgtatataaggacttccaagcagcaaacctggaaatcatttttaacccttccatcttaatcactccaaaatattcttgttgataacagttatgatatttctgcttctgtaaacctccgccagtttctcactctttcagactgtcctcttccttgatacaaaaattgtgtgaatatcagatcttctcatgtcaacattgcctattgcagtagtcgcaatkccatatacacaaaagaattgtctaggtcgtttcataattagttccccaacttggagccaaaggatctatatttttacctaggtcttttagctggtccttatatagccaatccaggagatactggccaatagaataaattcagtctctttattatgttcacagtctgatcctaaatatccttatcttctctcctcctttgagtaccttctccttcttttagtcttaggctttgtttacatcaaacttctcaattccccacatagattatacattgaatctgctgtgcttatgtatatttccttcactttttatgggataaccttcttttgatatccaactatgttgtagctgcacacactcaacagttagccatagcctctttattccctgtatactgcagtcatactttggctggacataactgtctccccatcttgaatgctgagggtcaagaacagttttgtttccacagtgccaagcacagtgtctgagatgcattaagtggtgttcaataaatgtttgcagtaaaccagcaggtatttaagttttatgtgaaaagctgaagaagattttactattttctgaatagatacacaaagttgatgtattaaantttctgttttagaaaataccagaggaatttaatgtatttaatttaatacaagaaatgagaacacaaaggcattctgcagtacaaacaaaggtatagttgtttgtttccctttataaactgctattttataaatgctttcttcttttttaaaatgttgttttcattttgttttttaatcatttttctccttcataggagcaatatgaacttgttcatagagctattgcccaactgtttgaaaaacagctacaactatatgaaattcatggagctcagaaaattgctgatggagtggtaggtgttcttggtctattaattttaggaaacttttactctttgttaagatgtaatatttagccttttttttgttrtcttgtgttttgtctaacatgagaagaatatccaggacacttaacatttttacttaaactcatttccttcttattcgtatctgtattatgatggctatttaatgactccgatataaggtaaattatgttctaaatgaaataaagttaggaaagatctcatgtcaaaaatcatataattcgttaatgttttacttttttaaaaaataattgcattgttctctttactcttcccttccacccccacccaagtaattctgcattgattctacttgaatttcattttgtataaagtgttttagttatytgtgtatatgcttttcttttcttttcttttttttgagacagagtttcactcttgttgcccaggctggagtgcaatggcacagtctcagctcactgcaacctctacctcccaagttcaagtgattttcctgcctcagcctcctgagtagctgggattacaggcgcacgccactgtgcccagctagtttttgtatttttagtagagacggagtttcgccatgttgaccaggctggtctcgaactcctgacctcaggtggtctgcccgccttggcctcccagtgtgcaatgtgctgggattacaggcatgagccaacactcctggccttgtgtatatgcttttcagttaagcagaattaaagagccacagttaactcccttttgttgtgttataattcagtgttattttagccttgtaacatcttactggatattcaacttctagacctgacaaaaacactgtattctcttagtattctcatttctgcctttgttttctaaccaattgtcttgcttcaattctatatataaccaccttgtccctgaaggtgctgagattttttttttttttttgtagaatttgtttacatctttgtcattgagtctatgataactattacattgttaaaccaagtatgagaaaataagttgcaaaatttataaccttcattttccttttctccctttaaatggttttgtcagttcccagaatatttgtttgaattttcttggttttccaaatgacagatttattaccaaatgctgatctcagtttgttaggataatctaatatcggtccatgagttttaggaaatatgcatttcttttattagccaagtgacaatttcacgtttttaagttttatgtgacatcgttcttattcctttattaacataggaattattgtgcaaggaaatcctcctacaatgcctttagcttaattaaatcctattatgacatgctctgaatctagccaaatattttataatgtagaatcaaatgtgtttttgttttgttttattttgttttttgaaatggagtttcactattgttgcccaggctggagtgcaatggtgcaatcttggctcaccgtaacctccgcctcccaggttcaagcgattctcctgcctcagcctccctagtagctgggatcacaagcatgtgccaccacacctggctaattttgtatttttaatagagacggagtttgtccatgttggtcaggctggtctcgaactcccaacctcaggtgatccgcctgcctcagcctcccaagtgctaggattacaggcatgagccaccgcgcccggcctcgaatgtgttttttgtttgytttgtttgattggttttttttgttttttggttkttggttttttttttgatgacgaagtctcacyctgtcacttaggctggagtgcagtggcgcaacctctgcctcccgggttcaagcgattctcctgcctcagcctcctgaatagctgggattacaggcatgtatcaccacatccagctaatttttgtatttttagtagagatggggttttgcatgttggccaggctagtctcaaactcctgacctcaggcgatccccctgcctcagcctcccaaagtgctaggattataggtgtgagccactgcacccggccaaacatttgtattattttgtataatttaatctaagttgagatatttaatatttcgaaaagctgagtaggctataaacagttttctttaatttttgggtttttttttttttttttttttttttgagatggagtctcgctctgttgcccagaatggagtgcagtagcacagtctcggctcactgcaacctctgcctcccgggttcatgtgattttcctgcctcagcctcccaagtagctgagattacaggcgcccaccaccatgctcagctaatttttgtatttttagtagagacagggtttcaccatgttggccaggctggtcttaaactcctgacctcaagtgatccacccacctcagcctcccaaagtgccaggattacaggcataagctactgcacccagcatctttaaactttaattgaaaagcatttctgttttattccatgaattcaagattaatttcaaagctaaagtttttatatctggaaatacaggtttttaggctggatgcagtggctcatgcctggaatcccagcactttgggaggccgaagcaggcaggatcacctgaggccaagagttgaagaccagcctgggcaacatggcaaaaccccgtctctaccaaaaatacaaaaaagattagcctcccagactcacgagtacatcaccttgccgagtttattttttttatagagatgaggttttactatgttgcccagcctggtctcaaatccttggactcaagcaatccatccgcctcagcctcccaaagtgcaggaattataggctaaagttcttttattgcaatattcagtgtttgggttttgttttgttttgtttgagacgaggtcttgctatttcacccaggccagagtgcagtggaacaatcagggctcactgcgccctcaacctcccggactcaagctttcctcctgcctcagcctcccaagtagctgagactataggcacatataccacacctagctaattaaaaaaaaatttttttttgtagagatgttgtagagatgttgccagsttggtcttgagctcctgggctccaacagtcctcccccacctcagcctcccaaagcactgagattacaggcatgagccattgtgcccagctattgttgtattttttaaaacttttaactatatttaaataatctccagaaaatatgtgataaataccgcatcaccttttcatctttttctaattagatcaaagtctgatctttgtaaggttttattccattgaatcaatccttttttaatatcctgaaatctatactaggattataattctatcataggctctttctgtctaataggtcagagctttacgggaatataataaaaaagtcatactttgtaggagatgagatgaaataatacccatagcagataagtagttaacttcaaacctactttcgtacctcattgcatggtacatagtagacataaactaaatgtttgagagaaatctctccatagatgaatggataaatagtaaaaaaaaacagaagaaaagatggattatcattccagataactttttagtattttcttcttaagaaatcatgttttctgtaaacttgtaaatataggtgactctttttataggatggctgtctgtggttgcagaccataaatcttaaagaaaatgtggaatctgaaaaattgagaaaaatcatcttagaactgtgtggttgaatgaaatgacttgaaaggtgtattaactatttagaagctatgctgtgagaagtaaaaataagtccccacttactacttttctgacaatttaatcggtaaaagttttgtttaaatgttctgtgttccagtattatttctgtagaaattttagtttgatatactagttggttgtttaagactttaaaatgaatagtgttttttagagatatttataactacagtgacttcctggagtgagagatstaaagagaaaatttattctgtaagcctgtatcatattgactgaggatttagaggtaccttaataagcaaacatctgttaagttgtgcagtgtgcctttttatcttgtgtgtaaaggacaccgttacaagtactgtcaacaccagtatttcagttctagaatgattaagtaatagcaataacagtttgtattatcgtccttttattgtgtttgtatagtacattttagatgtgataatgaattctggattttttttcctaaaatataatttttttatttttaaagcaccctgatttataatttattttcttctgcagctgataatattcttaaatattagataatttgtttcttaatgtttttgtagcatttcataaagctgttatatggaaaataacagtacgcaagataactttagaaagttctgtttaaaacaagagaacacaggctaggcgccgtggctcatttcatgcctataatcccagctctttgggatgccagggcaggagaattgcttgagaccaggagtttgagacctgccagggcgacaaagcgagaccccatctatacaaaacaatttttttttaattacctgggtatggtagcacgtgcctgtagtcctagctacttgggaggctgagatggaaggattgtttgagcccaggagttcaaggctgcagaggtatgatcatgccactgcattagattatttaattcctaaaattcttttccatttcaaaagttggtgattgcttcagcaagttgtatacatgacaaatgtggactcaaaaattataggtaataaaagagagtcagaagatgtgggtgtgtaggagacattaactaggaaatccaagaacattgtgaagtccagtgaccaggaggttttgtacatgctgtttaggtagtggctctttatcgaattgcagttctgcattgtcacattgattcctttcatcagaggaaactcagtatgttctgaaagctaatctctcccagaagctctcttttggttcttcctgttaatggcttcatcctgctcttactcacccagaatgaggaatccttcatgaaacctttactttctcacatgtagtgtttgcctaaaatgtccttactatctcttctctttacccttccacctgttttccttcttccaatcctcattcattttttgtcaaaatcttaccaatccctcaatgccattctgcattttaccttaatattgtcaacttactttttctcaattatattcttaatattctcaactatagcttttttttctgatttcatagcttcatagtactgattatgccactttggggctgtagtattacccttctactttttttctggggattttaccagactacattttgaagttaaagataataccatgtccttcttacattttagtatcctctgctttgctgactttattcagtgcatttcactagatgtccacattgccttacctgcagttccaaaatccaaagaaaacatagttttgttttgtttttgtgaattcaatattacactcacttggcaacaaaatatttcattgacatgacatgagtttatgtgtgctacaaaagaaaaatgctgttttgtatgttagaaacagttcaaaaggagtttcatatggtttgcctttaatttttatttaacctacttaatgcacattttggtacaaaatatcaagtgttacagaattatggttatatcattaatggaaataataagcagatgatcaataatatgttgggggtacttttttgtttttttttgagacggagtcttgctctgtcgcccacactggagtgcagagacacgatctcagcttactgcaacctctgcctctcaggttcaagtgattctcctgcctcagcctcccaagtaactggaattacagacgtgcaccaccacgcctggctaatttttgtattgtagtagagacagggtttcactatgttggccaaggctggtctcgaactctagacctcaagtgatccaccagtctcagcctcccaaagttctgggattacaggtgtgagccactgcgcccagcctagggggtacctttttgatgcagagtctctaaattctggtggtacctgaggatctgaaactttggcgaccaaaagtcctgatttgcgtgaggcacaccagttcacactagttgtctaggtttaataattaataatgcttctttttcattctcaaaagagccctgatttagacaataaattatatggtcaccctacctatagccagatatttctgcaccaaatgcctcgattttggtgggtggctttaattaaggaagaatgctttaagttttatgacataactctgttgttcttgtcaggaagtgatatgtataaaactattaattcatcagattatatataaggagatagggtgcacttaaaattgctaggaagttgagatctctagttgtttagttggaagtaattgaagtaacagttggacaagctgtcatgatggacatagtagaagtgccttttaattaaaaacaatgataacaaaacaaaatgcagctacggtttcagagttccttagttgatagtatgtgtaacgatggctgttgtctaaaattatctgagatgttggcaagggtgaaaatcattcctctcttctggacataacataccctagaattaaaataccctagctagataaatatgagatatgttgacagtgaaactaattcaaggccgtattttcatttcaccgctcccctattcacagtcctaaacctaaggttcttatacctgtattgactctgaaacatcaatgttaatgatgttattggtccttgtgaccagcaagaaccaaggatattctggggatgggctctgtctgcctttttgaggtccatttgggtagccagtgatataggagctatattccctaatggattagagcactccacatagtgacagagtgagagtgaggcaagaaatggttaaaatgaatcctaggaccaccagtttaaaagtactaggtagtaatggggagtcataaaaagatactccattacttggtaaatggtataagccttatttgttggctttttttttgtctctgcatatattaagttcctagtggtagtgatggcggggcggggggatactacgttctttaatccacattatcttggggaatctgtttttttacggtagcatttgagatgtgttgaaatgctgctgtacaccttgatctttccagtaactgtgatgcgctgtttttttgatacaatctctccattgaagtctggtccttcaggctaaaatatagagccagaatataagactttttttttttaacttggcaaaattggcattgtttaaggattgaaaagcacagaaacaatttagttgaaacatgaagaggaaaaattatttttctcttaaccttagtgaagtattttttcccttggcagaatgaaattaacactgaaaacatgrtcagctccatagagcctgaaaaacaagattctcctcctccaaaaccaccaaggacccgcaggtattgtatgtcttcgaacattttctttaaaagcatacttgtttctactcactgttaattaaaatgacaaattctgaatatttctaaattacttttataacttttattattattttgttaggatgtaacatacgtatgacaactgatttgttactggtttattaaaaatttggtttcattttggataaaatttcaataatatactgtagcagaatgtggatactaccatgaattgactatggtttatgttttgatatgtgatataactaaaattttagttattctaaagattcccatttttttcctgatgactaaatatgcttgccaaaaattgcatgcatgttgaagtgtgaggatatttaataacgttactagcaaagatgagtttatttctttaatttttcttgcttttctaccaagctcatttataatagttaaaatcatatatattcatatctttcttttccttcccttcttgttcagggtagctgcttagtcagtaacatggtagtatggagagaatacagaggcagaagaagatagtttcaactcctttttagccatttagctctgggatctaggattaatttacttaatcctggggagaaggagttgtttaaatattgtcctaaggattaaataaaaaactattagaatattttatagtgtctttcttgcacatagatctgccaaaactgatcgacttcccatcaaaataaattcttttatacaggatacaccaattgtttccatcttaaaactttggggaaagttgggtcagacggccagggtcatgtcttagcattgagttgctaattccaagagatcattctaacgaaatcatctctctgaacaaaagaaaaagcctgcagcttccctcagtaactgaaggtttggttagaatccctgcacaccacaggaataatttattctcattttgaccatgcaagattctaactgcctgggaaggaagctgctgagtacagaaagaggcagtgtactctggtataaagaggctttttacataaataggtcccattccaaattttaactttagcatttgccactgaatgaactttgacaagccacttctctgaaaatactttacttcattgtagtgagagtactcgtattctccgtttttaaaaattagtgataatgtatataaagcatgtagttacatgcccggcctatagtaacagattttttaagtgtggtggtagttatagtctctagaatacctttgcatacttctcttaggaacctcaggaagcctatatatagatgaggttaggtctcaacatttaaatgttcgagatgttaactgtgtgctatcagaacttttagtagttctttcctgttcgatttccactttggtatccaccaaaactggttggcattttagccgtctgtggaaggtaaccagttgaaacctataaaatattaagttctctaacttctctgttccatataggagccctagaatcctaaaagaaactactggccctaaaaaaattaaggaacatttttgctgccctgtgttttaatttggtttttgagattgagccaatatagaggttttcaaagtctacactgatatttatgatttgtatgttcttctacctctaactacatgtagcagcagtctcttcttaattttacaggaaaaaagaatagaatatctgaatttaaagcctttttcctatacctgttgaaaagttttacttctgttactctctaataaacaaaaagataataaagaaaaaagcaaatgcatattaagaaaaaatattcaactcaagacagatttttattaggcatacattctaaaagttctttgtgtgtgattttataatacatgcataggtcaccttttttcttcttcatgtaatggagtcaaatgccagaatgtcattatttttgacaaagagaaccttgtgacttctaagttgggatgatttttagaactattataaattgttccaacataactgaaaataaaatcacaaaatcataagattgataacaagtaaaatagtatattttgtttttcagtatggctacagtaaacacattaattgtttgtttaaagtacatgatggggccaggcgtggtggctcacgcctgtaatcccagcactttggtaggccaaggcaggcggatcacaaggtcaggagtttaagaccagcctgatcaatatggtgaaaccccgtctctactaaaaatagaaaaattagccaggcgtggtggcacgcgcctgcagttccagctacttgggagactgaggcaggagaatcgcttgaacccaggaagcgaaggtgccagtgagccaagttcatgccactgcactccagcctgggtgaaaaagcgagactttgtctcaaaaataaaaaaasaaaaataaagtacatgttggctgggcatagtggctcacgcctgtagtcccaacattttgggaggctaaggtgggcggattgcttgaatccatatatatatatatatataaaaatatgtgttgtgtgtatatttcatttttatttatttatttatttatttactttttaaacgtttttgttaaaaataagacacacacacacagtagcctaagcatacacagggtcaggatcatcaatatcactgccttctgcctccatatcttgtcctgctggaaggtatcgggcagaaacacacatggagctgtcatcccctatgataacagtgccctcttctagaatacctcctgaagaacctgcctgaagctgtttaacagttaactaattttttaacaattagaaggaatacactcaaaattaacaacaaaaagtaagtacgtggccaggcgcctgtaatcccagcattttgggaggccaaggtgggtggatcacctgaggttgggagttcgagaccagcctggccaccatagcgaaaccctgtgtctcctaaaaatacaaaaattagctgggcgttgtggcgggcacctgtagtctcagctacttgggaggctaaggcaaaagaattgcttgaacccgggaagtggaggttgcagtgagccaagattgcaccactggactccagcctgggtgtgacagagcgagactccatctcaaaaaaaaaagtacataagccaataactattttctttatcattattatcaaggattgtgtcctgtacgtaattacatgtgctgtgcttttatrtgactgacagcatagtagctttgtttataccagcatcacaacaaacgtgaatgacgcattttgctacaaattcatgggaatttttcagctccattataactttgtggggccaccatgttatgtgtggcccatcattgactgaaacgtcacatgactgtacatgtctttcagtaatttttaatattccaattctttctgttttattttgttttgttttcagacagagccttgctcttttgcgcaggctggagtgcagtggtgtgattatggctcactgcagcctcgacctcaattgaacctcccaccctagactcccaactagctggaactatagacacacaccaccatgcctggctaatttccgtattttttgtagagatgggttttctccttgttgcctaggccagttttaaactcttgggctcaagggatccacccattttggcctcccaaagtgctgggattgcaggcgtgagccaccatgtcccaccagtattccagttcttccagttcttaaaagtgaacagaactaggaatgactgggcatttgacagaagcctctaatatgaaaaaacagaggaaatggagacaatacagagtaaaatgaaaaagatgggggaaaaaagaaacaacagtccacttttctcagtcattgggaaatgctgcaaccacgaaataagaactgtgggtaataagtaagaagctcttagaaattaagaatataggccaggcgcagtggctcatgcctgtaatcccagcactttgggaggctgaggcgggcagatcacaaggtcaggagtttgagaccagcctggacaatatggtgaaacccagtctctactaaaaatacaaaaaaaattagctgggcgtggtggtgtgtgcctgtagtcccagctactcaggaggctgaggcaggagaatcgcttgaacccgggaggcggaagttacagtgagtcgagatcgcgccactgctctccagcctgggcaacagaatgagactcttgtctcaaaaaaaaagaaagaaagaaattaaaatactataaatttaaaaattaagcagaagtttggaaaataaggaactccattttccaataaaatttccaaaataaagaaattcattcatttcaagaaaatgaatggataaagaaaaagtaggagagaaaagataaggaaattagaaagcaaaactagaagatctgtcactgaactaataatagtctaaaaggagagtagggaagaagaaattagcaaaaaaaaaaaagaagaaaaaatgtgttagaattaaagggcataaatttttatatagagcgtatacaccaagcttgatatacaccaccaaatgtgatggataaaaataaaattgttaaaaaatatagttttttaagttacattatgaaattatagaacatccaacataagaaccttgcttaggtttagagtaagataaaaataatgctgaaatttggagtaagtttttttaaattaaaaactttgaaaatactcgattaacaaacccatatatcatactcgatatctgtcaagcactgttctaattgttgttcagatgttaactcatttaattctcctaactaccctgtgaaaaaggtactgttaaggatatatggggtttgttaatcaagtaaatctgtaaaatactggtcatgaggccgggcatggtgtttcacacctgtaatcccagcattttgggagcctgaggagggcggatcacttgacgttagaagtttaagaccagcctggccaacatggcgaaaccctgtctctactaaaaatacaaacattagccgggcgtcatggcgcgtgcctataatcccagctacttgtgaggctgaggcaggagattcgcttgaacctgggaggcggcggaggttgcagtaagctgagattgcaccactgtactccagcctgagtaacagaatgagactctgtctcaataaaaaatatgtaaataaaatactgattatggaaaagtggtctcaccatgtacacgtagggaaaataatacacctcaatttatatcaaaattttatctcatccttttaaaactcatattttctatttgtattataatatgttcttaggataacctattggtctttgcatatgctttataaattgtaggaggtgtctgcaattatttttgttttagatcgcaaaaatttgacagccactctttcagattaagaaccaacttgtaggccaggtacaatgcctcacacctgtaatcccagctctttgggaggacatggcaggtgaattgcttaagtttaggagtttgagatcagtctgggcaacatgaacatggcaaaaccacatctctacaaaaaatacaaaacttagccaggtgtggtagtgcacacctgtagtcccagctgcttgggaggctaaactgggaggatggcttgagccctgaaggcagaggttgcagtgagccaagatagtgcaactgtactccagcccaggtggcagagcaggaccctgtctcaaaaaaaaaaaaaagaatctacttgtaaaacttgaacagatataggaatatcttatgagagtattgctgtcattttaatatgatcagtattctggagatattcatttatcttctcatgtcctaggaatgtgggaatgtgtctagagaatctgaacttcacagagtctttatttatttattttatttattttgagacagagtcttgctctgtcacctaggctggagtgcagtggcgtgatctcagctcactgcaacctctgcctcccgaattcaagtgattctcctgactcagcttcctgagtagctgggattacaggcgcacgctaccatgcctgactagggttttgtgtttttagtagagacggggttttgccatgttggttaggctggtctcaaactcctgatcttgtgatccgcctgccttggcctcccaaagtgctaggattacaggcgtgagccaccatgcctggcccacagagtctcttttaaggggaaacctggtgtaccatgtgattactgccagttatctggttggataaaaaaaggttgatcacctggggggagaaaaaaaagcaaaaactctgaggtggggtccagtggctcacccctgtaatcccagcactttgcgggggccgaggcaggcaaatcacttgaggccaggagttggagaccagcctggccaacatggcaaaaccccatctctactaaaaatacaaaaattagccaggtgtggtggcatgtgcctgtagtcccagctactcaggaggttgaagcacaagaattgctggaacccaggaggtagaggttccaatgagccaagatggtgccactgcactccagcctgggtgacagaacaagactctatctcaaaagaaaaacagaacacaaaaacttaaatatacaagccctcaagaagtttgcttcatataaagttcttaaaaagcaacaaagcctgggcaacatagtaaaccctatcttcttctttggtttttttttttttttgagacaggatctcattctttcacccaggctggagtgcagtggcatgatcagagctccctgcagccttgacctccccaggctcaggtgatcctcctacctcagccttcctagtagctgggactacaagcatgcattgccacatccagttaatttttttgtatttgttaaagacacagggttttgccatattgcccaggctgctcgctctctctctctctctctctctctctctctctctctctctctctctctctcactctcactctcactcgcgctctctctctcgctctctctctctttttttttttttttttttttttggagacagtcttgctctgtcgcccagactggagtgcagtggcgtgatctcaactcactgccatctccacctcctgggctcaagcaattctcctgcctcagcctcccaagtatctgggactgcaggtgtgtgccaccacacctggcaaatttttgtattattagtagagatggggttttactgtgttgctcaggctggtctcaaactcctgagctcaattgatccacccaccttggcctcccaaagtgctgggattacaggcgtgagccaccatgcctggcccctatttctttaaggaaaaaaataaaggcaactagagggtataacccacccgaacaaaggagtatacccagaaagaggaaaatgagacctgggaaacaggagaatctgaaaccagagagaacattagctctgtgatggactagggaaccagtagtccacactggagcaggaggccaaaagttactaacaaggatgtctgtggtattgatacttactatgtgtgcttgtcattattgagaggaggtataccaatctgcaagaaagttagaagaaaagctgagtaactgatgatgcatagagagctaagccatcagaaatccaaggcagtcattaggggaaaacaagacactatagaagaaaagatacgawatcatggtgtcatagatgggaatactatctgcagtcatacgactgaggtaatgaaaaattacaatataacagtattggaaagatagagaaggacacttccacagtaggaagtcagtagaaaatgtgtgaaacaaagatcaagaaataacttttgaaatagtctgaaatacagaggtgtaaattttagaagcagctataaaaaaatgttgaaagttgatgcctctggctaacaggagggctgcggggcagagactatgtttttcattmaaagtcttgtatttgactttttaaacagtatatgtgtattaccttgatgaacattaaattttcttagtctgaaaaactgcagtttttattcgcaaccagattgtaatggctcttaatatgctactcttagctacataattctcaggtatcaacttgtttaacagtcttaaaatgccctttttaaatgtttgtttttcagttgccttgttgaaggggatgctaaagaagaaatactgcagccaccggaacctcatccagtgccacccatcttgacaccttctcccccttcagcttttccaacagtcactactgtgtggcaggacaatgatagataccatccaaagccagtgttgcatatggtttcatcagaacaacattcagcagacctcaacagaaactatagtaaatcaacagaacttccagggaaaaatgaatcaacaattgaacagatagataaaaaattggaacgaaatttaagttttgagattaagaaggtccctctccaagagggaccaaaaagttttgatgggaacacacttttgaataggggacatgcaattaaaattaaatctgcttcaccttgtrtagctgataaaatctctaagccacaggaattaagttcagatctaaatgtcggtgatacttcccagaattcttgtgtggactgcagtgtaacacaatcaaacaaagtttcagttactccaccagaagaatcccagaattcagacacacctccaaggccagaccgcttgcctcttgatgagaaaggacatgtaacgtggtcatttcatggacctgaaaatgccatacccatacctgatttatctgaaggcaattcctcagatatcaactatcaaactaggaaaactgtgagtttaacaccaagtcctrcaacacaagttgaaacacctgatcttgtggatcatgataacacttcaccactcttcagaacacccctcagttttactaatccacttcactctgatgactcagactcagatgaaagaaactctgatggtgctgtgacccagaataaaactaatatttcaacagcaagtgccacagtttctgctgccactagtactgaaagcatttctactaggaaagtattgccaatgtccattgctagacataatatagcaggaacaacacattcaggtgctgaaaaaggtaataatatagtgtcaaatacttaaatgtctttcctatgtgctagtcactgttttaagcactttagctgtattgatttattatgttttattccacactctaccatagaacctacagcaaaatctgtcttagatactaattttttaatataagcttttaatgtattgttaacaatttggtcacattatattactgggttttgtgtttctaaattattttagtagttataactggataacttattttctttttcttctgtattatagatcttagtgtttttgtatcggtcaaaaatttatctgactgaataattagaaataatttagggaagaatcacttaaaataacagtggcaaaaatactgtagaatgtcttgattggccatataatgttactcgtttttcctaaatgtttagtcattttttactgttcctttaactacagattacatttttttgtttgtttgtttttactgtcttcacaaatgcttccaaatatggctgcttccaaccctgagtttaacccaggaacaatactgcaaactgctcaattcagtagtgagtgggctatatgcatacctactcatcaaagctattatttaaagaattattatttttttagcactcttagcatttcaagataatgcatgcactcagttcccaaagtgtattattgcttcttgaaactcctctttgatctgctgaaagtaatgatggctaccatcttaaacagaccctaaggttgagagtaaacatataaatttgaaagctgtttattgatatattgattatcagtggtcacttacctatcagtgaactttggtagtgacacatacagactggtatttataacgtgcaggcaaaataagtactgtgaccttgaaagatttttttttttttttgagacttgcactcaaaagattttttttttgagtcttgcactgtcacccaggctagagtgcagtggcaagatctcggctcagcctcccaagtagctgggattacaggcacccactaccacacccagctaatttttatgtttttagtagagacagggtttcgatatgtttgccaggctggtctcaaattcctggcctcaagtgatctgcccacctaggcctcccaaagtgctgggattacagacgtgagctaccacacctggccttgaaagattattttctatttctgacccattatataccacccatactgtagtgcttgtattttctctcacacatactgtattttttaacttgagagagtgtatttggtagactagatgacagtctttttgagacagagttttgctcttgttgcccaggctgaagtgcagtggcscaatcttggctcactgcaacctccgcctcctgggttcaaggaattctcctgcctcatcctccctagtagttgggaatacaggcatgcgccaccatgcctggctaattttttgtatttttagtagagacagggtttcactgtgttagccaggatggtctggatctcctgacctcgtgatccgcccacctcggcctcccaaagggctgggattacaggcgtgagccaccacgcccagccaggtgacagtcttaaactatttgcttaaattacagaattatcttttcttgatttatctttgttttatttgaaggatctttagaagataatgaatagtataatattactttaccagtttaccataattttaaattgctaatgtcttttgttcctcagcttcagaatttgaaatataactgcccagctgtaactatataagaaaatatgtagataagaaattttcattttgagtttttagtatatcaagcatgtggtattgtacctaggaagttttattgtttttttgttgttgttttgttcttttgcttttttttttaaaaaaaaccaaaaaaccattactggaaataggatttggtgagggccagaaagatgtatgatgtgatatgcttattaaaagttactactacatgacgagtctgttggtggctcatgcctgtaatcccagcaytttgggaggctgaggcaggaagttcacttgagcccaggagttcataaccagtctgggtgacatagtgacacccaatctctacaaaagataaaaaactagccgggcatggtggtgcacacttgtggtcccagctactctggaggctgaggtaggaagatcacttgagcctaggagctcaaggctgcagtgagccataattgcgtcccggcactctgcctgggcaacagagggagaccctgtctcaaaaaaaaaaaaaaaaaaagagtaagatatagctaaaagcaccctactatgtgccagctcatttctgtttgtttggttttgtatttcaaagcaaaaatcactatacatgtgatttctggtttctttttactcaaccttaactatgttattggtttgattttaaccgaagattttcctgtgtgtaaatgttctttgttgcagcataactacaagtagtctcatttttaatgtgttgccaaatatttaccatatggattatttactttatagattgtttatttaccttatagattattatttcctttgtagatcwttatcttatagagccattggcaccagaattagagttttggggggttttttggtcctagaacttgttagtgaattacagtcacacatttcttaatggcagggatatgttctaagaaaaatatgtcattaggcagttttgccattgtgtgaatgtcatagaatgtatttacacaaacctagatggtatagtatatactacacatctgggccatacaatgtaacctcttgctcctaggctacaaacttgtatagcatattaccatactsaacaattgtaacacaatggtaagtatttgtgtatctaaacatagaaaaggtacagtaaaaatatggtatcataatcttacaggaccgctgttgtttatgcggtcttgttgatgaaaacatcattatgtagtgcatgactataatggaatacttttgtattgatacctaaaaaaaacttttgcataagttactgcctgacaaaaattcttagctatcaattctaatttcagtcttgacttaggcctcctgaaagatttctcagattcaactacagaaggccccatacagtgtatgatttgcaaaagcctatataaaatacgcaatatctggttggataacctctaaaacaaaagtttttaacaggaaaggcagcccaaagttccagggagaaacatgcatttgcaaagcaagggccacgcttagaaaataaaagtttttaagggtgagaactgccatgagagaaaaagcacagagtttctggaagataactgatagaaaaagggctgaactgccctttttgttttgttcatttaatttaagaaatggtaccagaatgccaagattatgtgtcccttccttccaacagccatctcttcactgtgcgctgttagtagcaagagggcaaggagacatatggtgatgactcagactaccactactggataaggtagatagttctttagtggcaagagagagttctggtactcttggtagatgtatcaagtattggactggaactcctctttcaggaggacccagaagctgtattttcttgcgtctccagctaaataaatgtaggtggggcaaaagcaatcatactcacctcatgcgtgttgaaaattgacaagacctatgcatagccatcaggtgtggtaaaatagcagagtatcatggcagaactgtgtgttcatttaagaacaatgggcaaggctcaagacaaaataatacaggaccgtcgcatttctttttctttatcccaccctccccaacctgagagttcacacacaggattgtattcttatattttctttctattcctccagtgaaaactcaaagatcaaatacactcatttaccttaagccataataaagctaaccaatgaggcttacttaatgcactctctttcccaagagctaattttgtttttactagtgaaaaacctgtatatagcttcagtcagcattctcaaagtacagccatgtgccactgtacacaaaatctttagcaataaataaatgaagattttttaaaaaactttaatagctatatctttatctgttttggaaaaataactagtatttccaatgttatttcagttattgctgtttaagacatgactgaggtacacagttaagtttaaaatgagtcagattttaaaagtgaataggacacatgttacatagtatggcaaaaatcatgaaaggtgttaagcaattgaatcctgtttgggaaacactggcttaggcgtttcataacgcaaatgaccaaagctttcctttttggacacaaaacatcatcagtaagctcagtagagaagtcacttgccagctgacttctctactgaagattcccttcaggcttggagaactgaatgatgtctgtagagtgacaggaaagtcatgggagagagtcatttctgtatacattatctttgctcaataagcatcataattcttgataatgagtggaaaaggtttcttgcatttttttgcatttttaaaaactgatctagatatttgtgacaggaatttttagaatgtcaagaaagctctctgattttgtttagatgacatgttaatttgtctaaatttttatgtgtttaatttagatgttgatgttagtgaagattcacctcctcccctacctgaaagaactcctgaatcgtttgtgttagcaagtgaacatagtgagtgtctcttttgcttttacatttacttcatattctaataataaactccgaaaaacatacctgattttaatctaktagctattgtgctacataattaaattcaaaaacaagtaaattgatgttgacatgcttttaattctttgtttgaaaaatgcttttaaattatattttttacttgctaagatcgatagaaattactgcatttatgttagatatcagaattcaattcatttaaatgtaattataggctgggcatggtggttcaagcctgtgatcctagcactttgggaggcctaggcaggtggatcacctgaggtcaggagttggagaccagcctggccaacatggtgaaactccatctctactaaaaatataaaaattagctgggcatggtggtggacacctataatctcagctacttgagaggctgaggcaggaaaatgacttgaacccgggagttggaggttgcagtgagccgagattgcgccattgcattccagcctgggcgaagagcaagatttcgtctcaaaaagtaaataaataaataaatgcaattacaaagccaggtgcagtggctcatacctgtaatcccagcaccttgggaggctgagatgcactgatcacctgaggtcaggagttcaagaccagcgtgaccaacatggagaaaccccgtctctactaaaaatacaaaattagccaggcgtggtggcgcatgcctgtaatcccacctacttgggagactgaggcaggagaattgcttgaacctgggaggtggatattgcagtgagccgagatcacactattgcactccaacctgggcaacaagagcgaaactccatcttaaaaaaaaaatgcaattataagtgtatttgcaatctggtgtattttcattcattaaaaatagcacttattgactcatgcctgtaatcctgccactttgggagaccaaggcgggcagatcacgaggtcaggacatcaagaccatcctggctaacacactgaaaccctgtctctactagaaatacaaaaaattagctgtgtgtggtggcatgcaccagtagtcccagctgctcgggaggctgaggcaggagaatcgcttgaaccccggaggcagaggttggagtgagccgagaccatgccactgcactccagcctgggcaacagagcaagactccatctcaaaaaaaaaaaaagtagcacttatttatgaaaacattaattgctttccttagatttaggtcagtaaacatttctgttgggtgggcgtcactggattggtgttaactgaaagacatttaacaccactggagtagactgagcacattggctcatacctgtaatcgcagcactttgggagtccaaggcgcgaggattgcttgagcctaagagttwgagaccagcctgggcaacacagtgatacctcctctcttctaaaaataaaataactgtccagttgtggtggtgggcgcctgtaatcccagctgcttgggaggctgaggcaggagaattgcttgaacccaggatgcagaggttgcagcgagctgagaccacgccattgcattccagcctgggcaacaagagcaaaaaactttgtctcaaaaaataataataacaacaaaaaattagccaggtgtggtggcatgtgcctgtagtccttgctactcaggaggctgaagaagaaggattgcttgatccctgtagttggaggctgcagtgagccatgatcgcaccactgtactccagtttggtaacagtgagaccccgtctgtggaagaaaaaaaaaagaccactggagtatcagaactgggagaaagtgatgatactttaaaacattgataatatacttctccctattaatcctctaaaaaagagtgcagaaacagcttgattgtatttacagtgtctcatgctcagtggaggtgctcacttgtctaagtacattttaccaatatattaattttgactgatttttgttttgtttcatttggttttctttttatttatttattttttatttattcatttttttgagatggagtctcattctgtcgccccggctggagtgcagtggcacgatctcggctcactgcaagctccacctcttgggttcatgccattctcctgcctcagcctcccatgtagctgggactacaggtgcctgccaccacacccggcttatttttttgtattttttttagtagagacagggtttcaccgtgttagccaggatggtccatctcctgacctcatgatccgcccacctcagcctctcaaagtgctgggattacaggcatgagccaccacgcccggctaatttttttgtatttttttagtagagacagggtttcaccatgttagccaggatggtctccatctcctgacctcgtgatcgcccgcctcagcctcccaaagtgctgggattacaggcgggagccaccacgcccggccttgttttgttttatttcgagttggagttccactctgtcactcaggctggagtgcagtggcacgatctgggctcaagctgttctcctgcctcagcctcctgagtagctgcgattagaggcatacaccgtcactcccaactaatttttttattagagatagggtctcaccatgttggccaggctggtcttgaactcctgacctcaagtgatctgcctgcctcagcctcccaaagtgaattttgactgattttaagataaatgttaaagagccaagcacaatggcttatgcctgtgatcccagcactttgggagaccaaggcaggtggatctctgttccatttgccctaggagtttgagaccagcctgggcaacatggcaaaaccctgtctgtataaaatcaaaaattagccaggcgaggtggcatgcacctatagtcccagctactcaagaagctgagatgggaagattgcctgagcctgggaggttgaggctccagtgagccgagatcgcgcctggtcaacagagtgagaccctgtctcaacaacaattaaaaagaatgttgaaagcaatgaaacggtatacttcagttgtctaagtctgtcacgttgtctgtagattaagcagtatacttcacttgtctgtcacattatctatagactgtaatacactgatgactgaatttatttacttaggttttgaaggaaggaaacagaatgttctcgaattaatagaaactacaattttttttttttagaaacttcagaaatatgcttacccagaaactacaaaatttttgtggaagcgatagtttctaaaatctttaggatctgttttttgtattactttaatgcaaagaaatttcagaaattcaaggtgttaataacaataagatttcatttttctcagatacacctgtaagatcggaatggagtgaacttcaaagtcaggaacgatctgaacaaaaaaagtctgaagtaagtccttttggaattggaacagttatagcttaacatttctactcttttgttaactaatcttgcagttgttgaaatagctgtcatcttaagatcgttaaatatagtttgtaatttttgatcggcatttcttatactaagatttcagatgaaaagcccatataaaaggtaggttctgaaattttttaaaagggtaacctgatctacatacaactatcactttaaagtattgttttctcaagctgtttttgaaatatgtaaattatgcttcaaataattttgaaggtatgaatgaaataggagttactattttcagggtcctaattctttcttacatttctagatgcttcccattataacactaggcacatagtcgcttcttttgtttttttctggctacctggcatttctttgacattcgagaaatgttttggcaattaaatattttgagggcgtggcatggtggctcatgtctgtaatcacagcactttgggaggccaagcagaaggatcacttgagcccaggagttcaagaccatcctgggcaacatggggagaccttatctctacaaaaatttttaaaattagccaggcgtggtggcgcatgtctatggtcccagctttttgggaggctgagatgggaggattgcttgggccccagaggtcaaggctgcagtgagccatgatcacaccactgcactccagcctgagtgacagagtgagaccctgtctcagcaacaacacatttgtccataggagataacattttttattaacattaatactttttgtattttctcccatactttaatatctctgaaatttagctacatcttatatttgattttaagacatgatgtagtttaattgacatataaaatacaataatgatataattagtaatagtggctggcaaaacacagctgtatgttccttcatgcagtagcccatgcttttcagtgctcatccagaaacatttactccaaggagaaatagcataacattttaaaattttaagcctaattaaaaaacaattgtttgcttttcctctgatgctgaaaatgataggccttgatttcttgggatatatacccataacagacccagctttctattatttgtatataaaatgaatgtattgtaataggtattaaatgtcttcctcgtagggcttgataacctctgaaaatgagaaatgtggtaagttgttagattttttttttcctttttactgtagattttattgattaatttctacaaaataacatgcttcatagttcatgctatatagttatttctgtatgtgaaaatgtctaggacaactcttgtagaagcttaatattgtactataattcttccaaattaattattaccaccagatagtagtattgatctggaaaatcatgggagcatttactatcaataattacaggctaatgggaaagagattttttaaaaatatttttctgttttttattttctgtttttaaaaacacctagaagttagatcccgacttaaataaatgatggaattgcttctgtagaaacctattgttttagaaatcttccttttagtactttttcatttatttgtgaagaccaataaaattgtgaaagaatgaatgaattttagtagttaacatcttttgttactaatcttaaacactggtaattaaagagtaaactacaatctaaacaacataaaactttaaaagtggagttattaggcctggcgtggtggctcacacctataatcccagcactttgggagacccaggcaggcaatcacctgaggtcaggagttcgaaaccagccttgagcaacatggtgaaaccccgtctctactaaaaataaaaaaaatagctaggcgtcatgccatctgcctgtaatcccagctactagggagactgaggcaggagaatcccttgaaccccggaggcagaggttgcagtgcgccgagattgcgccattgcactccaacccgggcaacaagagggaaactccgtctcaaaaaaaaaaaaaaaaaaacaagtagagttattatttcaaggtgcaaatagtgcattaattaaccctgaccttgttgatttcttaaatttttttttttttttttttttttttttttttgagacagaggtcttgctctgtcgcccaggctggagtgcagtggcgcgatctcggctcactgcaagctccacctcctgggttcacaacattctcctgcctcagcctcctgagtagctgggactacaggcgcccgccaccacgcctggctaatttttttgtatttttagtagagacggggtttcaccatgttagccaggatgatctcgatatcctgacctcatgatcggctcgcctcggcctcccaaagtgctgggattacaggcatgagccaccgcgcctggcctgaccttgttgatttctatacaaagacatttcagttgcaactattcccttagaacataggcatatagtatagctaccttaagggaatgtaatatgtcaagacctagatttatgaagtaagaataacgagaatcctcacattgcagaagtactcactgcagatttctgtgtgaccacaataatacctgacatgattttctgtgcacactacacttgtatttatattgttcttgacctgtaaaattatggtgcccaggagagaaagttttctcttttcatgcttgccaacatttaaaaaattaaagagttatatatatatgatgctacaaaggatggtgattaacraaggctttgtgttgctacttagatcatccagcgggaggtattcactatgaaatgtgcatagaatgtccacctactttcagtgacaagagagaacaaatatcagaaaatccaacagaagccacagatattggtaatttgtttaataaataatttttagtaagtagttaacactggcaggaatgagaaaagctcatttgccattgtgaaatgacasttgccaagaataaaacatgattttccaaagttgcttggactagtcatgaaataaatgaaatacttaattmtatttcacattgagattaaaaactaaaatagaaaactgcagtataaaaaatcttttgtgttggaaagactaaattatcatggatatttttcttacattgtgataaaattggttttatttccagcataagatttttaaaagaagcaatcattttcagttattccaaataaatttacaattgttttgcatttaccaagttttgtttggcttaaattctaaattcccttgtggaaatttatttgttccagaaaatgagaatgtctgtggacatggtttttagtagtttgaaagtatttctgaacactgactagttattgtggtgttttcactgtaggttttggtaatcgatgtggaaaacccaaaggaccaagagatccaccttcagaatggacatgattcagggagctagaagacactttaagttatactggaaaattcaggtgccactgaamgccagatttatagtattccatctttaatatgtgggactaacagcagtgtagattgttaccttaatattttttgctgggaccatctacctgccttatactacacttaggaaaaagtattacatatggtttattttgaaacttcaagtattattgccttaatgtctcttaaccctgttacacgctgcttgtagacatgttaatatagtaatacctttatgatatattgagtttaaggactactctttttctgttttatcatgtatgcattattttgtatatgtacagggcaagtaggtatataatttgataaagttgcaattgaaatattattaacagaagatgtaagaaatttctgcatggtctaaatctttgtgtactttatttgtaaattatttgcccyggagttttagaaaatagtttctgaattttaaacttgctggattcatgcagccagctttgcaggttatcagagatcaaagattgtaataataattttgtaaattgtaagcaaaaagttatttttatattatatacagtctaattgttcatcctaattgttcctgttttcatctagtcagagattcagtaagtgccttggaacaatattgaattctcttagcttgtgtgtgtttctttaatatttgaactcaagtgggattagaagactatcaaaatacatgtatgtttcaggatatttgacctgtcattaaaaaaaacaaacagttttacagtgcctacttgttgccttggcttttcatttctcattcctaggatattggacttaactatcagcctttttgctggctcagtcttggtatgaaatgaatgtgaatggggtttaatttctttttttttttctttttttagacagagtattgctctgtcacccaggctggagtacagtggtaccatcttggctcactgtaacctccacttctgaggttcaagtgattctcctgtctcagcctcccaagtagcctgccacgacgcccggctaatttttgtattttcagtagagatggtttcaccatgttggcgaggctggtctcaaactcctgaactcaggtggtccacctaccttggcctctccaaatgctgggattacaggcatgagtcaccatgccaggcctaatctcttaattaaggaatagagagtaccttctgcaaaaaacatggttctgcggattctaaatacttattgcccctaggcattcctcatccttatcattattagcctaccaaagtcctagtagaaaacccaacagagggggccagaccgggtggctcacgcctgtaattccagccctttgggaggccaaggcaggcagatcacttgaggtcaggagttcaagaccagtctggccaacatggtgaaaccccatctctactaaaattacaaaaaaattagctgggcatggtggcacatgcctggaatcccaggtattcaggaggctgaggcaggagaattgcttgaaccaaggagatggaggttgcagtgagctgagatcgcaccactgcactccagcctgggcaacagagcaagactacatctcaaaaaaaaaaaaaagaaagaaaaccaaaccaaggggatgttgagaacgggaactggtttcttgtcatcccatgactggagcacagattccattcctcaatactaagtctgaattttcacaaccatagattggaattgttggatatctgtattttccatctgcatacaaaagattgaagaaattgtaaaactaaagtacatggaaaaccttatatgagtagaagggggattgttgtggaggagaaagtaatactacaatttcatgttaaatttgttttaaagctaactggtcttcatgttgatccctgttgatcccttaggattttttttttttttgagacgaaactttgctcttgtcgcccaggctggagtgtaatggcgcaatctcggcttactgcaacctctgcctcctgggttcaagcaattctcctgcctcagcctccttagtagctgggcttccaggtgcccaccacaaagcccaactaattatttttgtatttttagtagagacggtgttttgccatgttgaccaggctgttcttgaactcctgacctcaggtgatctgcccgcctcagcctccgaaagtgctgggattacaggcgtgagccaccacacctggccaatcccttagaatttgaaaattttctgtatgctttggtaataaggaagtggtaatacagtagatgcttgacattttcaagacacaggcactcttgtaatagatctattcctaatacaatgtaaactgaaataaaagcataactgaaaaaatttttagccccttcacacacttgatgagttatcgtagactactaaaatcataaggatttttgtggttggggtggggtttcttggaataccttcactgaagtatacatgtattcagaagtatgcaaaaatcgtattaattgccaggtgcagtggctcacgcctgtaatcccagcactttgggaggctgaggcagggggaatcacctgaggtcaggagttcgagaccagcctcaacatggagaaaccccgtctctactaaaaatacaaaattagccgggcgtagtggggcttgcctgtaatcccaactactcgggaggctgaggcaggagaattgcttgaacctgggaggtggaggttgcggtgagccgagatcacgccattgcaatccatcctaggcaacaagagcaaaactccagctcaaaagcaaaagcaaaagaaaaaaaatcatattaatcatcataaagaatatcacctatgtgagtgtgaccgctgcctaggtcaagcagtagaacagtatctgcaactgagaagccacccccttaggcttctgaaatttgttcattttcatatgtgtagcagttatttgttctttgttttttgagacagggtctcattctgtcacctaggctgtagttcagtggtgtgagcctactgcagccttgaccacctgggctcaagtgatcctcccacgtcagcctccctagtagctgggagtacaagcatacaccactacgcctggctaattttgtttattttctgtagaaaataaaagtctcactatgggccgggcgcagtggctcaggcctgtaatcccatcactttgggaggccaaggtgggcggatcacgaggtcaggagatcgagactatgctggctaaaacggtgaaaccccgtctctactaaaaataccaaaaaattagccgagcttggtggcgggcacctgtagtcccagctactcgggaggctgaggcaggagaatcgcttgaacctgggaggcagagcttgcagtgagctgagattgtaccactgcactccagcctgggcgacagagtgagactccaaatcaaaaaaaaaaaaaaaaaaaaaagtctcactatattgcccagattagtcttaaactcctggccttaagtgattctcctgcctcggcctcccaaagtgctagaattacagatctgagccactgtgtcagccatgcatgtatcttttgtcacacacatgtacatgtatctgttggatatatattaaggagtggaattttgagatcacagagtttgcatatatattccagttttagtacatactgctagttttctaaattgatttttctaattgttaaaatccttgctaacacttgatatggtcaatacttttcattttagccattctaatgggtatgtagtggtattgccttacctgaatgtctatttctttgatgattagtgaggttgagcagcttttcacatgcatatgaccatgtggatatcctcttctgtgaactacctgttcaagtctgaagcagatactatttggtagtatcaactaaaactgaatataatacataccctaaatttagcaattttgtacctgtttttttcttacatacctgtaatcccagcactttggggggccgaggcgagcagatcacctgaggtcggtagttcgagaccaacctgaccaacatggagaaaccctctactaaaaatacaaaattagccaggcgtggtttcgcatgcctgtaaatcccagttacttgggaggctgaggagggagaatcacttgaacccaggaggcggaggttgcagtgagctgagatctcgccattgcacttcagcctgggcaacaatagcgaaactccatctcaaaaaaaaaaaaaaataaaaaaatctctttccactgtaagtactatcagttagctttcttttgggagccatttttcgcaaagtattttttactttatggacattttctacatatattgataaagcaataaagccatagttatatgtaagtgctgagctagactcagtcactaggtaactgacttgcttacatgtaacagcctcatagaatatgtggttcagatttttgcctgagcaaaatgatgtgactctatgttctaaacccttgaggccacttaaaatagtagtaactatgaatgttaaattattgaatgtaaagagtttactgtatatcagtttgcctttttatgttctgaaattgaatttactatagatagaacgttcagaattcctacttctatttagataattaaatggctatgagggaatgggcaggtctcttagttcccaagattctggcttggaaaggaaaaaatgtcaactttggatatgttgacttttaggtagacaataccttcagcatcaaagaagtgatatccagtccacaggtagaaatatatttgaagttcagaagaagggtccacattgaagatcaagattagggcattaatatagacatgaatgaaaccatgagtgcacaaaaccccagggagaataaatgaactatttgatatttaaatgaatttttgcagttacatggtaaatctttacatttctatttgtcaaaacatgatttgggttaaacatgggcaatatccccatgccagtcatctgaatcattttgtactctaggttctgatcaatcaattcaccttcctcactaccatcaagctgatgttgctagaaggccaacctggatctgctcttgactttgtaattgttacttctccctaagaaatatttaatggttctttattgcctgtagtaatgtttcatcaaaacattcaaaacctggccgggagcggtggctcatgcctgtaatccctgcactttgggaggctgaggtaggtggatcacctgaggtcaggagttcgagaccagcctggccaacatggtgaaaccctgtctctactaaaaatacaaaaattagccagtcatggtggcaggtgcctgtaatcccagctacttgggaggctgcagcaggagaatcgcttgaactcaggaggcggaggttgcagtgagccaaaatcacgccactgcactctagcctgggagacaaagcaagacttcatctccaaaaaaaaaaaaaaaaaaaatcaaaacctggcccagattctcctgcactagaattgaggcagtgttcttaaaattcaggttccaagatcctactctggacctgaattagagtggagccaaagaatgcgtattttagacaagcagtacaggtgattctgttgcgtaataaaattggagaacaagacctacaggatcaagtccagactcctgagcagatcatgcaagacctgttcaagatcttcctgttgctattctctctggcctttactctggtcacatctgtgctccaaccatgagctacttatagtttccagagccccccaacgcccttagtcatcctatacctttcctcttgaacatcgttctttgtcctgttctgttgagccctactcatctaacaagattagttcaagtgtcatttcctgtattaaacttaacttgtcctgtctcccaacaagtcaaatcaaccatttcctctttgttcctatactgtttaagtacatttacttaaactttctgctctactaaactagcctctttgagagaaatgaccgtgaaatttagtggaaatattggcatatatagactcaggtagctaagtgtgaaaagtaggactaattttgaatataagtattttcttttttgtttgtttgtttgttttttgagatggagtcttgctctgtcgccaggctggagtgcagtggcgcgatcttggctcactgcaacttccgcctcctgggttcaagcgattctcctgcctcagcctcctgagtagctgggactacaggtacgcgtcaccacacctggctaattttttttcttttcttttagtagagatggggtttcaccatgttggccaggatggtctccatctcctggccttgtgattctcctgcttaggcctcccaaactgctgggattacaggcatgagtcactgtgcccggccttttttttattattatttttttgagacggagtctcactctgtcacccaggctggagtacagtggtgcgatctcagctcactgcagcctctgcctcccgggttcaagcgattctcctgcctcagcctcctgagtagctgggactacaggcacacgccaccatgcctggctaatttttttttttttttttttttttttcagtagagacgaggttttgctatgttggccaggctggtctcgaactccgatctcaggtgatccacccgccttggtctcccaaagtgttgggattacaggcatcagccactgcgcccagcgtttttgtttttgtttttgttttttgaggcagagtttcactgtcgcccag

SEQ ID NO: 96001 - DNA, 35354 bp, Homo sapiens
tgtatccatcaaccttgattaaagtagttttaattcaaaaggaaaaaattttctttattggggcagggtgcagtggcttatgcccataattccagcactttgggaggctgaggcaggtggatcacttgaggccaggaattcgagaccagcctggccaacatggtgaaaccccatctctactgaaaatacaaaaaaactagccaggcatggtggtgtacacctgtaagcccagctactcaggaggctgaggcaggagaattcctcaaaccttggaggcagaggttgtagtgaaccgagatcataccattacactccagcctgggcaactctgtctaaaaaaaaaaaaaaaaaaaaaaaaaaaaaatttctttttctttactggaagaaaaattaggctttttgtttgttgtaaaaattcacaaatgtttatcgtgcaggaagccaaacatactttgttccttcagcatttcttaatatgtgtaaccttctgattttatacttggaaaatggtgatgatctataatagttggaacctagtcataacacatccgatctgtctctgattgcaaatatttcaaggagtactttaccatagcattacaatgaatggaggacaaaccacacacaagtaggtaagattcagataggtgaccttgtttctcagttctatgtcactgaggttaatgcactaacttgactttgacaggctacgaagtgtgagaggcaatggaagcctggaaataaaaaagccctgactataagcattcctgcttaagcaaaccaatctctctttaccccaatcttctcatttggaaattcaggattatcatacaatgtccctctrggaatgggaaaattaaatgaaataatatatcaacaccatttaacgccactctgcacagtcccgatattttacaaggctatttctccattcactgtatgtgattccaccctcattaggtgtcctgcccagtcttggtcttggccagtgggcatgggggccccgtctatcagtgctccacatgtgtcgctgtcctgactgtgccctaccacacactgttgtcctccctcatggactctgcagtttagctacctggagatacttctgcagtttcccttttgctccagtggttagttccagtccatgatagctgtaggcaagactcactgaagctaatgacgcataaacttcaggctccttcagttggacaggctcctgtgatggagcgtagtaatgggtccacttggacataagctttcacagaattttgtacattttgcaaaagtaagatctagtcactacaatcagctgagaccatcatatttttccacttggttttcccttctatcacattcctcctctgccagatgttatcaaagtggtcacaggcattcttttcttttgtgattttgtatttttttcctcttaaaagggctcttgaaactgtacaaacttcagaccccacaaaagctgaatctttcccctgaatcactgttaaaaggtgtgttgttagggaggttcatactcaaaatatgctccgaatgtactcaattaaatgctctgttctgargggcccacctgtgccctttctctcattcctatcaaatatgtaacgaaaacatactaagtgcaaaatggtgtaggcaaagcaggtacttaataaattcttgtatatggtgaagaggagtattttcttatcgaagatggtaaagctgactatggcagccaacgtctttggcaacttcccccaacagaatgtctggaagtttcgatgtttgttgttttacttgaatttgccagaagtcagtgatggctgctgtttttatgtctgaagtctacagtgcaccaacgtttcactggcaactgcttgttctctaagtaaacttttttttaattcccagcctctctctgggctcacccatgccrgttggtgtcagccattctgctgaaattgaggatctgaagaacatcttaagcaattcttgggtaaaagatccactgtcagagattttatctgtaggaacaagttgggggagcaggtggtcagcatgctacctgattcttgattagttagcagtttcaggggagcaggtcaaaagtacaccaacccaccctggtcaatgtttaactagaattctccataaagcctggcttataatctcattaaccctatgaggacgatttcactgtcctacttccctgccccaaactgctgtacacatgggaatccctggcccctgagcctgatatcttcaatagtcttctgatgaacgcaggcttaggtcctgcatttactggccacagacacaccagcaaggctaacaccctgcaagccagaaacacccatggagagcacagcaagagggggagggtggctagagagaccctaaatgtgctgcagaggtgaggccctggggacctctgcagcccaagtttaaaagtctccgaagaagcgttgggaagatgatgaagcccagctcccctgcagtctcagggagatcacgtcaacacttcagaccccaaccactaacctggaaaacaacactagattctccccaggtggttcctgaggccccttttagaagttaccctcaatgatacctaaatcagttttcccatccattttctgaaggacccttcacttaagtcatagtgctagagctctgcgtttaaaaaaaaaaaaaggatttattagtcctatctgtatagactctgcactactacagagaagctttctttctgggtttcatttctgagtatgtcctcctcttcttgcttttcaggaaaacatggagtcctaacctgggcgggaggaagaaagagccttctcagatctcttccgtggctcccattactttttgaacacagtcttgcatcctagccagatttccagcactttcacaccctggtcttgcacaaacctccccatgaacccccttctctttcctcaggtcactttgaacttcctgcctctgtggctttgtctctccagagatttttctccctcctcttctttgtccatcgaaatcccactgattgattagggccttcctcacttcccatgtacgctcctggactagccacttgggtccactgtactcctctctctcctgatccttcccagcacctgcagtatgtgctgttggttagaggacagtcttattctgccttgtttcctttcttgagggagcaaacatctcagaagttcttaaatcttttatagcccttgcagtatgtcttggacaaagtggctgctccataaatgtttgttgattgatttttatagtaggtgctcaataaaatatgtataccacctgtgatactgggaactatgtatttggtcttcattcccatttcctgacatatagctcctaaaacccttggaatcytcagagtgataagagtgtcttttgtatgctaatgagatatctggtggctggagccctgtagtaagcttcaggatgggagctggtcatctggaaatgacaagacatgattagagagtggggactttcagccctatccccaacctctagggagaaggggttgaaggttaagttggtcactagtggccaatgttttaaccatcatgtctacataataaagctttcattaaaaaaaaaaaaggaaaaacacaagactgtgtttagggagcttccagatggctgaatatgtggaggttcctggacgttgtgcccccagagagggcacgggagctccttgcccgttcccatatgcctagccctggccctctcttccacatggctcttcatctgcatcctttgtaatatccatattaataaatgggtaaaggtaagcaaagtgttcttttgagttctggagccactctagcaaattgaaccattattaattgaacctgaaaaggggcttgtagggaccccgatttatagcccaccagtcagaaacccacaacctggggcttgtgattggcatccaaagtagggtaagtcttgtgggactgagcccttaacctgtgggatctgacactatctccaggtagctggtgtcagaattgaattgaattagaggacatgcagctgaagtgtctgctagggaatctgcagaatgggatgcttggtgtgtagggagacaacccccacacacctggtcacagaaagtgttctgtattcagtgactgtgacagtattgagcatagccagagaaaaagttgcttttccccaccaccccctcaccggccctcagaccaccttacaaagaattgtacatatctcaacttatcagagacctacaacaacttgcaagggattcttagttcattctcagttttcagatgggcaatccaactcagaagtcaggtgatttgctcaaggtaaaaatgcaggtctcttgaaaccaaagtttgtgctttggttaagggcttgagctttggctgggcacagtggctcaagcctgtaatcccagcactttgggaarccgaggcgggcagatcacgaggtcaggagatcgagaccatcctggctaacatgttgaaaccccgtctctgctaaaaatacaaaaaattagccaggtgtggtggcgggcgcctgtagtcccagctactagagaagctgaggcaggagaatggcatgaaaccaggaagcagagcttgcagttagctgagatagagccactgcactcccgcctgggtgacagagcgagactccatctcaaaaaaaaaaaaaaaaaaaaagagcttgagccttgacgtcagatatccagactggattttaccatttaagagaccctggacccttccttactgtcttggagcctcaatgtactcatatacaaaatggggatagtgataatagtacctacttcatagggtggttgtgataatatgatgtcatacatgtgtctagcacatggttaatgctacatatacattattgaaaatattattgtcactaatttgacacatcacactgcctccctggaaacaaacttgttaactgtgcctcatgcctagagctcagtagacactcatcaaatattgaatcccttctttgaatatgtgggctaaatcagggatcccaaatccccaggccacagaccactaccagtccgtggcctgttaggaactggcctcacagcaggaggtgagccgtgggtgagcaagcaaagctttgtcttcatttatacccactccctatcatttgcattactgcctgagctctgcctcttgtcagatcagctgaggcactagattcttataggagcacaaacctactgtaaactgcgcacacaagggatccagtttgtgtgctctttatgagaatctaatgcctgatgatctgtcactgcctcccattactttcagagaaaaccatctaattgcaggaaaacaagctcagggctcccactaattctacattatgttgagttgtataattatttcattatatattacaacgaataataataaaaataaagtgcacagtaaatgtaacacacttgaatcatcctgaaaccatctccccatccccagtctgtggaaaaattgtcttccatgaaaccagcccctggtgcctaaaaggctggggactgctgggctaaagaatcatgtggttctatcctagattatctcctgaatagtgtttccagctccaatcaatcaacaacattactcagccctcaccccctccttcctgcttcccccaccagctgacccagcagagccaggcacccggctaactgtgggcagccaaacgaggttggaagttggacaggctcacccattattcaccatacctacaaatcagctggagaaagcccaggctggcggccagacagagggctcgtgggccagaaagggaagggcttggcagagacagcgccatggagatgacaggttgaggtcacttgctcctttctccggggcaatgggtgacagagacagccatgcaggccaatggaaaggaagaccagggggaatgtcctgaatcaagtcaccaatgggaatcagtttcgctttctctctgtctctcagggcatgagaccagccaggcactgggaaacaaggtttggtgccagagattttggtggcttccaagactgctttttcagagacaggtacttgaattcttgctttcagctgaggggtcgttccgtccatgctctgggagtttgggrgtgtgtctgaatagggtcaggggacagtgatggacaggccactgtgccaggacacaccacattgctcgctcactcctcctccctggcagctggttattcttagccacagattgcttgccctttcaacttagtttattagagctgttttgagagagttgctggacatgggaggctgatgtgaaacagcgaagtcaataaggtcactggtggctgcaggacagctctactcaagctggcccccaccagactgctctggcctgggcccgttcccttctcttccctcagccctggcaggcccactctctctcagctgaccagcccactgtacagcaatcaaattaacgtatcaaattagcacagaaatgcatagactgctcgaggaataggaatatcacactaaacttcattggagggctttaaagtctcatagtgcgagaatcttcagaactggaagagaaagcagaggccactaacaaccaagcccacgtttttcctgccaacagcccttgctgaggaagctgcccagccttccagaggaaaggtgaacctctgtgtgtgggtggccatggtttgtaccatgtggcccagtaccctgattactgtgctttggacagagaagggcaactatgccaagggcacattcagaggctggtttagcccagcaagttggcctggtgctagaattttgtccaacaggggatgcaatgaccaactggtacaactgcattttctctctctggagtttaaacctgagccatacagaaagagtcagagcaggaacagatggggaaagccaaaaacagggaagcaaaggcaggcggggatgctgacagtggagcaaggctccgtgggtgaggggtgggacagagggtgccagcctcaggacacctggcccgggctccgggatgtctgtcccctgcatttccattcagactctcccaaggagccccctttatgagaccgcctcactgggtctctcytatttaccacccaaaggagcaagtaatccatctgttctgtgttacagatgagggagtggaggctaggagaccacggactgctcctcaggttacagaacctgtccaggacagacagggggccggtgacagtggcagatggcagaggagactgagttcagctgctgaaactttctgtaatgtccttattattagaaacaactttgtagacagagttgagttttgagttgctcatgggtcatgcccctcaccactgctcctcaggtagttctgggagcaaagactacagctctgtggttttctgtcaaccttccctaggttgtgcccatagggaaaatggtttaggaaagggggatgaagccgggcatggtggctcacgcctgtaatcccagcactttgggaggctggggccggcggatcacaaggtcaggagttcgagaccagcctagccaacatgctgaaaccctatctctactaaaaatacaaaaattaacctggcgtggtggtgggcacctgtaatcccagttactcaggaggctaaggcaggagaattgcttgaacctgggaggcggaggttgcagtgagccgagatctcgtcgctgtactccaggctgggcaacagagcaagaccccmtttcagggggaaaaaaaagggaagggtgaagaatgagtagaaaactcctccaaatgcagacctacttactggctaggtgttctaaaggcaaatccaagccagttttgtgttactctctaaaagcccatggagatcttgttgcttatacaccaatatttaatggaaagtgagcttatggggttatcctctttatctcacaagaaacaccaataggctaagtcttattctgagtggctgaagacctaaggaaaaaactgtcaagaccaaactttgtctggatgggaaaatccttaaaacaaggggtatagctcccatttccctcctcacaggctcatggacacagcacggattgcagttgtcrgggcaggtgtggtggggctctccacggctgtgtgcatctccaaactggtgccccgatgctccgttaccatcatttcagacaagtttactccagataccaccagtgatgtggcagccggaatgcttattcctcacacttatccaggtgagagatttcagctcctctatcagatacaatagatgtcagatagaatgatgttagtggaattctattgacaaaagacagctggctataggtgtaagtgtaatatgcaggtttttttctttttcctttcctctttttctctttttttgagacagggtctcactctgtcacccaggctaaagtggagtggtgcaatcttggctcactgcagcctcaacctcccaggctcaagtgatcctcccatctcagcctttcgtgtacctgggactacaggtgcacaccatcatgcctggctagtttttgtatttttgtagagacaaggtcttgtcttgttgcccaggctggtcttcaactcctgacctcaagcgattcatcccccttggcctcccaaagtgctaggattacagccgccatgcttggccataatgtgcggttttaacatcctgttggttcatctcttaggacagcctcagttatgctgcaggacagaaacaacatccaaatcttagcagcttaaaaggcaaaagtttgttcttgctcacactacatgtggattgagcatcagcaaggggccagcttgtcatcagggacctaagccgatggagcagctgtcatcctgattgtcatcagcgcatgtgcccaggggcggaggggaggggacctctgaggttctcgcctctgtgattaaacactctggacaggaagcgactttcaacgcttctgatgatggctcattggcagagcaggccacatgtctccaccctcagcaggaggccagaaagtgtgattctatagttcccggaagatggatagcagaagcatgggatgaacagtactgacaactacatgattggcggctctgtctttccactgataacagtaatgactatcaagtcagaaattacttgtaagggaactaaaattatcctaacttctaagcctgtataagaacaattatcaatatgtttgtaatcagtcaatcataattagttaatatgtattaagacctgaagatgcatggatttttttttttttttaagacagagtcttgccctgtcacccaggctggagtgcagtggcacgatcctggctcactgactcactgtaaccttcacctctggggttcaagagattctcatgcctcagcctcctgagtagctgggactacaggcatgagccaccacgcccggctaatttttgtatttttagtagagacaaggttttgccatgttgaccaggctggtctcaaactcctggcctcccartcctcccactggtggggcatggtggctcacacctgtaatctgctggcatgccccaccaatgcattgatttttgaacatgtccatgcgtcctttcctttctgtattttccacttgaaatggggggaggaagaaaatagcattaaatagaaaccaaaatcacgctgcagtaatgaagtttatactcactgtccccatttcctcatttccactctatttttcctctttaattttattttttattttttatcaaagttatatatgcccatagtttaaaccgtcctcccttctgaagtccttttccctctttctggaaaagttaatatgctggacctcccagactggtcctccaattcttttagctttgtccccctcctatttatctctctctattttactttctgggagacttactcagttttatcttttaccttgctattgaattttttatttctactataacatttctaatattccaaagctcttttttgttctcygaattttcatttgttataacatcttatttgtgttagaagattgcaatgtcctctcttatctttatgaagatactaataacagtttttaaaaactttctccctgaatagtatctgagtatctgtcatctccaaattgtgggaggtttttgtttttkttttttgattttctcatttttcatgatagaggtttttcttggccgtgtggtattctttacctgtctgctgatgtttatgagtggaccctgaacagcagatgggaatttctgagtgtttgcacagggcttgttgycagtgagctcactggagtaagagggcagggccatttatttggggacatctgtgatgtcattcagtttaagtttttcttcttgggcgggtcctgtttcccagggaagagggttccatgtcctgcctggggaaggtgaaggcccggatgccagctggcatttgagaaggtgacaggggaagaggctggggtcctagcatccagtttgcatgtgtttccttaacactccttttttcagcacggcatccctgcctttgctggtgctttgtgttttccagtccaaagacccctaagaaagaatagacatatcttttattagggtggtaatagcagcgaccttggcattgcaggtccaggagcttggctggtcagctcctgggaactgcctcccaggaaacaaacacaggcacctggtgtatccaccagatgccagctgatatagtttggctgtatccccacccaaatcacatcttgcattgtagttcccataatccctacgtgtcgtgggaggaacctggtgggaggtagttgaatcatggagacagttaccccatgctgctgttctcatgatagtgagtgatttctcaggagatctgatggttttataaggggctttccccactttgctgagctcagctctcattcttctcttcctgccaccatgtgaagaaggacttgtttgcttccctttccaccaygatcgtaagtttcctgaggtctcccagtcatgctgaaccgtgagtcaattaaacttctttcctttataaattaccctgtctcgggtatgtctttattagcagtgtgagaacagactaatacaccagcttacactaagtgcttttcttgtgacgagagttcttgggaccattttccaggctctcccttgcctgtaccaggcctgagtgagtgttcagaaggctgccagctagtcatggaatcatccctcaaagacagtcactcatctgagggctcatagggccatcgaggccagaactgtctctttggccaggtggctggttctcctggaccagggtttttctctctgtgatgctgctagataaagactttggtcttctctttgggtttctttcctagacactattcagatgagccccagtcataactatctcctgtgctcataaatgtcaataccatatggagaccatgcctgtcccatagggttgttgtggggattaaatgagttgatacatgtaaagcatttagaacagtacctggcacatagtaagtgctatatcagcatttgctattgttctcaccattccagctatagttctgttttaccaggacttgaacatgaattaggtcatcaggcttcctagacccactgctggatgggaattgtctgttctttgggatgacttctgcagcatgtgaatctcagccactattttgtttttaaggtttggggtgagaacagggagttgcattttaatacaacctcacacagtggcatagattgttgggtaaagtctatttgaggccraatttagttctctctgcagcttattatttatttattccttatttctaaagcagcatccccactgtgaaattttggaatatagtgttaatttcacatgggcacatgtttaaagatggcagtacagattcgctactaaagaaatatttattggctctataacaagcgaattgtctgaaaatcccgctactgacatgacttcagtgacctgggggcttcacctgggaagcaggatgtctccaaagatctttctatctgttccttgaatttcagggacacctctccaagtggaaccaacttagcatcctctctgcctcagttccctcatctcctctgtggcttccctcatagcagcccctgaggcttattgttccctggtccctggcctaaccctagccagtctctcatgatccttctacaggaatcagacggccacatacttcaaccacagctggatttgtctgtgattttgggtcattcctgccgtctctgtgcctacactggacacttattttgaggcttaaacgctgcctcttgtttcctccccaacaggcctggcactcttccaaaagttgtgtctgggtccaaccccatgtgctctggcagaggtgcctgggggatggtatggtccctgcacgcccctgctggcttcaggagtgctactctggctggcacctgattccatggtgtggaaggtaatggcagcccctgctgggaagtctggcctgcagggggctcgcctccagcatgcaagccttgtttccttgtaccaggaggcaagcccctggaactccccatcgaggtgcagtctgttctctgtcccggttggcctgggccccacagacctgcccatgtcatccactatgttttcagcccccaagaaagaggccctctgtccttggtcctattgtctcaactgtgtggccagctggatcccacagccatgaactaagctctgctcaggttggttatagamctgccaaggacctctggaatatacctagtaccaaaaaccaccttccaactagctcgcatgccgggttttgcccttattggcctgttttccctccattgattaatcatatgagcagatttggacagcatgtgtcaacatgcaaatctcttgttgctgacagatcctctgccacaatgtggcactttatattaatgttcctccctgcctccttattttatttttgcctccttattttttttccaagtttctaggaaggagcttatttgaagcactgtcattatcatcattttcctttctgttccactttgcttttctccatgattacagatacacccattcacacgcagaagcagtggttcagagaaacctttaatcacctctttgcaattgccaattctgcagaagctggagatgctggtgttcatttggtatcagggtaagtgaagaaatttgaagttattttagagtgtagcatgatcttaacaggcattagagttcaacataaaatatttactgagtagctgttgtgagcagagtgctgacttagatgcaggaggattcggaaagagcattataggctttaccccaaagaactgaagaaagacaagttatggtattagactttttaacaataaacaacaatcagagtttctcatcacaaatacgattgattttgggtttcctcagagaccatgcagtgatytgcaaatttggttaaaaaaacacgcaggaggtaaatgctggatttgggtgatgtggggatggtacagccgatggaaagcaaacaggtatgatgttgggatggctgcagagacctaagggagagggacttcttatttattcggtgtccttggagaatgagatattccaaagaaggaaattttgtaggtcactaaacttgccttttgaagtgccatgtggaaaaaaatatttctgaaactgttagcacacttctatttcatttttaatgtataatttcagtaggcatgcataattaaatgaaaatttgagaataaatgctatttgacatttctattagtaagacgagcacttaaaacatgacatcttttaatatcttcttaaactgagatcacttaatattctatcactttcaatttacttctcagtgtcatcatatgatgtaacatacatgtcattggtgcatgttacacttgtaacatacatgtgttatcctgtgtgataacacagtcyttctgcggccttctgaaaaaatgtgtcttatctcctcttttgatgtcaggctgcccactggggttttttgctagtctagtgtacacacttgcattgggtgaatttctaccctttttctcttcttgtttttcctcaccatcacaaacaccaagatgatgctgatgtcagtaatttcccaaagcccctccccaaagtagcagttttgctttcctatcaatctatggattgattcttctgtataactaaatctggagccagttgatgagccaagtagaaaaaacattttctttgatttacggtcacactctttgtccaaatccaacatgagtccrtctaattcacaaattttggctctwagtaatttttggaaacagccaygtcyagaattaaaatcccctgtgcatctttggcgtaagtatatagccttactcatctatttattccttcaaaacaacatattcagcattcttcagtatcaggttctttcttaggtattagggatatagcagtgagcaatttagtaataccacttggcatatgcttaacaaatatgtgttgagttaatttttaaggaagacacagtcctgcccttatgtagcttatggtctctagggaatgcagtaaatcaaatgagttaccaaattcactgggacatgagttaccaaaaggaagaggctagggtgctatggaagcatatgtctggagaagaaacttgctctgggaagtgatgagaagccatccagatcaaggtgtttcatccgasaccatcaggaagagtgtaagttagtctggtgatgttgtagaggtgaagtgggggcggggcagggtgggagacgaaggagacagcattccaggtggaggaaacagcatacacctagacctgagtctagggcgactgtggtgtgtgggagggactgaaggaagtccagagaaatgggaagccattgagggagtttacacagtgaagtgactggtcataattgcatttcaaaaatatgttttctatagtgtggagaatagatttgtgggaagagttgatgatgagatagattgggtgtggattgtagaaacagagagtagatggacttgagaaatgcctaagaggagatttgataggacttgtcagttgatggtgtatgagaggtgagtagggagagagaatcaaggatgattcttgggtttctggcattagcacctgcatggatgggtaccattttctgagttaggtaggattgggaaaagagtggatgtgtgtgtgtgcatgcatgcgtgcatgtgtgtgtaaatgcatgagacttctaagtggacttatstagtggggagtaggtaacatgggtccggatctgtttttggagctcaagagagagaatggactggagatataaccttctaagtgctcaggactggaaatgtagccttctaagtgtctggcctgtaggtcatggtgaagatatggaagagggcaagctagcccagcgcaagagtgggccagcacagagccctgcagtaaaggacatttgtgtcttcatggggactgctctgaatcaattacctagagatacatattccgatgggggaattattagcaactatgcttagcactcagattattttccttgctatttttgagcaatgatgatttataacttttttttttttgaggcagggtcttactcgtctaggctggagcgcaatggtccaattcagttcactgcagcctcgacctccctgggctcagttgatcctcccacttcagtctccccaatagctgggactacaggcttgtgcctccacacccagctaatatttgtattttttgtagagatagggtttcaccttgttgcccaggctggtctcgaacttcccctcggcctcctaaagtgctgggatcatagataggtgtgagccaccatgcctggcattataacatttattcatttactgatgaaaacaacccaatatttacaaatctaaacatttgcatagcagctattagtagtactattacagccttcttgttaacaaccaaatctaggcaggagctttttagaaaaggagtattaaattccatctttaaaaagcatgttacttttaagatgttttatttgcccagtcaccaacatctgctatttagctactgagttatctgaacctaagagaatagtaaaatagatcattttctctttgtgtttatagaaactaaatttttaaaatgttctaggccaggtgtagtggctcatgcctgtaatcccagcactttgggaggccaaggtgggtggatcacttgagtccaggagtttgagaccagcctgggcaacatagtaagacgctggctctacaaataattttaaaaattagtcgggtgtggtagcaagcacctgtggtcccagctacccgggaggctgaggtgggaggattgcctgagccccagaagttgaggctgcagtgggccatgattgtgccactgcactcccacctgggtgatggagtgagactctgtctcaaaaataaaataaaataaatgctctagagaatgtcatgtgaagtttactagaaatatgttatttcacaaatttcaggaaaaaatgttcacttaatacgtttgagttggcagatatttcagagcactccgactgaagaagtgccattctgggctgacrtggttctgggatttcgaaagatgactgaggctgagctgaagaarttcccccagtatgtgtttggtcaggcttttacaaccctgaaatgtgaatgccctgcctacctcccgtggttggagaaaaggtcagttgaaatgctccctgatatttccttatctgtyatagccataaatcacttcgtagctattcataaaatacatactgaaaagtctctggcatccctcagagctctttcgcgttgccttgccactcacaaatggctagggctttgtaaaacaatctgaagacagtgtttatgtcacaaggactaagtcacaccatgcttctagtaatttgtcttctatttttggtgtgcacttcgatgcctgacttattccctacccttcttgccccaggtaaaaccctcttattgaaacagtatcttagttttcctcatctgtaaaatggaacagtttggagaatatatttccagctacagaatgatatgatttactctaattctttggacgagagaatctttgcttattataaattatttttgaattttttctcatttttggtaaagcaaaaaaatttcattatttccttttgtcttaaataagaactctgaaactaaggacctatccaaattatgtcactccttcctcattaagttcagcccgtgataccttgaacttgcatttcggcttacttttcaggactttcaggaaactagtacttagcttccagttaggaaacacatcaagagtatcttcatttgagatacatcagtaaatctgtctttagtttagtctggacttgcaggcatgttgagagttgtgaaatattgatcctttcaattcccatatgtgtatattttggtaaataggaacgatgtgaattattgtgtaaatgttgggaaagtgacttgaagtaggccagggcaacagtgatctggtaccagatgtaggttataggataattgattcatataattcattaattacacaacttttgttgaacgcttatatatatctggcattatgctagaagctggtaaraaagaaggataaaatatgatttctttttaaaataatttcatggtctattgtggatgactgtgtgtgtatgtgtttgcatattaattaacaatgatggtaacacacatggtaaaataaagtacagacttatgcrggttagaatgggagcagaaaggaggaagcctagatctgctaggcacatgtcagtggcatcgtaatctagttttgtagcttttcaagtgctcttctcacttttacctcttagcaatttatatgggacattttgcttctgtaagttctagtttcataaaacccatgccttttctggccttgttcaccagcccataaaccactgttcataygmcaagtttggacttgtctacatcagctgataaacgtatattttgagctatcacatgatggagttgcccaccagccaacaagcaaattttagcagcatcaccatctttcctgagtggcaatagtgtgtagtgttgaattttcccccttctaaaaatgactagaaatacaaaattagaagcattgatgctagtgataaggaaytgaggcatcatataacttatcttaataaaatccagaataaaataaaataaaataaacaaaaaaagttaaaacatgtggaaaaaggcaataaaataaaataaaatttaggtaagtggaaattattaggcatggcaaaaaatggcagagtttcctttcaatacaatgcataacatttttagattatgactcaaaaagagctcaaaatggaagaacatgtacaaaatattgtgataaaaggtgaggtgtcattaaggagtttaactttttttggtattattagtggtttgggctgaagtttcattattgccaccaagtccattgtgtggctttctcatcttggatttttgtcttaatgatcagtaagctttctagaaaacctggctggagccctgtggtctccagcagatcacgaagaggcagatgagtgagaacctaagagtgttgttctccctcagagacatggtcaagggctgattaagggctttcctgcgtggggatggccaggggtatgtgttagggatggtaatggacacagagctaagggaggtagagaaactctaacaaactcttcatacagattcctaacattttgcttcattattttcgctttctttttactccttatacatattttctttcagaaccatttgaaagtaagttgcagttttcctcttgtggctcaggctgaagtgcagtggcgtgatctcagctcactgcaacctcccgggttcaagtgattcttctgtttcagcctctcaagtagctgggattacaggtgcctgccaccacgcccagctaatttttgtatttttagtagagacagggtttcaccatgatggccaggctggtctcgaactcctgacctcaggtgatccacccgtctcggcctcccaaagtgctgggattacagacatgagccaccgtgcctggccccatgtttaaatatttaaatacttgctctcagaacaagggtatcctcttacataaacacagtagtataataaaatcaatatcattatattgatacaacactataatctatggaccttattcatattctgccaattgtccatataatgtccacatgtaaatataaatacacacaacacataattttttccagtccgtgatccaattacagtcacacattgtcttcagttgtcatgtctctttagtctccagtctgtctttgtcttttattacatttacaagcttgaatagtacagaccagttgtttcatataatagaatgtccctcagttggggtttgtgtgatgtttcctcgggatcggattgaggtcctgcatgttggggtgagaatgcatagaagtaatgttgaatccttattgcatcatagcaggaggaagatgatatcagtttatccccttattggggctgttaactttcatcacctagaatgccagttatctctactgtgaggttactactttttctctttgtaattactaaatattttgttgtgatatacctgaaactatgtaaatatcctattcccatgaaacgagttcctatgaaagtagtactttcacctacgagttttagcatccattgatgatttttgcctgaactatttattactgtgatattttccaagtgatcattttataactccatctatatagtttgctttctactgtaaagaagttttccttttcctatatgtatttatatcaggatgaactcattggtacctattttattcaatggattataatttatcccccccatcattttgatgttcaaattgtccaagattagctgagtaggagccccttcaaactgctcttgtgtctttttgatatgttcacttgatttgcttttttttttttttwaagcacttttttactttggggcacaacaaaattccacacaccccaaatttggagaagaaaaacattttcttttcatgaatattttccaccacctttcccttaacacaaacctgctgcaatgccacaatttaaatttatgaatttagtgcagaaagaaattgtcttttctcttttcctctgtcccctgaaattttcactctgttgcaatgtaaatcctgatttgaggtgtagctaaagaacacacctctaccacaaccacctggaagtccaagttgacatttagaatttctagattcctaagagtcctgcatcttcacatggcagcaaaggggcccaggagcatgccgggaagcaccctcgctctatccatatcttccctgaagacagttgtccttggccactccttgggctccggggtgcmcacagtggcacagtctgcccccgggaggaagacagtgcaggtcctggaagaggacagggaatatggggatcctgggtccccagaagacgggctggaagtgaagggagagggctctggctgggcacatgcccgagccccacacactcactgcctcaagaagaaagcatggctggagaagggccagacaggggtcctctgggtgcccagctgaaagaaggtgcggctcagatgagccagagtaagttttgagtcctagtgatagccttgagcttatgggtaatcagggaaggcggtgtgaagcgtttcttcacaaactttctcgggcccaagctttcattgaagcattggctctaaagtctagaagtgaaatgcaaatgcttaactcctcctgggagagagggctcattgctttcattttgctttaagggccaaattgttgataaggccctggggagatgaggagagttctgatggggcagggagggggcatgaaggcccagggcacctgaagaggtgtcactgtagaagggggcagaggcagggacgccagcctccccccagcacacagtcacctcctctgaggagtcctcataagtctcccagttggcctggtgccgccctgcctcgtgggcagcgtcctcctctgcgggggctggaggtccccacgcgggcccgtgakgrggcgccagtccccsccccggcccgctcctgcgcaccctcccakctcccactactccgagagagagtgttttagctccgggcagcccccgtcatttccacaccgaatcaaatgttatctgaacaatgtcttcttcctgcttccaaagcatcgccttctagaagacaggccccgtagttccatcatctctgtgttttcagacctgacccctgactgcggsaggaaggcctgggtcaaccctgccaccccgtcctgggctgcgggcctgcggtcagcatttcccgccacttaaaatgacccccagccagggggcttggggctgcgaggacggcaacgccatcggccggagaccggcggagggggcggtgcctgggaatacgccgcctcccggctgtgggtcggttatgggcagcggggaggagaggaccgagggctgcccttttacccgagtcctggggagaccttcttcagtccgtttgtttgatacgcgtgcccgccaggaaggcggctgagatgtgagtgcctcagacagaaggcacagggtgtgctgcggcgggaagacttcagagcctctgctcctcactcccttgtgctcctgagaccyggctccctcctgaccccggtgtggggcctccacagacagcgcccggtggcccctggccatgcagattagctccctgcagcccggagcctgcgtccgaccaggctggtggaggaacaaggccacgtgtcccctttcctccctcaggaggctttgcagcacgggactcctctcagcccaagtccggcctttcagggcgagcatttcaggcggggtgggcgggagggccgcgtcccggtgagggggcgacacctggggctccctctgggctgccacccactgacctcccgccaggcgacccacatgggacgccacacaatctctgtttgctcctcacactcagggtctattttgttgccacctacgcctcttccacacaatgtgagtgttcagccttcagtgttctcactcaaaaataagcatttgctcagcaagccacacagcaatggcttcagcttaagcacgattcttctgaaataatacaaacttccacaaaaaaattttgtgctacaaattagatctttattatttttcaaaagatagaagagatcatcttgttctcaaacaaaaagtaaaacaataatgcccaataatatacagaagaaacacaaacaaaaaccccacagagtttgaatcacccacacaggtcawatttcatatcatattctgccagtggagttaaattctgctgctttattactggctccttccaggaaatgagtcagcgaggcattaagtcttcctccaggcagcccayctaaatcaatcctcccagagggaccaggattgtcctgcctttgacaacattcaggaaactgggtggcccatttctgtgctgggccctgtaacatggacacgttgatctctttccaagaggccatgccttatcctgtgtccccaaggaggccctatgctgaccgcagcactggccacactgagctacttgccctgtactttcctcgcccctcctctgattaggcctctctgtaactttctctgggggagtcctctaatgcccatctttttcttctcctgtatcttgtgttctcctgctcggcctgactcacagcaatgcctgtgaaagaaactggcttcctcagcaccatcattagccccattagccagccatgtctgccctggagctcaccaggagctcgtcttttcccctgtccccgctgccagccacaggctgtccgcatcacagcccccacctccctgtttagtgctacctgagattcctttctcgccatggcttcagcttcagtggagtatgggaattgcctctgattccaagagcagagaggggatgaggggactctgctcctgggaggcctggtgtgtttgtgtgtgtgtgtgtgtgtgtgtgtgtgtgtgtgtgtgtacgcatttaagatttgcttagtggacccttattttcctcaggggcacagccaactcaatttacctccttgctgaaactcccagtgaggtgaaggaaaggcgctgaggatgaccatcctccttgtttgtgggtcaggttgatgcagtccagcagagggctaacttaagcttggggaaatggacactctcatgttttagggtgatgaccagaggatgctggggctatttcgtgagccctgcttcttgagtgcccctaaccctatttcctcatgggaggttgggacaatggtattctctctctccaggatgaggtcttgctcagttgcaagaagccccaagaggaaagtcatcatgcttcttgtacctccaaccatgtcaccccaaacttccagaataactacctcatacggtcataaaagcagcctggtaggcacttggtcacctaatttaacatctgacttttgggtacagtttcctcctatgcactggtgccatcttatgcattacccatgggatacataataatgactgggcatcactatgtggttgcattacaacaacataaaggtgaccagtctccaggcacatttagtgagttttcctctgggatccaaggcctgggagcaatccagcacaggaagcctgacaaggcccagccactaggatagcttaagaagtcaccaggcacaagttggacttttatcagtagcttgaccagcagggaacccttgaaacggaaaagaaaagacatttgcacttattgaattcttgcataatcatcataaaaaccctataagttaggcattcttatccctaggaaacaatttcagtgagttttaaaaatctgctgatatcccaaggctggcagattctcttattcccccaaattatgaaaataattctgagttttaattaattaggatatctagagcacagaacataatgttcaaatattaacacatggaatctacaatgtaagaatttaaaaaacccacaaaatcaaaataatattcaaataatgatcagttaaaacttttcaaaattgaaatatcatccttawtgaaacataagtgatatacaggtatggaggataagaatacacatagataatgcactgggtcttgtattttacartagcatgaaaaacccctaagcacttttttaaaaataaaaggtctttattgagcagctatagtgtgttagacacagtgttatgctttttccagatgtgtctcatttcattttcacaacgagcctagagagtcagtattactacccccatattatggatataagattaaagtttagagaagtggaataacttggccgaggtcatatgaatggtaaagggtagaggcctcctaagctctttttaaagttcttttcttygtgttcactttttggaagattataaacacacagaaacatgctgctcagtattactacaaaactccaatttacttttctttctatgccaatgttaaggggaaaaacaacctttacagttattttacctttaaaaacatttatctattattacatgtttaagaacataatttaagcttctaaattggttattcttactgagagagccaaaaacaatctgtccccataaaatttgctatatttagtactttttatctatgaacagttttacttataaaacaaacaaacaaacaaacaaacaaacaaaacagtagctccagcttcattctctctcttttaactacttttaattacatcaaaaagtaatccattggctttattggttctctgtggccccaaagtgtagatgcttgccagattcttttctttggtttccttgtctcaggtaaacaatatactcccttccttggatttttagaataaaaagcaaccgaatttaggttctgttgtttgaagcattgatgctggcaatgcagcttgcatttaataggaagtgcagtgcaggttcatgtgatctcagagcaagcatagcctctgagttcttcttgcctcctaagggtgctgggcacagtacaagccctcaacaaatacttgttgaataatcagtgagtctaatccagaggtttcaaactgttcttgaaactgctcrgtggacatacttcagaggtctctgcagagggagggagtgtgaagagactgagcagatggagctctgcccagcagcttgaccttcagtcagatgcagagaactgcaaagatgctgagatgacagcctgtggcttgtacttgatggaataggaagctgagctattggggtcagggtctaagatgccattgagtagcaatcttggtctcttccatgctcatcaacgtgaggcattctctctctttctctctttctttcttttttgagttggtgtcttgctctgtctcctaggcttgagtgcagtggcgggatctcggcttgaacctccacctcctcggttcaagggatcttcccatctcagcctcctgagtagctggaattataggcatgcaccaccatgaacatgagacattttctagaaatgcaatccagcatcagaaggccagttttctgctgatcttaacacaagttgcagttaaactttccaaccaggaagtggggcggaaagttagaatcacttcaaagagtccctccttgctaagttaaaattagttgtcaaacccatgccatcattgaccaccattgcagaagtttctgtcttttttattattttccttcacattaaacctgtttatctggccttgaaagtagatagcgctcagaactgctgtgatgatcacttctgctctcttaggggcatgcaggatacaagcattctgcctccattttcaaggtcagcccttcccagtttctccctgaaacggcttggattgyggcagtcagagagagaagatgccaaagttctgccaccctgtatctctctccagacaaaaagaatgaataggatgtgtaagatcggcagggtgagttggcaggcaagcaggagasccaggagagccaatggtgtagctctagtccaaaggccagcaggcttgagactcaagaagagccaatgtttttgttccagtccaaaaagaggaaaaagccaatgtcccagttggaaggcagtccagcgaaggaattctttcttccttggaaaagagtcaacttttttgttttattcaggctttcaactgataggatgaggcctacccacattaaagaaggcaattagctttactctgcccactgatttaaatgtttttctcatccaaaaacactttctgcagaaatacacggagtatgtttggccaaatatctgagcaccccatagcccaatcaagttgacacataaattaaccatcgcaggtccaaaccaggatttcatattgtctttagtattggctaatacttacttccagtccacttggtgtggggcacttagctaggtcatagggatggtaagaaacataagatacartctctccccttgaggaattcgtgatttattgatatcggtcctctaagatgtattgtgattgacgactgttcaaagttgtggccattattttattgtaacctcacaaccatcctgtgagacaggcaagggaggtatcctccccatgatgcagatgaggaaactgagatttgaagtgaggtgagttggccaagagctcaaagctaatgtgaggcagagctgggatataaagccaggctttctgatttcacaccacttctcctgtagaacttagtccattctgccaagcatttacacttctgtctgccagttcctctgtcagcccttgacgaagggcactgtcactcacacccttctggtccctcttagcagtgccccgcatgcaagcattcggcctgcgtctattgaacagagctgctgatagtctctttctctattctacaagtgacctgtgaataagattacatgtcctgggggttattgtttattgggtagactttccattttgcaagattaaaaaagttctggaggccaggcacggtggctcatgcctataatcccagcactttgggaggcagaggcaggtggatcgactgagctcatgagttgcagaccagcctgggcaacatggcaaaaccctgtctctatcaaaaatacaaaaaaattagccgggcatggtggcacacacctgtggtctcagctactcaggaggctgaggtgggaggatcacttaagccaaggaagtcaaggctgcagtgagctgagatcacgccactgcactccagcctgggtgacagagtgagaccccatctcagaaaaaaaaaaatattctgaagatggatagtgcatatggatggtgatggcggttgcacaacaaggtaaatgtgcttaatactactgaactttacacttaaaaatcgtcaaaatgataaattttatgttatgtgtattttaccttgatttaaataaagactacaggtactggataaaccatttcttttcactattgatatagttggtccaaaaaatatagtaattaccaaccacagctgccatttagctcatcagctacaaatattttgtgttcttctcgtgctaacatagttgtggacataaagctggtggggatatgacccctgtaccttttagttagggagaccaggctaatacaaaggatcatgcaagagttaacaatatgagataaaatgtttaaggtagtaaatttaggtgttaaataagtggtataaataagaaatgcttggacatttaaaataccaaatcaacttggcatttattcagcatctagaataatgtaggaattttacaaaattttaaaagggcaaagcatataatttcctttgttttgaattttcaagtggtttccatttagattcaactttagaaatccccagttcctaggatgtgaagcagttgatggctagaatttggcctgactgggccctggaagctcctgaggtgtttgttcatcagatcatcacctaatttttgttcctgggttccttttctttatttcctggaagtagttgatcaggwcgctaacaaatattcacttcatggcctctcttccgtaggataaagggaagtggaggctggacactcactcggcgaatagaagacctgtgggaacttcatccgtcctttgacatcgtggtcaactgttcaggccttggaagcagasagcttgcaggagactcaaagattttccctgtaaggggccaagtcctccaagttcaggctccctgggtggagcattttatccgagatggcagtgggctgacatatatttatcctggtacatccyatgtaaccctaggtggaactaggcaaaaaggggactggaatctgtccccggatgcagaaaatagcagagagattckttcccgatgctgtgctctggagccctccctccacrgagcctgcaacatcagggagaaggtgggcttgaggccctacaggccaggcgtgcgactgcagacagagctccttgcgcragatggacagaggctgcctgtagtccaccactatggccatgggagtgggggcatctcagtgcactggggcactgctctggaggccgccaggctggtgagcgagtgtgtccatgccctcaggacccccattcccaagtcaaacctgtagatgacataaaatgacagcaaagagactgagagactgttgatcaaagcacagaacaggttcaaataacttttccactgcatgaaagtttaattagacatttctttgttttcaacattagaagtggtgtaacatgtaagctgagcayggtggcatgcctatagtcccagctacttgagaggctgaggcaggaggatygttgagcccaggagtttgagtgcaatctgggtaacattttttagaggtgccagttcccacctctaaaaaaaacaccaacaacaaaagaaatgatgcaacatgtaggcttacttaggaagtccagcattaatggcatagggcataaagctctattttttgttaaaaatacttcttatagagtaaaatttatttagaactgatgtccaaggacctatgcagatttatatgaatgttggaagctatagagattttgatatcatttggcttataaatccacaggaggagataatgtatggaaaacatttaaatcactgtcaattgcagagctgcctgtgatcttcttaggttatagccaagtcagcaacataattcctctaaataaaattacattgtgctcacacagtgctggattattacatttaattgaagacaaagcatgcttgctcctagtactagcagcaagcttttcctcccctcagctggtaatgatggtaggagacagagatgaagttgcctatgtatgtcatatcaattcaatagctgcctggggtcaaacacctaggggttgtacattccattactgtaaatgattgagagctggtttgtggtatggttggctttgcctaagcatttttgaagatgaacagcatgtgcagccaaagaactaatttgctaattaaggtggaacaatcattctgaatgaaatataatcagagtactccgcagtttgttaagaagtactggggaggaggggaatgtgtctcacaataaaatgagttggaattgttgagctaaatgaatttaacctgttttttgactcaggcctactcagagcctctaatgtgtgcacgtgtattgtgaatcctctagagagcttgggtggacggaaaatgaagtgctggtattgaagtaaagaggcttgaggaggctgggcacggtggctcacgcctgcaatcccagtactttggtgcaatcccagcactttgggaggctgaggtaggtggatcacttgagttcaggagttcaagacaagcctggccaacatggtgaaagctcgtctctataaaaatacaaaaattagctgggcatgatggtgggtgcctgtaatctcagctactcgggaagctacttgaacccgggagacggaggttgcagtgagctgagatcgcaccattacactccagcctgggtgacagagcaagactccgtctcaaaaaaaaaaaaaaaaggcttgaggagaaatggatttaattttaatatttggggaagacgacttctgttaaatgatacagtaagttatattttggacatcctgagtgagatacagggttgccaatgaaagtgtgggaaagagaaagctcttagcacagctacagctttactgttgcgttcattcagaacttgcatatgattttgtttgcagagaacattctgctggtagacagtgagagaagcccaccagtgttttatgcagtcataatcattccttgcagtattaacattctcaagtaaaatcaagtgtgggctcttttctatagatttccaccagggggtggtgttgtatcagattcagatacattggtacattcaaaaatttagaaatgactagaaatgaaagatggataccaggtatatagagtgtgcgtgcttcttttgaggttttggagtttatatactccaagtgcaactcttctgaattctgttttaagtatttgagaaatgtataagtttagacagactggaaacacatatgcatcatacataatctgtgagaaataaaaggttatgataaaacagcattttttaaaggaggaaataattttttaatagttaaaaataaaaatgaaggccactgttcagaataggtagaatttcagtcatttcgaagcagctttaagtgtactcctttgttcactatgcctgtggttcagatcctgtggcatttttattgtgtgttgtgggctcaccttctatgacctttgcctatttgttactctagttcagcttcactctgcgttttatatttctaaagtgcaatgctacaagagtgcaagactggaggcttcttgagaaagtggttgtggctgcatgccctgatttcattttcactaattgctaaatattgttcccagtgtctctgaaacattattcattttggtcagtagctgccaacctgggctgcaacttagaatcacctgggaagtttttaaacaatgttgatgcccaggcctgctttatgaaattagaatctttggtgggtggggcggagctgctgcatcagtgtttacttaaagctgtccacaaagttctgagagccagggctgagaaccactgagcactacttccctcccctccttctaggcccccactgctagcgtcaccattatccttcccttccttcctcgccatcttggggcatcgagctcagagggatgtgctcacttaggcaagtgtgtccttaggcacttctgggcaaggtggcctagaggaattagctgtcccaaaatagctctctagaaatactggaatcaccttgctggctatcagtcagctgctccaagacagctatctgtctttatctgaaagacaacagactgaatgtacaaatggacaatggctagaccacatataaaaatagaactctggcccacaagctgcagcaacctgcccaggaaaccaattcccttatctacaataaacaacacaggaagccagcctgctacacaagtatatcagacttgcaggaagccatattgccatctctagaaataatccagaaagataaacaataacttctgtaacaattcacacaaaatggccaggacttgattaataattgacagcatccctaatttttgcccccacctctaacttagaacaaatcagagaaaaaaaatatgcttgcccccacttctaacttaggaccaaccatataggatgctttgcttctagttaacttgcctacagtgtccccatgcctatcaggacatatgtgaagtcttctcttttttctgttgtgaagctttctcacccctctgcctacctttgaatctctgccaaatgtaagtgtgatgggctgactcccttgctatagtaaaatctaaagaaatagcctttgcatttctcatttgactggtatattagtcagggttctccagataaacagaaccagtgggacatatgtagacatatagaaagaaatttcttatgagtgttggctcacacaattatggaggctgagaaatcccatgatctgctgtctgtaagctggaggcccaggagagctgatgcagttctagtccaagcctgaatgcccgaaacccagaggagccagtggagtaagtctgaaggccacagtgctgaaatccagggacaggagaagacagatgtcctagctcaagcagagagcaaatttgtccttcctcacctttttcttctattcaggccttcaacagattggatgatgtccactcacattggtgaagataatcttctttacttagcttactgattcaaatgcttatctctcccaaagatatcctcatatatacacccagaaataatgtgttgccagctagctaggcacccttagctcagtccatttgacacataaaattaaccatcacagcttatcttcatttacttcaaagatttcaatgtttatataagttgaggtcttcctgggtaatcggtgctactgcctgagaatagactgctttattttttctttcttgttttctatttcagaacatcttttatttttttctgaacatgaagaacaactgatttccttcttaaatctctgctttcaagtgtctggcctttgtggctgagtgtctgcctgctgtgtctgtgacccagaggaacgaggctgctttgagccctgtcattgccagcgtgtgcttcttcagcaggcaaaggttatgcacaaagttttaggattttttttttaacttttgggattttatttgcttaggaagaaaaaaaaaagtttaacagaaaggccatagcccaggtggacacagttgtatagaagaaaggctatttttaaaaatgacatatattcttccttttattgaataatgcattcaaatcaactgatatttgaaccggtttttctcaatcaattaaaagcttttagaaaaaaggaagaaaaggatggtggaacatgtgtccactgggagttgtagttcttagaaacctgttccaggactttcgtaacttgtcaaatatttgaaataaatgtagcattttttttatttctctcgtttttcttcttaagggtgtgaatgatggagacacatttgaaacctgcttcctcaggatatcattcactcaagaaaagccaattgagatctttaagtggtccctttcttcttgaaaaatctcagcagtttgccacaaggcctgggggttttattattctaagtaactttgctgccaataaatcacagccctaagtagccaaagggaatgcattagccagatctcttataaatataaccaatgcttcttcaattattagcagaacaattgacttccatctactcaaggcacctgtcaacctggcctgcagccatgattcccacaattccacctcccagagcctgttccccttgaattataattttttttatactggtgcacattctatggtatgagcccaggacccaatttttcatgtatcccggtatttctcttccttgcagatccaagtcgtctgtcaatggaactcaaccagtgtggttgaaactccacatggtctttttgctctgcccaggactcctttcctgggaaatctgctcagacctggaagattcactgtgtgggcagtatccctcaggccctacctctctggttacagcttattggagcagaggaaactgtcaggtttaggccccattgcaggtaacagaaaccccctaaatatttgcttaaacaaggtggtcatgtatttcactcacataaaagaagcctagatacaggcagtttagggctgttgtgaggtctccaatggtcatcagtgatccaggctccttccagctcatactatgctatttcaagggtgtggcccttgtgctcacatccaagatggcagtcagagctccagcacatcattatatccactctccaaggacagttcccagaaggttcacgtaacacctttgcttgtatttcacttcataggatttagcctcagggttacactgagattcaagggaagccgggaatgtagtcttttgtcttggtggcaatgtaaaagtcaaggttttagtaggctctgcaaaagtatcaaactataaattgagttaggtcagtgtttgggctctgaaactgaaaccccagaatatggcacattgacatgctgaactgaagaagtctcaaggtctgtctgaccttctctaccccaatcctgtctctcccaaagtacaggatgcagctgttctctgaagttccattatctgcctgaagtccaaaccaccaaagaaaaaaatcagttacctctggtaccttccctgagttttcatgaactgaactcatatgacaggaagaaagactgaagtctgtcaacacacctggacagacttctgtcccaaaccattgtctgctaagcagacccaaccaactttgtcccaggccattatatgttctttaaacccactgaattcccctaaaaatcatttacaactcccctaaaatcatccacacttccccatcttcctttcccctaagaagaagggtatagaaccatctgtaccccattggatcatggggactcactctaattcacccttgtgcatgttaagaaatttgtatgccttttctcctattaatctgcctttgatcagttgattttcagtgaacttttagagggtgaagaggaaaatttcccttggcccctacactagtcagattaagactttgtactaagaatttcctgttgatggtaggctctggagacatgtagactggggcttggcaatccaggttgtttaggtttacacagtggaagccaggcaagagagaagaagaggagaaaaggcagagatggaagcaccagggcccacgtactgctggggaagcaacgagaatgaccttggttctgatccagccctatttcttatcttctgtctcactgaacagtcgattctatattcctcagaaaccccacatttaaaaaaaatgcttttaaaacaattattgttttaagaaagtaaaaaaaagtgggagctgaagaatttcaggttcccaacaaagtagttgctttttctgtaataatttcaataataagaatgcttttgatagctgtagagtaaaatctaaacatcacagatcaaatccagcatttagcaacttttgcttaaaaata

SEQ ID NO: 96002 - DNA, 59726 bp, Homo sapiens
  misc_feature (1)...(59726): n = A,T,C or G
cagagaacccaaaacctgtattttcagggggaaatccatgctcagcaagacatgtgcctggctggttaataacctacaccagctaaaagacaagaattcccaggtcacagctaatttagaggcaacttccagcaggatttactgccaagcctcatggggatgtcacctgggatgaagaagttccttactggagggactctgcatccttaacatagagcgaaggagatagaagacagctttgcaagctcacaggggaagggatgcagaccccaggagcaaaagtgaaggccataggaaacatcccacagccgcctcactctccgttcctgcaggtctgctgagggggccccatcatgaagcttccactgaccttatcaatcacacagatgtacagctcctgaatgtctgacacrtaaacgacagccttggccagggccgggaagatgaggcacaagtcataggtcatgatgctggtcgagycagggagcaaagggtatacctgcaaggttcggggctggggtagaggggtgggtggtggattacgtggctgcagagccccccctctgctcaggtccgtgagcaatgcctcaccctcagcaccagcctatcacctcactggcagagccctccaggccagcactagaaagcagtggacaagggaaatcctaccccaaatagtgccctgcccacctctcatcacaagccccactgctggccaggagcagggattgggatataacatgtcagtgctcagctagatctcaccgaacattgatctccaatttgcacattttacaaagggaagaaaatggaagctgatcaaagaggggcagtcagcaaccttgggatgtgcaggaacttggggacagagtgagaatgcagtcccaggatgccacgtcctgagctggccacctgccgctgcagccctggcggtagagaagcaccccgtgaggtcttctgtgaaactgcaagacagggactggcagaaaacgagacagctacttttcagcggcagctctccctgagaagtcccaatcagaacggactgaatcacagaacctgggagcagcctgcaaggccaccccagtgtgagctccgtgcatctcgctcaactctgtgtctgatcaacagccccagctctgtgtgaagcactgactgctaaggtgtgagtgaatgaacaaaccagagctagagttttccagccttttcactgccaaagacccttttaacatttatttattatttttttaagagacagggtcttgctctgtctctgaggctggagtgcagtggtaggaccatagctcactgcagcctcaaactcctggactcaagccatcctcccaactcagcctccagagcagcagctgggatgacaggtgtatgccactgtggctagaatagatccttgtttttatttttttatttcatttttttagagacaggatctagctccatcactcaggctggagtgcagtgggatcatcacagcacactgcaacctcgaactcctgggctcaaggcaagagccccattattttttattttttattttttttggagatgcagtcttgctctttcacccaggctggagtccagtggcacgatctcggctcactgcaactgctgcctcccgggttcaagcaattctcctgccccagcctcccgagtagctgggaccacgcccagttaattttttgtattttagtagaaacagggtttcaccgtgttgcccaggctggtcttgaactactgagctcgggcaatccacccactctggcctaagagccctcactttaatccttttctgtttacacactttgttttttgagacggagtctcctctgtcgcccaggctggagcgcagtggcgcgatctcagatcactgcaacctccatctcccaggttcaagcaattctcctgcctcagcctcctgagtagctgggactacaggtgtgtgccaccatgcccggctgatttttttttgtatttttagcagagatgggctttcactgtgttagccaggatggtctcaatctcctgacctcctgatccacccacctcagcctcccaaagtgctgggattacagacacaagccactgcgcctggccatttatccacttttagggattctgccttcaggagtttctcccctaaaaaagtgcattcacaatcaccctctcatgctgcacaggataggcattcacacacgtgacatgtctatttatgatggactgcatgaagcttgccttattgcttaggcgtgtatttcatccaggtggttttggagctgggcaggcaggaacaggttatggagctagtgggtgagtccagccggctgcccctctcctctawctgggtctggctttgttgctggctatttgtggtctcatattcatggggtgagtagcaggggtttttaaagtaagcacttcagggtttgcaaagctagagtttcaatatcaagaacctacacacacacaaaattaggtctctgacccaaaagagaaaaccaaataggaccacatctcacccaggtgaaaacccttcaacagctgtccagtgctctgagaatgagcccaaagccttagaatgccctgtaaagcctggtgtggcctggcccctgcctccgctccagtttccatgcacatcacactcccccaccatgcttatgctccagccatgcaggcattctctcccactcacacagtcagatacctgctgcctgcctgcctctggggctcgcagcccccttaaagacctggggctctttcccggcctccatctgctggctccaagtcatctttcaggcccaggtccagtgttcttcctcagaacagtcttccctcatccaggtcagctcttccagtgcccctgctcccctctcccgggggctggacctgctgtgtgccatcagtgttgatggggcctgcagtgcacttggccttcctctccaggctgtcctcagcactcatataccctcaggactcagcccagcatctggcccagcctggcccccccatgcacgtcttgactggatgagctccagggctgctgctctgagtaattctggacaaggtcatggaacctggtgctccagcctgcttggctttagagagtaaaaccagctttgttaagccttggaaattctgaaaatcacctgcaaacctcacctatttggcaagtgctgattctagtccaacctcttcaatatacagatgaggaaacaggcccagatgacaggataggggtgtggctttgaaaaggcagagctggggatagaaccagataccctacatcccagcttgggctccttcctgactctccacttcccaggggaaccgagctagatgcctcctggagctggaagagaactgtggggaggggaggagggagaatggccaaaggcaaaggccacgctgagaaaggcccaagcccataactggctggggacacaggagatcaacaagctgacctgagctgcacataccacctactcaaggtacattaatacagacgcagcatgcctgagttattccatacaatgacttacagtagataaataaagatcccaaagtggacatcatgcttatactccaaaacagtagctatgtgacttgagccatcaccacttgagcctggtgtcaaatacgggctgagaaatggggtccaagagccccagttctggttttgctggggctgattcaccctagcttattacaattcccccaaagaaaacccattgaaagattagggagagtaatgagagctttctttgagaacccaattcgagactctgatttcaaactcctgcaaaagctactgctgtcaggagtgggtaggtccttcacaatgtgaagaaattccatggtgcacccactgaggagccctacacagggtaacacagggaagggcttttgctctttttcttttctttcagaaccattttgcacattttaaagacacattaaaatggcagtggggaaatcaattgctcttccacttgacttcccaggggataggcatccagccaccatctctggagcccgcaaagcctggcctgccccttgggctggtgcacagtggttcactgcacctcatggtgatgctttaaggaagtcctcaccaggcaagtctagaggcttggggaactgagggcacttggtcactagctggtggcagagtgggaacctgcacccactcctaactctacactgcatatgcggctcataccacctggcctctccatgtgttctggacccacctgcttcctgattcacacacgggagaacatttgcgaggggaaggaagtggtggtgacctatgcccagaatgaattctaatttctgagtgttaaaggtgccacctgagaacatcgggaaacactgagccaaggggaaagtcctgtcatcgagtaggagatgacaaatgcagcgtgctcattaagatgctgtgagtgcagccagaggcagctctgtgcatgtgggggctgcaactgtcacatggcctggagcttgccaggccccaagactctgcccacatcatctcagcccccacttcctggggccctgatcgcatttcagacttgtgccctgacaggtggcaactgcaggggagaagggaccctgtggatatttctgaatgtcactggacccatcaatgtctgtttccttcaggctgcccatgtcaatgacccatcaatgttgtgtgatgggccaggctgtgccatgcaagagtgtcatggtctgtgcccctgattactccccctcacggctcaaagaggaggacccaagctaatgtgaaaatcacaggcactgtgattgggtgctagatgaaacttcacgcagggacccggccagccctgcgacctccctgagggcgacggctggggacatgggtcatgtccacagattagtctcagggaaaaggaggatgcacctgacttcaaggcccgtagcttccacacactcccccctcatcctggacatgtgtcctcacctgaacaatggccccatgactggttgtgcctcatgggacccaggagatggagagacgcagccacacctcataggagcagggcggccagcctcattctctgccaaatccgcagcgcccagcacagtatctggcacatgacaggcactccagcatcgctgagtgcacaggttaacaaaaagcataaagtacctactaggctccttcccctgctctggttattgcatgggttccgcctagaggacttaactgaaatgtaaagaattgttgagaagaaggaaactccaggtttttgtttttggttttgttttttttttttgagacggagtctcgctctgttgcccaggctggagtgcagtggcgccatctcggctcactgcaagctccgcctcccaggttcacgccattctcctgcctcagcctcccaagtagctgggactacaggcacccgccaccatgaccggctaactcagtcactgcaggcaagttcagctccgaggtcttccactcatccaccgaaatggacagaggattcctcttctcgcggtttcagagtccctttgttaggggcggctctggaattctatgtagaagggaactgacgggtagcaacctaggaaactcattaaagctgcattgcaatagcaaacgcaatatatttatttagcttgtgtgatctaaacttttaaacatatcaatctttccaattcacacttcccataaaaattgaagaacgtatattttaaggtggtttaaaggggctgttggggattattaggagtaaaaggcattgcacagaggccatctcagagcgccatcgccaagattgggtggtctccggacgcaggcacaacctggagataaagaggctcgcgcttggtacccgcccctttgcgaagggcaggtgacacctaggctgcgggcgggcgggggacccaatttcgcatgcgcggggcggtgctggggggcggggcgagcggctgcctcgcggattcgcgcgggtggtgagagtggccagcgagggcagcgttcgccgcccctcaggccccgtcccggcgccgcagccgcctgcgtttcggtttgtgagcaggcccggccgggccaggagcgagagcgagactctggagcggtcgccgccgcagtcgcccgggccgggaaaggcgggcgatgcccccaaccgccgctcgggccatgtccgaggggcgcgcgtgttgtcgccgccggggcgccgtgcccgcctgtcgtcccccgggcccagccgctcgtccgaggcccgcgaggagctgcgccgccacctcgtgggcctcatcgagcgcagccgggtggtgatcttcagcaagagctactgtccccatagtactcgggtaggcgcggccctcgccggttccaccgcgcgcgaccgggcccgccacgcggacgccacccggggcagggcgggtccgggccggggcgcccgcgggtccckggctgcggcggtgaggtcagccgtccgtcctctcctctccccggtcgtcccctgaggtgggcttgtgatagtttatcaaaacagaaactctcctaattgcgtgacctcgacccgggttaggaccctgtgcagagcctcagttcccccgtttgtgaaacgaaggtacgggaaggttgttaggacgactgaggtaatttcagcttcatgcacactgccttaacttttcggggcggactaggaatccggcattatttctaaggacaaatgtattctgtgtttaagaatacttcacttagaaacgagcctttgggtgataacctacgtgtaaggtacagactttcaacgtttaggaatttacttcattttacagaaagttgaaaaatgatacgtggaagacagtatgcaaaagcataaactattgggttgagttcatgaaattataggctgtgtttttcaaatatatttgaagtttacattgatgtgtatagtttcttaaaacatatattatgcatatatatttttaagaataataaagtgacactagtactgtagaagcttccttggctgtctyctccctccctcagggttaaccactatgcaaaatttcctttttttttttttacatttttaccaaatatatatattattcatcaatatttggttccttttggcctgttttgggacttgatataaatagaaccatacatacataggtattcttctgcagttttcttcctcaacagttatgtttcagagattcatgcatgttagtatctgtagctggggttcattaattttcgttgctgactattccctgggatgaatcgtaccggagtttatcattctgctgtttttggtattttggtcttaaaaaacagtacagctatatgtttattcttgcacgtaactcccagcgcatttataaaagacttaactctagaataggtatcttgaagctgagttgctgggtcataaaggatgcatgatttctaccttagcaaggtaatgcccaactgagtttccaagtagtgataccaatttactctsctcctagtttggaacaattcatcttgctctacatccttgctaacagttgatatttttaatttttgccattctggcagttttgaaatggcattccattatggtttgattttgcatttcccaaatgaagtccagtgtgttcatgcatcatttgagcttcctcttctgtgaaattatatagcgtgtttttcatttttttcaggccttttgcctattttcctatgcagtggtttttagttgtttgtactgacttattctttatatatttaggatgcttattctttggttatgtatacagtaagtgctcactcaacattgttgataggttcttggaaaccaaccttaagccaaatggcatgtaacaaaaccagttttattgtaggctaatcgatagaaataagagttaagttcctatggcatatttctgaccacaaaaagaaatcaccagacttttaaataaagacccaaaacatgtctaatattaaacattgaaataaacgtgagctatacatacatttaagagagattagtgagaacaaggaagaaaattatttacccaatttctggtgagtcaggagaggttgggttctaatggtggtgggtgaaataaaaaaatgtttgcaaagcagaattttaaggagcacctcgtgccactgggcagttcaaaaacaaaatcagagtccctttgttaggggcggagggtgcactgcattcgttattgtttgcatctatatgattattgtctacttgatgaagttttatttggcaataatttatatttgcttattcattccttttccaacccacttactccatttcagggttgcaagtggccagagcctatcttgacagctcagggtgttaggcgggatccaaacctggctgggacaccatcccattgcaggtgcacttgcacacacacccacactctctgtgactgggaaaatgtagatacaccaattagcctaacatggacatctttgggatgtgggaggaaaccggagtacctggagaaaacatgaagagaaggtgcaaactccacttgacagtggctctggctggaaatagttttttaaatcactgttgtaatgaaataatgttatttgaggacctgctgctgtagaaaatcggtcagatttagcttcctttttcactctttttatgggattgatatggtttggatctgtgtccccacccaaatactgaaatgtaatccctaatgctggaggtgaggcctggtgggagatgaatggatcatgggggtggatttctcatgaatggtttagtatcatgccattggtactgtcctcatgatagtgaattctcatgagatctggtcatttaaaagtgtgtagcatctccccaccccactgtcttgctcctgccctggccatgtgaagtgctggctccccctttgccttttgccatcattgtaagtttcctgaggcctcccagaagccagggagatgccagtatcatgcttcctgtagagtctacagaaccgtgagccaattaaacctcttttctttatatattacccagtctcatatttctttatagcaatgggagaacagactaatacaaggatctattcattaactgaagtttgtaartttaatgtatttgcttctatcgttcttttccttttatggcttgcttttggtgtcttwtttaagaaatctgtttctattcagagatcataaagatattctcctgttttagctcctgaaaattgaatagtatgcttttcatacctacattcttgacgtctacttgggattgatattagtaataggagtggggattcagtttgttttcttctttgtgacttctcaggtgttcctgtttccttttttggagaccccatcctttccacactagttcgtatgctcactcatcattgatcaggttctcatgtatgtgttggactatttctggggtctgttttctatctatatttcttaagagttgtcctttgtagtttgcataaacaccaagagatcagaactgtctgtctactgctgtattactggggcctagacaatagtgtcaggcacataatgtagggtgaattatcttaaataatgttagtcaaatctttcctgatacagaaaaatcttaggacaaatgatcctctattctgtatgtgttaacattttcagtaatgtggccaccattttgagtcccatgacatatttggacaactctgattattggaatttttttaagtgaagcaaaatctgcctctctgaaatatttattcattcttggaggtgagcrttgctccagtgggcagaattaagaaccttgcttctgcttggaaggcagatcttcccgtactttcgccaagtgtttttcttgcttgactgagtagcctgctttcttacatgtccgtctttacatgtggccgctcactaacttggttgtacagttttctttttgcccatgaacctcttaaatgtatcccccaaaattagacaccatattccacatatgttcttatccttgcagagtcaaggagagagatttgtttcttcattgggctgctaatggcattcaataagtgttattgggtgcttagtgttgcagagacacagaaatgaataagccttggtcttgcctcccatacgctcatagtctaattgagctgtaatcaaccagcttgtttgtgtagaaagaagtgcgtaagaaaaacaagagttgtgggaataagagataaaacagtggcttctgtggaggatcagaacagtctaagaaaatgccatgtaagctggtccttgagagtctgtaggtaagaaagagcatctagttaagaaactagtatcagcaaagatagataacgataaaaggaaaatagtatggctgagcacaaagtatatgcaagggaatcaggaagattcattggaaaatggctggaagtttagtttcaaaggtgatttagggaggtcttttttttttttctgagatggggtcttgctctgttgcccaggctggagtgcagtggcttgatcttggctcactgcaacttctgcctcccagtctcaagtgatcctcccacgtaagccttccaaataggtgggactacaggtgcatgccaccacacctcagtaatttttgcattttttgtacagacagtgtttcaccatgttgcccaggctggtctcgagcacctgcactcaagtgatccacccgcctggcctcccaaagagctgggattacaggtgtgagccaccgtgcctggccaaggaggtcttaaaatgcttgctaataagtgtggacttaatgatgtggcaaagaaaagtcatctcacgcttgtgagcagcgtctgacctgtgatttgaaatctagccatcatatgaaactaggctcagtgtagaggcagctagactagttggaaagtcaatgttaaaggacagatgtaagataataacgcaaactatacagtgaataaaatgccctgacttttagaagtactttccccacattaattttaagccatgtttccccagtcctgaattcatacatttgtgaattacaaatttatatttccattggtttgcttttgcttttttaaaaatattgtgataaaattcacataacataaaacttaccatttttaactattttttagtgtagagttcagtggcactacgtacatgtacattgttgtgcaaccatcagcagcatccatccacagaactttttcatcttcccaaactgaaattctatacccattaaacacttactcccttttcctccttctcccagcccctcatgaccaccgtctgactttctgtctctatgaatatgactgctttaggtacctcatatgagttgagtcatacagtatttgtctttttgtgtccagtttatttcacttagagtaatgtcctaaacattcaaccatgttgtagcatgtgtgagaatttcctttcttttaaagactgaatcatattccactgtatgtatataacacattttgtttatccatttatctgtcaatggtcacttgcattgcttccaccttttggctattatgaataatgtttctatgaacatgggtgtacaaatatttatttgagtctctgctttcagttccttttggtacatacctagaaatggagttgcttgattatgtgatatttctatttgtaattttttgaggaactgtcattctgttttccatagtggcaacactattttacattcccactaaagtgcacaagggtctcagtttctctgcatcctcaccaacatttgttattttctttgtttttaaaaataatgcttatcctaatggatgtgaagtattattgtggttttgattcacgtttcactaaagattagtgatgatgaacaacttttcacgtgcttattattggccatttatatctcttatttgaagaaatmtatattcaagtgctttcccatttttaagttggggttttaacttttttgttcttgagttttargagttctctatataatccagatattaatcccttatcatatatgtgatttgcaaataccctattcagttccttgggtcacctctctactcagttgataatgtcctcttttctttttaagagatggcatcttgctatgttgcccaggctggagtgccgtggctattcacaggtgtgatcaaaatgcactacagccccaaactcctggactccatgatcctcctgcctcagcctcctgagtagataactgtcctttgatgaacaagagtttcaaatttttgtgaggtgctatttgtctgttgtttcttttgttgcttgtgcctttgagatcatatccrtaaaatcattgtcaaagccagtgtcgtgacacttttgccgtatrttttcttctaagagttttgtagttttagctctgacatttgggtctttgacccatttcgagttaatttccatacatggcgttaggtaagggtccagtttcattcttttgttagtggacagccagttttctcagcatcatttgttgaaaagactctcctttccccattgaatggtcttggcacccttgtaaaaaatcatttccctgtatatgtgaggctttatttctgtcctttctggtctcttccttggtccrtaagcctgtctttatgccagtacggcactgttttgattactgtatctttgtagtaagttttgttgttcttctttacaagattgttctggttattcagggtcctttgaaattccatatgaattttaggatggatttttctatttctgcaaaaaaagatcattgggattttgaaaaggattgcattaaatctgtagagtgctttgggtactactgacatatttgcaagtataaaatcttccaatccatgaacatgggatattgttatttgttgctatcttatttaattcctttcagcaacatttgtggttttcagcatccaagtcttttgctttcttggttaagtttcttcctaagtatttagttcttcttgttgctattataaatgaaattttttttctcaatttctattttggattgttcgttattggtatacagaaaatcaactgatttttgtgtgttgattttgtacaatgcaactttgctgaatttctttatttcaacagttttggtatgtgtgtgtctgtgaaatctttaggttttctacgcatgagatcatgttgtctgtgaacagagataatttaacttattttccagttaggatgccttttatttccttttcttgtggtattgctctggctaggactaatagtacttttttggagggggacagggtcttcttgctgtgtcacccaggctgttgtgaagtggtgtgatcatggctcactgcagcttcaaacttctgggcttcagcgatcctcccacctcagcctcctgagtacctgggactacaaggcatgtgccaccatgcctggctaatttgtttttttattttttgtagagatggggtcttactgagtggaaggagaggagtagcattgtgggtgtgttgcctgtgagatgcctgtgggacacgcaggtggaaaatagatactgcctatttgagttcagaaaagagatttgggccaaagttgtagatttgaaagtcataagagacagtaaaaagaaggcaarggatggcctgagattattctgggaagatgtgtagaggaaaggaaaaaatcaaaaacaaaaacaaaaaccacacgttggctagaactcctgttcctccagaacatttattgttgacatctctcattactatgttcatatttcatagctgttgaatcttttctgagagtgaaacttagctaaattttttttacaggtgaaagaactcttttcttctttgggagtcgaatgtaatgtcttggaacttgatcaagttggtaagtagaccagttacaacatagtgttgtttataataaatgccagcgagattgacttctttccatttactttgttcaattcagattactcttgtcttcrggttaaatgaggcatttttgtctacattcagccatgcagaaaatgaaccctaatgtggcagataaattggtgtagtttttttatttatacattttccatatttgagggaagggagtgggaggaagatatataagctgctccctttgaagtacttaaggcatttcagatgtatctgccagctctctagcagaacagataaagctgtaacaaatgaaaaggatccgctcccatttcctggctgtgtcatccaccagggagagtgcattaagtttttagctttatacttttgaattcttggcattcatacatctaatattagttcagcactttacacataaggagtttttcaggggtgagggcatggtgatgaacagaacaagtttgatttctgccttcatagaacctcactgactcactttaaagttgccttaatgaatgaaatgctcttgaatcttggagacttttctaaagggtttaccaataaggtagtcttaagtagtgatggaccagttttatttttagggatggaagataaatattggactatgaccataaacatttttcaaatgtaattgtaagaagtattttctgggttattgttacagcgattttatcttgattcttgctctttaaagagggctcttatctgtcttggcatagtcrctgaataatatgtcaaaatctaattttgaagggtttatctttgaaggaatcagtagatctttattttttaagattttctttgaaagcaaggatgttttcccctcttgagttatcatttcataaagttatataacacactgacctgttatgagtatgtacatgtgaacatttgagtgttgtaacactttagtttaactcacaaagatttgaaactcttttcagtgtttttatatatagtttttttcttctttagatgatggggccagggttcaagaagtgctgtcagaaatcactaatcagaaaactgtgcccaatattttcgtgaataaagtgcatgtaggtggatgtgaccaaactttccaggtaataatactattatatgttcttcaatgctgtttgttcatattttaaaaaagtatttaaaagaggagaaaatggtttttaggagtccactcatcttttggaagttataaaatgaagcatataggataattatcagataatactgattgctttaagggaaattagcttttctgccagcctgaacttcagaagctaggatttttgtgtgagggcaccaggacaaaccagtgggccaccctggagacatcccaggtcttttcctccttgtagggagagataacattaatgtttgcccagtagaaagaggtcaacactgccattcttgtctaggacaattagaattcctgttaagactgctaaccttggggtggttgccaaaggcctatggcttttgattttttgattcctagagtgctaaaaatgagcaggagttgttaggtaagcagtgatagataaaaattgtttattaaataagatccttattttataattagttatttacttttattaaaattctactctgtcatatcctttatatatgtatacaatatgagtaatcagtggttgattaaatagttgtatttgagactttaattaagaattatatttttgtggagaaaaaagattgtctmtgttgtgtgttaatctatgatcagcatccttatgcagtaacaatctgctttattagtcctagaatttataacctagttcacatagtggtaagtcctgtaaacaccttctgaagtgcttgtcttgccaatcctaacttggaaaatgatgtccaagaataaatctgtagatgcagagagagcaattctattatttcaagacagaaagatatttcttggatggcagattctgaggaggtggatttccctaagggcacctaaaagtaaggaggccatagggaccctttttagaatgtccctaaaaccttcttgggcacccattcttcatggggacacatggcatttggtgagtccacgtagttatgaagcatctgttgtgtgttacaggaagggctagtttgatcatggtatttgtctaaagccaaggtaatgggagtgagcaactgacttggcataaagaaaactgttactaaatcacacatcgaacctctaacatcatctaagctacttctgatcacaaggagggccaaatgagcaagaggatatggcccagggccagcatcatgactgttgctgaaagaaaatgggagatgttggtgttgtaaaggaagctcacctgtgtaactacaaaagttagatcgatttatgagaagccatgacaaaatttgckgataatgcataagaattgttttcaaaatgaagactagcacaagtgagctaatgaaaaatgatacttggctattccactgcacttgactataatattttgataattagaccaaggaaaatgacctcatcttacataggtacagagccacaaccttctaggttatttgacacattcctagctgtcaggtgtaagaagggacaaaaacatatgtactttrgtataagttctaactagttggaccctgtttttaaatagcatccagataaatttacaactccaacttagatgaattatagatttttcctaagatttttataaaagaaatccataccagttgaacatagggtgtacataaatagctgtaaaactttaaattctgcagtgttctttctcctgtaattaaaccataggcatatcagagtggtttgttacagaagctccttcaggaagatttgscatatgattatgatctcatcatcatcggtggtggttctggaggcctttcatgtgcgaaggtatgaatatagaaatgaaactcgtagataattttcctgatgactgccatagctatttcttctgctacttaaaaaaaaacaaactaatgttacagtttaagcttttgttgtaatagctggtataattcaggtaaaagattgtgtgtcacacaaaaacagtcttttacggaagacaaagattgagggagtgtcaggaaagtgacaagatctttatacgtaatttttgttgttgttcgtttgtaggaagctgccattytgggaaagaaagttatggtgctagactttgttgtyccgtcacctcagggcacatcctggggtaagttgtttttctctgttgttcctctctgctctttacatatgttgtttgctttatgtaatctcatttaatcctcacaacaatctcaagaggtataactcgcctgtttcttggataagaaaacaagcgagtctaggcctggcccagaggctcatgcctgaaatcccagcactttgagaggcccagaagttccagactagcccggaaatatagtgagaccttgtctctattcaaaaaaataaaaaaattttaaaaaaattaaaaaaaagaaactgagtcttagtgaggatatagttaacaagcagtgatgttggaaagataatataaacattaataaggaagattttgcaaaaagaaaaaaaaattccatgaccacagtatttcagcacttctgccgtagtatttttttgagtgtatagttgaggtcacagtgtatgtactgtgtcgtggtcacgtaagtttgccagaaacacttttctttgtttctgtgtcggtttcataattgactatattagctgmacaatagctgatggagtgagtgtatgtaataattacagtttagcttaacaaggagaccaatgaccagccctgtgactctgctgtctactgtagactagagtgctcacctttccatgttgtttttccacagtgaaaagagcacatagattttgtgctggatgttttccatttattctttaaatgcattccccctctgcctctgccctgctgtacgctccataagactgatctgttggcagccttgccctctggcttctggggcagcttggccactttggggtaaggggaagagggcagaggaagagtggagttgggattttattcccctggctccttccctgctgggtccctgcatcttcctgtggaaggccaccccctccattggatggctggctccctctgggtggtggcactcagtctccttgccccttcacatggggctgccaatggtacactgctgtcactagtttagggaactattctatccctttttgctcttcctgcttacacctttgtgataatttctctgttaatccttcagttacccaactcaagtgtgtcttctcttttctgctagaaaaaattttctggcagatttttttcacataaagtgtaaaaatcaatttttaaaattcaaacttactcagaaagttatagcctagaattttawgtacaaaagctaatctacttcgatttttctcataatgttcttgtggtgtgtgaacacttgttttctgtccctcaccctggcctctttcctctttttctcctccctttctccctttcttgtccagaaataatcctacttatctgggataccagaacacctgcagtcagagagaatctgagacctgccctgcaaaggggcactccgttttgcgtaatccattttgtgttgttcaggactcagagtaaatgtgaccaggcagcttgcagttgacaacgtggctccgaggagtcagagttatggagagtacagggctgggagctgagattctcacccttggtgtagtacatatctaattaatcttagatcattctgatctctgtggatcagactgaagtgaaagttttggatgctgtgcccagaaaacttctcacatgcacatctgtatttttactcatctttgggtctcttctgtgaacccgtagttggaaaatttgggttaatcccttgtgtcttattttggggtggggtgtcatcccccccaccattgagcttgtcatttccacatgttttaatataatatgattgcaratgtgtgaaactagacacacaaagaagcattaaaacttattttcttcctcaggtcttggtggcacttgtgtaaatgtaggttgtattcctaagaaattgatgcatcaggctgcccttttggggcaggcattatgtgactcaaggaaatttggctgggaatataatcaacaaggtgagtaatggttcataaagtatagattgagagaaaagaaaaaatgagttttttagataaagacttggtattcatatttttatagttgagttcgtaattcatttaatgaacattcattaggaagctactgtgtcagccaggcacagaggatgcaaaagggccccccrctcttgtgggcctcaccacctagagagggaattgtctcagctgcagcaattccacacccttagcagaatgtaaaagattaagtaatcgctattttcagacttctttcaagtataagaaaaatagaatagcaaaggttattgtttgaattatatctgttattataacattttttctcagtggttatatatatctttggttaatgaaaagtggaaaagaaattcatctagtaaacatgtattggctaagctctggggatacagatgtgaggaagacagagctrcctgtaagcagcatgtagtccgtgggagagagacaaggagatccattcagtgcactcaaattagccatgctgctttgagtattggctccatgtagccttgagggtggtgggggagtgtcagggaaagctcttcagacaaggtgacccttgagctgcatcttgaaggtcacagaggagtaggacctttaagactggaagcagcttgatgaacactatggagatgtgaggaaacatggtgttttggggggttaatagtggctggagtgaagagtagatgaagggagttgaagcaggagaggagcatgagccacggctgtgattctgagtcctactgtcaagctaagtagcaagcagaaaaaaactccctaaagaaaatgatgcttatttgggaagtgggcactgcagctggaatatgtgtgccatagtaaactattgtttcctacgcaaaaatgaggaggaggatatgattgtttcgaaatgattatccttggctacaaggatcaataactagggtgactcaagtctgaggctggacaggcagttgctgggcagatgtcctggaagatgtacttttatgttaggttgtgatggcctttgggcaagtttgtggtttttgtagtctttgtgatgattttgttatcaggcatagaaaccaggaaaccctttcttcatggccttccccacctctgtttgtcggagagttttttttttttttttacacaagttactccattttgattctgacaactttcacaccttttatggcactgaggaacttagaaaagagaggaaaggatagggaagtgggggcaagaaatgacagagggttgagcaaagactgaagtctggttgaagggtagttgaaggcataaaattgaccagatatggtggccagttggatgtagacacttggctgtgtatcagaatgtcttgtggactttaagaaaaattacaaaccacttgtctctttgtgcagagattttgatctggtagatgtgggcagtgtacgtgcacatttaaagcatcatagatgatcctggttctgaccgtagccaggtgattatgacagggcatccaggtcatggtaggatatggattgagggagaggaaagaatacaggaagagagactgggggggaaatggaatactgttcactgagatagaaaacacaagcagctttggtttattggcagggtggggttgagttcaggataatgggttgatgctggacacatttctccagtcaactcaatggagagccttaggtcaagctaggatcagctggttgtagataaaatgaggcctcctgacttggcagtgtaattttggggtagttttatttgctttcaagaatccttcttctggttgggcgtagtgactcacacctataatcccagcactttgggaggctgaggtagaaggattgttcaagcccaggagattgagaccagcctgggcaacatagtgagactctgtctctacaaaaaatagaaaaattactctacaaaaaatagaaaaattaggcaggcatggtggcatgcacctgtagtcctagctactcgggaggctgaggtaagaggatagcttgagtccaaggaggtcaaggctgcagtgagctctgattgcgccactgcactccagcctgtgcaacagaatgagatcttgtctcggaaaaagaaaaaaatctttcttttccctaaacccttcatcttacttggacactgtacttcaggtgccttgggaacatcctggtagagtttgctgtatgaggaaggtttgttcctgaaagagagctgggcgagagctgggtgtgagaggcacagcacatgggggactggggagaatgaaaagcatagaaaacagagacagaacactgagatattttaatacctatagtaactgggtgaggaaaaggaggaaaaccaagagagttgaatcacagaagccaggaggagtttggcttttttaagggcatgattggggccttagggaatctaaaaagagcactaactgaatcaaatgctgcagaaaggctaaatggaataggatttgaattatgcacattttgacttggcaggtacttatggaatctctttttaaaataaatatctacactgtttcaaaactaattgagtccaagaggggagaagcccctaaaacctcagtggtagggaagaggctgtaaagggtgaaccacagcactcactctgtgttggagacacagcaggcagaggtggcttgtgtggatgatatcagacctgtgtggtctgtgccagctggggacctttctgtgtgttacttctgtctgttctccattgtcttacattctcagagatagcaggatgtctgcacacattgctttgctgcactccctgcccccatggggtcaaatgacgttaattctgttctaagtgctgaatatttctaaatactttctaatttccttgaatgggtaaaatcttataattagcttcctcaaagttccccctatacaaaatactttcttttttcttttttttgagacagaggagtttcactatgttgcccaagctggagtgcagtggtgcggtctcagctcactgcgttcctccatctcccgtgttcaagcgattctcctgcctcagcctcccgagtagcttggattataggtgcacaccaccacgcctggctgatgtttatatttttagtggagacggggtttcaccatgttggccagcctggtcttgaacttccaacctcaggtgatccacccaccttggcctcccaaagtgctgggattgcagacatgagccaccgtgccyggctaaaatgctttctaagtctttggggtgctgactaagaaatacttagctagccaacacatggtgtatttaggtatagactcaataaagggccaagagaagtcatcagaatctgagcagcaaaagagaggaagtcaaagcatgccaaaatcatgttctgggagaatgttctagatacttgcattcttgatattgataaagacatataggctaggctggacgtggtggctcacgcctgtaatsccagtcctttgggagaccgaggcgggcggatcacgaggtcaggagatcaagaccattctggctaacmcaatgaaaccctgtctctactaaaaatacaaaaaattagccaggcatggtggcatgcgcctgtagtcccagctactcgggaggttgaggcaagagaatcgcttgaacccaggaggcggaggttgcagtgagccgagatcatgccactgctctccagcctgggcgacagtgagactccatctcaaaaaaaaaaaaaaaaaaaaaaaaaaaaagagagagaaatataggttaaaataagtttataatgtatagataatttccagattagaaactgaatgagctttcaagtgaaagtttaaaaagaaaggggaaaatatacaaagagaaggtagtaaagaaaaaatagaaagggaagcaacatgaaactacaagttaaaacaaacaaaaatagcaacagaaaataagataccttacataagagtagtcatattacttactagrataaagctgaatgagtcagatttttgggttagtagatggcaaaattcttccatatgctatgtttaagacaaatacctaaaaccaaaagaaataattgttgaaaatatggaaattttacattttaagtaggaaattaagaatttcctatttaaaattttagatgagaaatttttaaasaggaaaatgatatagcaggaaaatgtaaataatatcagtggtagttaatatcagataggttgaatataagcaaaaaacaagcaaacagaaaaactcagaaattaatgttagctcccttcccaaatagaactgataaacaaaaccaagactgtatttgaaaatacaaataaaakaggcaaatgtttggcaaatccaattaaggaaataaggggggaaactcatacagatatgcagcatcagacattagaaaagaagtataactacagatggggagagatgccacaaattgagtataaaaattagtggtcataatgttaaatatcttgatgaaaaggaatatcttctatgaaaatataaatgaccagaattgacttgaataatcaaagaaaaaatattgtgtaagaataacccagtctccaaaaggtaccattagtgttacaggtacatttttccaaatctacaagtaacaggcacttcctgtataatttaaaccaggggtgtccaatcttttgacttccctcggccacattggaagaagaattgtcttgggccacacataaaatacactaacaatagctgatgagctaaaaaaaaaaaaaaatcacaaaagaaacctcatgttttaagaaaatttacaaatttgtgttggtccacatttgaagccatcctgggcctcctgcagcccatgggccacaggttggacaagtttgatttacactgttctggaaaagctagacttaraaaagccacctttttttggaggctgaaataaccatgatacagaaagatagtctaaaaatagaaaactatrccccatagaggtgcccaaactctagggcaagcattggcaaatcctctctggtagtgtctygaaggaacaaatgtgagtgggtagggctcgccgtggggtgcagggagggggtcagcccaggatagcacagcaggagtgcacagaatcagcatgatggccaggatttcagctctgagggcatttcacacaaatctcatacccattcctgctttagaaaacaaacagatacttcttcacatggtggagaagagtcagaagcaatacttattggagaagaacttggggtattttaattaagtcaagaatcagacattcactactgatatctgcactgtttagagctttggatcagtgcacacaaagggccgatagaaaaagtacatagattggaaaagaagtaataaaaagatattttaaatgtatgagttatgttatacatgattatatacaacatacatagaatatataaaagattaaacaagaaatattagaactaatgagttaagttgattgcttttgtgagactgtggcaggaaaattgcttgagatgaggagcttgagactagcctgggcaacatagcgagaccccttccttacaaaaataaaaaatagaaaaataagctgggcatggtggctcatgcctgtagttccagctactcgaaaggctgaggcaggagaattacttggacctgggaggtcaaggctgcagtgagccaagaccatgccatagcactccagcctgggcagcagaatgagactctgtctcttaaaatatgtttgtgtgtgtgtttgtatatatgtgtgtgtgtttatgtgtatataggtatatatacatgtgtatgtgtatatatatgtatgtgtgatgtgtgtaatataaatatatacacatactcacatgtataatggaaaattgtaacaaaaaatgaaaataacttgaaataaattcaaccaggaatgtacaggatatataaggaaagaatataaaggcataacaaaaaatttactatgcttttatagaggatgtctcaatattgtgaagacagtatctcaaaaatggtttgtaaattttatataagtccagtaagatctccatgagactttttttttctttttggagattggctgattattttaaaattcgttttgaaaaatacatatgtgaaaatagctaagcaacctttragaaagtatagagggtgacctttctcagtatttaaaaatattatactgttgcaggactaaacacatcaataaaacagtagaacargtggtttcaaagtgccagttcattgatttggcatatcaaaaactccaggaggagctttttaactgtacaggttctggggtcccactcctgattccatagtttttggcaggtcctaggatttgtataggtccacatgattcccattatgatgtgcagctgtatttgagagcctgtaatctaagatgccttttgcaacaagaacaagaaacaaaaggacacatgaactgttagttgagctgacaggattcttaggataaatagtttaagggttggaagaaaagcttttctrggggatggggaggaagtatctttaggatgtgaggatatgtgccattgtggtgacgtggtcactgctgggacaggttcgggaatcataaccaacatcacagggtgtgggaggatgaggtaatgtagtaagaagaacgactattctgggttgcaaaattttaggagactggtacattggcatcatagaaagggccgtgtgtgttgacattggctaagcttctctgtgcactgactgtcccctccagtcgactccctttcytgcatggtaacatcccatgtccctggatgagtaggggggcatttcttgacagtgatagatggggtaattttccagatgttacccttgacctcaggttgttggtttgtcttcggggatctcatccagttatgatgaaagccctggctgggctgacccctgcatcttataaacatagagctgcacagggtgaccttcaggatctggcatctgtagacaaggtgaacactatgcagtaaatcccacctagaagatacagggatgacgtggaattccaacacccgaatcctgccccaccttccaaaggaatgggtaaacactgtaatattgaaggttggcagtggtgagcgtgaaccatatttgttgtaaagacatgtaagatattcactgtcatgaaaccactgccctgtgaaccaaatgagagtggaaccatgccagtctgttgaggtgagtgtaccaagctcactgacttgaggccttcttcccatccaagagccaagtaaagtaggtcccatggagtgggaaagggttctaggaggtgccaccgaggagaggtgagcctcctgccttacgtcgtggcaggcgttgccatatgagggccagtttccccattttctcctccatggacttttccccagttttcttcttttcagaactcttgatttttccacattctttgtaatataaattaggaagagtataaactatggctggcatacaaaatatttaagttactgattgtctacttcttgatttttaaagcactgttagtatggctcatgtgtggttatatgtaatttaccattaaaggtaaaattcacctaacatcttcaccctgattatttcttcttagtgaggcacaactgggagacaatgrcaaaagcgattcagaaccacatcagctctctaaactggggctacaggttgtctctgagggaaaaggctgtggcctatgtcaattcctatggagaatttgttgaacatcataaaataaaggtagtgcttgagtttcttgtcttgttcatctcctttctttacaattgtttatacttgccttcaactaaaatttcaygttgcatgttaaggggtgtaacaggcgtgcgtgcacacacacacacacggccatgcatgtgtgtgtgtttctcccctattgtttgctaattctacatgtttggttaacttgaagaaattgtgttttaaagaactcttaattaaaaattatttgtctttgattttattgccgtcttaaaagagaacatgtttaaactaagtagttcaaagtttaaaagactaaaaagatcaaaattttattagtggaatccttcctaaaaatgaaaccttaactagaactccaatattatattattcataaaagcattgataaagtagcattagaattagtgtgttttataagtttatctttgtaatatttatatattattagattaatacatatggaaaatgagatcattttgaggaacacaaacagtttaattggaattatgacaatcagatattgtcctcatcatctagtttatttttgtactttgttagcacagtgtgagataatcttcacaagattttagattattttgtattcagctgttatctcagaaatgtgtgaggtatggtccatttaaagctgcccttcaatgcttattttcagcattttatttaaatttttttaatttaacaggaaattgggmgtataacacagtaaatatccaaatattcaattcctaggtttaacggttgttatcatttgccatataatctatattttggatgatgtgctttattcagttaaagatatatttcacccctaaaaaaatataataggataaagtcagccctttaaaaccttacatgggccaatttgaattatattatttacatgaaacacagcagaaatacatgttgtgtttctcaaattgcctggcacacatggttgaataagccccaaccaagcctgcctgttgtgtggctccttgtttagtgatgctagcacattcccagtctgcaggcgagaaactccagagtctccgtttcaccccagagcctgtacttgcttgtctgtttcagagcccttctaagcaaggctctttctccaggctctgttctccatcccactcatgatgccaacccacttgtttaaacaccttcattaatattagcatgtgaatggtttttttctttttttgttgtttcttttttgttgttgcttctttcttttttttttttttttgagacagagtcttgctctgttacccaggatggagtgcagtggcgtgatcttgattcactgcaacctccagctcccgggttcaagcaattctcccacctcagcctcccaagtagctgggattgcaggcatataccaccatgcccagctaatttttgtgtttttttaagtagagatggggtttcaccatgttggccaggctggtctcgaactcctgaccttgtgatctgccttcctcggcctcccaaagtatttgaatttttttaaaatgaaaatgtatttttgaattatttgtataattaaaaattgtgagcaacctttgttggttccccatagcctaagttgttaggatgacataagggccttcgcacttggctctagtctgtttcatgtgacttctgacacaaccctgctctccagtcttcaaacaccaactcctcctgggctcatgtgcttttgtgcgcattgttctgtcttccaggtctccgttcctctcccatcatttcatttttcttatctccacttgaaaatctctactccttctttaatacatccttgattggctttctagtccactaccctaccctcaccatggggctttgattaatatttcataaagacttctgttttctgtgcttgtgcttatcacattgcattattactttttcacatgtctgctgttgctgttgaatgagaagctccatgagggtagtaactattttgtccagggtgtctggtactctgtagtgtttgctaagtgaggtttacttctcttttttcaaggcaaccaataaaaaaggacaggagacttattatactgctgcacagtttgtcatagcaacgggtgaaaggccacggtatttaggaatccaaggagataaagaatactgtattactaggtaaggttaaatagactattttaactttaatgttaataaattgaattatattgacatgtttccagtttacttcctntcttattccacaaaagatttgaattaacaaatgaaaatatatacaatgcaagaagctaaatagttaaaagtaatgaaacagagaatataaggtcaggtaaataaggccagtggcaaaatttatgtacaaaaatatgccgtgtgtgtctcggtgattcctagaagtagcctgggagtttygttctaaacttcttacaggccaaaacaaagaagtaaatacagttagctctaggggttagtgtccttatgataaaaatgagccagctggggaggagcagcaccacttttcttaacactgagatttaatgggaatattccttagtggtcaaacaggacatgtgtgtaatgacttgcaaacttttttgagctgactcacattaagaaatacattttttgttgcagttttttgttcaggtaaacaaacacacacctcttcacatagcacatacgtacatacatctccaaaacaaacaggtttttttttttatcacatgtaatgtagtctgatattttctatactattttattttttaaaaaatcttgcttgtggtctgatttagaaaaatctgaggtatacttcttgttccacattctctccacagcagactcaattacaaatttcaaaaggctgttgcttcattcmagcactaaattataattcagtcatcacaagaccattatacactgaaacatgaataactcatttcattcttgctgcctaggtattctttttttaatttttatttttcagtgatgaccttttttctctgccttattgccctggcaaaacattagtggtgggtgcctcttatgttgccctggagtgtgcagggtttctggctggctttggcctagatgtcacagttatggtacgctcaatccttctccgtggcttcgaccaagaaatggcagaaaaagtgggttcctacatggagcagcatggtgtgaagttcctacggaaattcatacctgtgatggtaaggctgcatggcatttgcaattttttttctctaacttttcactttatctcaccttacttcatttcattacataaattagtctgtattcaaataaygttaaaacagtgtttccactcccaagtctacagagccaaccccattttccccctcgtcccctcttctgatataggaggtgtccttgctcttctcagaggctgagtcccctcatctcccactttgtttcaccttttcaaggatgttccatcttcagttagtagttttctttttccttattcttatcactgtctctcatcttgaacaattaagccttcttttaccctcactgcctttctgactgggtgcctatttttctttctcctttacaaaaaaacaaagaacaactctgcatgctgcttctaatttcttgactccatttcacgcttagctgactgtcagctgcttccatctccttcacttctttgaagctgattgtcaggcttttagcaaacttcctgtcatcaaatccagtggtcatgtctctgtccttatcttactgggcctcttggcagcatgcgctgaaactggccattcatttgaagcaccttcctttctggcttctgtggccccacagtctatagttttcccatctacagctactcaacctacagactccagcacccatttgttttcctctgggtccctcttcacttctgtgcacttgcattacctggatgatcttctctaggcccatagttttaaacattatctaaatgctaatgatyctcagatttatatctcctatttaagagtctctcctgaattccatactcatttatactactgcctactagaaattgccacttgaattcctcataagcatttcaaacttaacaagacaaaaatgaaactagattttttacctaaatattctcctgctaatctttctggcccatctcagtactcagtaaatggtacttaacacagtatattaagccagtatctaggaataccccttaatttatctttttatgctccctccaatctcaactaattcattaattcatttctacctccaaaatatatctgtgacagtccacttttctctatttctgccttatccagaaaccttatactaacacctattatatgtaccaccaccaaacacacaaatgtacacgaacataccggtgtagaccctttcgtgtatttcttttttatcatatttagataacatcattacactcttcattcttactaggttcaacagttggagaaaggttcacctggaaagctgaaagtgttggctaaatccactgaaggaacagaaacaattgaaggagtctataacacagtgagtttttattttatcattactaagttattgaacacactcctaaattaacagaaatgaaacttatgggaaaattataccaggattaacatttttttactttttttattctttgtaagagcattatcatagaagataatttggctactgacatttgagttttcagtaatgcatgaggaataccacggtaaagtatgtgtgtatgcgactgtatgtaaaatttggaagcacatatatccagatgtgtgcttacttttggaaaattagatattttatacatttcttaatttgaatatttttgcaataaatattgaatatattttataatgaaaaacaacaacaaagctatttttctttctcaaaaacaaacagtacaaaatctccaaacaatgtgaaataacccatggaatactttggaggccaacaattcttttgtaattagtttatagttttgacagaaactatacatttatgttttatrtactctttttatgtagaaattttttcagttaaaaaaatgcagcgtagagaaagaacatcaacaaagcaaaaaaacatgtaacaaaaccaaaatccaaaaatcaaccttattgagattttgattaggattggattggatatataggaaaatttggaaacacttgacttctttgcaatattcagtcttcccacccatgaacatggtatatctatccattaatttagatcttctttaatgattcccagcaaagttaatacatttctccttagagatcaagaatatctgttagatttattactagatacttatgtaatttatatgtagtcacaaatggtattttttttgaaaatgtcactatctttaagtgtttctagtgtatacaaatgctgctcatttttgtgttttgatttagtattcagtaatcttgctraactcttactgaaaaatttatccttagattgtttcagatttcctgtgtacacatttatttatttgtgaataataacagtttgtttcttcctttttactggttttctctttttttcttgtataaatgcattagttaggacctccagtacagtcctgacaagaaatggcaatagcaggcactcttgtcttatttacaatatcaaaaraaaagacgtttcactaaaaagcaatgttttctgtagggttttgttatatgctgttaatcaagttaaggagctcgttttctattttttgttacctaagtgtctttttgtttatgttgttttgtatatttaagaaggaatgtatgttcaattataacagtgtttcgtttgcagctgtggatgatgaattttttctttaatctgttaatttgttgaattgcattgattttctaatattcaaccaactttgtatcctttgtataaacccaacttggtaatgttggacttcgttatttagaatttatgcatttatatttatgaatcatattggcttgtaattttccttttacatattgaacattttaattttaggtttgagtatcaaggtattcctgctcatgaaagaattttggagtatgtttcctcatttcctgttttctggcaaagttcatgtaacattagaattggttccttgtatgtttcatagaatttactgatgcaactgtctatacctataattttctmtggagatatatttgaccactgattaatttctttaatartcaaaggacttttaagactttttattttttccttgatttacttttgattagttatatttttttccaggaattagtccatttcatctgagttttcaaatgtattggtatgaagttgtccataatatctaactgtaaattatttttgtaatgaggtataatatacatgtagtgaaatccacagatcctaggtgtacagttcagtcagttttgacagatgtccacgttcatgtaatccacactcctttaggtaacagaacatttctgtgagtccagaaagcgctctgtgctttttcccagtcatcgacccccaagcaaccactattctgattctgtcactacagactyattttgtttggyttgcctctaaatctcatataagtggaattgtacagtatgtattccttgtatctgacttcttttattcagattgatgtttttaggactcatccatgttgtgtgcatcagtagttctttttatcgtatagattttattaatgtagcagtttattcattttcctgtgggtagatacctagcctctttgcagtttggactattgtgattaaaactgctgtgaagattctttgtggaaagctttttatggagagatatatagagagagatggtttcactctgtcacccaggctggagtgcagtggtgagatcaaggctcactgcagcctccaactccttggctcaaatgatcctcccaacccagcttccctagttgctaggaccacaggcacatgccaccatgcctggctaatttttttttttttacggttggggtctcactgtgttgtccaggctgatcttgaactcctagccttaagcaagcctcctgtcttggcctctcaacatgctgggattataggcatcagccactgctcccagccaacatatattttaatttctctttgacaaatacctaggagtgaaattgcttgatcatgggatggtttttactttttaagaaactaccaaacagtttcccaatgattatgccattttgtatttccatcagctatatgtgaaggcctagttgttccagacccttaggacttttaggggcatctggctttctcattctaggcattctagtgaatgtgtagaggtatcttataactttaatttgcatctccctgatgactaatgatgtagagcaattttcatgtgtttattggccattcatktatattttctttgaagtgtttgttcaagtcttcagcccttttttattggatcgtttgaatttttattgaattgcagggcttctatatatcttgggcatattcctttttcagatatatgtattttgaatattttcttcacgtctgtgacttgcctatgtatttttcagtagtatctttgggttaacagtagttttaaatgtttatgaagttcaattttattagtattttactttatgtttcatgctttctgtgtgctctaagaaatctttgctaacccaaaggtcatggaagtatccctttgtttgcttcctgaagctttatagttttagcttttatgtttaagtccataatctaccttgaatttttttagtaaataaattaattctcattcattttaattagaattcattttaattagatttaagttgcttttggttttggagacttttgaaaagaaaactgaattaggtccatttcactgtccgttgattccttttcctgaaagttgtgtgatgctggcagatcatctcgaagctctgcaataacatctgtcttgattttccattctgcagctttgttttgaacatgttttctagttgaagatttgggtaaagaatatactgctgttcaaatcaaaaccacaatgagataccatctcacaccagttagaatggcgatcattaaaaagtcaggaaacaggtgctagagaggatgtggagaaataggaacacttttacactgttggtgggactgtaactagttcaaccattgtggaagtcagtgtggcaattcctcacggttcttgaactagaaataccatttgacccagccatcccattactgggtatatacccaaaggattataaataatgttgctataaagacacatgcacacgtatgtttattgcagcactattcacaatagcaaagacttggaaccaacccaaatgtccaacaatgatagactggattaagaaaatgtggcacatatacaccatggaatactatgcagccataaaaatgatgagttcatgtcctttgtagggacatggatgaagctggaaaccatcattctgagcaaactgttgcaaggacaaaaaaccaaacactacatgttctcactcataggtgggaattgaacaatgagaacacatggacacaggaaggggaacatcacacatcaaggcctgttgtggggtggggggaggggggagggatagcattaggagatatacctaatgttaaatgacgagttaatgggtgcagcacaccaacatggcacatgtatacatatgtaactaacctgcacattatgcacatgtaccctaaaacttaaagtatattaaaaaaaaaaaagaatatactgctgttcttgccatttccaaagtggtctttggaaaagccatgtctgtccctttattatttttggtcccaaaaggaggattcaaaattgctgtctcaactgacttggacattccattagataatgagcacacatcacgttgaaccatgccaacatatgttaattcagactcttccacatgcctattaaatattcctagtgcacctgcatctatgtcaaatccaacatacaacctggctcctaacattgcagttccaagactaagcactccacagccacatcctagatctgcagccactttattttctacctcatcacatgtgttatggattgtatagagcatacgtgcttcactgtgtagttcttttctttccgtgtggatatccagtaccatttgttgaaaagacttccctttctttattgaattgctttggaatcttcaatgaaagaccatttaacccagcactttgggaggccgaggtgggcaggtcacaaggtcaggagatcgagaccatcctggctaacacggtgaaaccccgtctctactgaaaatacaaaaaaattagccggtcatggtggcgggcgcctgtagttccagctactcaggaggctgaggcaggagaatggcgtgaacccgggaggcagagcttgcagtgagccgagatcacgccactgcactccagcctgggtgccagagcaagactccatctcaaaaaaaaaaaaaagaaagaccatttaactgtgggtctatttctgtgctcttctcatagaccgtttgtctgtcctttccccagtaccacattgttttgattactgaagctcagtggtaagtcttagatcaggtagagtgagtcctctaattttgtttagattgtttgcatttctatataacttttaaaaacagctttttaatttttagaaacaaaagtctgctgggattgtggctggaattgtcttttttccatagtcagtttggaagaactgactttttaacaatattgatttttccaacatatgaacctcatatgtttttccatttatttgtgtattccttagttcctctcagcaatgttttatcattgggctctagaggtctttcacatattttgctaaacatacttcatgtttttaaagctaacataaatggcatttttaaatggttggttggtagtgtataaaaatacagttttttttatattgaccttgtagcttcttaggattcatatctacaaataaaaacaattttgtttcttcctttccagtctgcatgcttttaatctttttttttttyttttttkgccttgtttcactggctaatacctccaatacagtgttgattagaaatggtgagaatgggcatgcctgtctggttcctggtgttaggggtgaagcattgagtcttgtatcattgccaggatgtgacctgtaagtttgctacacttgccttttatctggtgacgaaaattgtcttttcttttattccraagattttaattatgaaagagtgttttaattttgtgaaacgctttattgcatctattgagatggttgaattgttttctcctttattctgttaatatgatgaattacattgatggatttttgtatgttaaaccaaatttgcattttggggacaaactcacttgatcacgaacaattatcctttttatatattgctatgtttgacttgctaacatttcattaaagattttacatctatattcatgaggagcgttggcttgtggatttcttttcttttaatgcacttgtctgattttggtgtcagctgcttatattggcctcataaaggagttgggaagtactccctttttctctttcctgaaagagtttttgtaccattagcattatttcgtacttaagtattccatagactttcctatagaagctgtctgggtctggaattaatttatgagaaatttacaagttgagaattcagtttctttaatggtataggacatattagtttgccagggctgccatagcaaaataccgcagactgtgtggcttaaacaacatttattttctcacagttctggaagagtaccacagaccagggggcgtaaacaacagaaatgtatttctcacagttctagaggctggaagtctaagatcaaggtgttgacagggttggtttcttctgaggcctctctcctaggcttgtacatgactgtcttctccttgtgtcctcacatggtcatcctttggtctgtgttgcccatgtcctcctcttcttatagcacaccagtcatactggattaaggcacacccatatgacctattttaccttaattacctctgtaaaggctctgtctccaaatatagtcacccttggaggtacttagagataggatttcagcatatgaattttgaagggacataatttagcctgtagacttttcagacttgtgaagtttggtaagttgtgtcttttaaggaatctatttcaccttaagctgtcagctttattggcatagattgtttgtaatattccattattacccttttaatgtctgaaggatctatagtgatgttccttctttcattcccgatatggataatttgtgtttttgatttctctgcaaatgcaggttttgttagctattggtcgtgactcctgtacaaggaaaataggcttggagaagattggtgtcaaaattaatgagaagtaagtatattgggatcactgcrctgttgctgcacaaagcaacaggtttctgcagatcacctctaagaaattctcatttaattactgagatatgtcttaatttatcttataagttcagtgccagctctttataatcaatttcttcatcaatcagtaactcttacttaaaaagctcatatgccttaaaaagctcatatattaaacaatgactttaagaaataattgcagagatatatttacctaatgtctgtgacttagagcacatctttatgtccttggtcagggaaagagataaattccaaagctctaagtgagtctgtggaggcagtctatagatatccttggcatccaggaaatgcctgtggtttcaccagagatattttcttttggagctacagaaacccttgttactttaagtcattgaccttatatataattgatatcctgaggtgcgtgaattttaagaggtcttctatgtatttagtcttttggctaatagtattagtcagccagcagtgtagagtgagttgtaatatatattttttcccatttcaaaaactaataggagtggaaaaatacctgtaaatgatgtggaacagaccaatgtgccatatgtctatgctgttggtgatattttggaggataagccagagctcactcctgtcgccatacagtcaggcaagctgctagctcagagactttttggggcctctttagaaaaggtaagtttcttactgtttttgagataatgtcntgatcaagatcatgatttttaaaactaatacaagtaaaacttgtgtgcctgttttccaagtaaagggttcctcagagatataatttgcagtagacttactatttactaatggattaaaataagtatttttgagtgtccactgtgtgcaagatgttgtgctgggtgatacacaaagcactggccatggtcagccccaggggcttaccaggtaggtgggatcatgagtcaggcaggcacaggctgagcagaaggcagagtgtggttgtgtgccagagtgctgtcagcaggttgctctagggacactgaagggatgtttaattctagctgcagggaggggaaagccttcataagtggactgttgcactgtaatagcataggagctcttggcatgaatcaggattctggtcctggcttcagtgcccacttggcctgtaaacatggtcaggttgtttaacttctgaggatcttcttaatttcatcatcgacaaagccaaggatgtgaatcagatgatttctacagaggatttccacttttcatatttttaaatcaaataatttgggatgagctttataggatgagtaattcaaaattgaggaagcggaggacttttcaggtgggcagataactcggctaaggacgcagagacctgtagtgcttggctcgtgctaaggactatgagtagtgtcccaggagctttcagctggggaagtactgctcagctctgttaggagctctgtggccgtgtggtggagttggcgggagacggatgactggggaagggccctgctgcattagtgggtggggtcaggaatgctgagtataccatctcatgcaaagaaaaattgtcccaaacacaatgcaatagaasattttgcaatgtgtgtaggcagagtagttggtgatagggaagtacaattgggaaggaggctggaaaactaatttggtgccagatcatcaaaaatctttgccacaaagaagaattggtagggccttctctaggcagtagggatctgttgagacctttatttcccccaactttttatttagaaagatgtcaaaagacagaaagagtagtaaaacaatcgcccatattgaacctttcacccagattccccagttattcacatcctgctgtttttgttctgtctctccttttctgaatatgtgtatgtgtagttcatattccttttttsttttgctgagctttttgctgccactttttgaagtggcaggcatcaatgacatttttctctaactacttcagtatatatctcctaagtacaaggatgtttacctccgtaactgcagttctgttgccatatctgagaagttcaacaaaagtactataatattcaatttccccagttgttccttaagagtgtttgtgtgtgattttttttttttttttttttttgagacagagtctcgctctgccgcccaggctggagtgcagtggctcgatctctgctcactgcaagctccgcctcctgggttcatgccattctcctgcctcagcctcccaggtagctgggactacaggcgcctgccaccacgcccagataattttttgtgtttttagttgagacggggtttcactgtgttagccaggatggtctcaatctcctaacctcgtgatccgcctgcctcagcctcccaaagtgctgggattacaggcatgagccaccgtgcccggccaagagtgtgtgtgtgttttgatttgcacagtacatgtggctcttttgacgcttcagtacatgtggctcttatgacgcttaagtctcttaatctgacacagtccccctgcctttgttttttattttctatgacagtgacttttttccttttatttttagttgacacataatgattgtacatatttatgggatacagagtgatattttgatacacgtatacaatgtgtaatgatcaaatcagggtagttagcatatccattacctcaaacgtttgtcatttatttatgtgggaacattctgttatatcctcttttagctttttggaaatatgcaatgaattcttgtgaattatgttcaccctacagtgctgtaaagcactaggacttaactcctcctgtttagctgtaattttgtgtctattaaccaacctctccccatcctcccctttaccctacccttcccagcctctaataaccacaattctactttctacttctataagatcaacttttttagctcccacatatgagtgagaacatgcagtatttgtctttctgtgcccaacttatttcacttaatacaatgtcttccaggctcattcatgttgctatgaatgatcagattttattcttctttatggctgaatagtatttaattgtgtttatatactacgttttctttatccattcatgcattatggatgcttaggttgagtccattttttcctgttttgaatagtgctgcagtaaacatgggtgtgcagatatctttttgatacactgattctttcctttcgataaatattagtactgggattgctggatcatatggggttctgtttttagtattttgaagaccctccatactgtgttccatagtggctgtgttagtttccattctcactaacagtatgtaagagttcccttttttccacatcctcaccagcctttgttattttttgtctttttgataatagccattctaaccaggatatggtatcttattgtggcttcaatttgcattttcctgatgattagtgatactaagcattttttcatatacttgttgcccatgtgtatgtcttatgagaaacatctgttcagatcctttgcccatttttaaatcaaattctttttttttttttttttttttggctctgagttgtttgagttccttgtgtagggatattagcaccttctcagatggatagtttacaaatattttctcccattttacagttgtctctttactctgttgattgtttcctttgctgattgcagaagctttttagtttgataccgtctcatttgtctgttttcattttgttgcctgtgtttttgaggtcttacctataaaatctttgcctagaccaatgtccagaaggatttctcctgttttcctctagtagttttataatttggggacttatatttaagtctttaattcattttgaattgatttttccacatggtgagatatagaggtacagtttcattcttctacatatactgttttcccactaccattcactaaatatgatgtcctttctccagtgtatgttcttggttcctttgtcaaaaattagttagctgtaaatatgtggttttatttctgggttcactgttctgttccatagtctatgtgtctgttttcatattactatcatgctgttttgggtactataacttgtagtatattttgaaatcaggtagtgtaatgcctccagcttgattctttttgttcagtattactttygctatttggcttcttttgtggtttcataaaaattttaagattgttttttctactactgtgaagaatgtgattggtattttgatagagattggattgcatctgtagattgctttgagtagtgtggtcattttaacaatattaattcttccaatccatgagcatgggatatctttctacatttttgtaccttcttcagtttctttcaccagtgttttgcagttttcattgtagagtggtttcacctacttgattaaatgtattcctaaatattttattttttgtagctattataaatggaattgctttattgatttctttttcagttagtttgttattggtgtatagaaacactgctgatttttgtatgttgatttttgtatcctgcaacttcattgaatttatcagttctaagaatttttggtggaatctttaggtttttctacatatgagatcatattgtctgcaaagagggacagtttcacttcctgttttcccagtttgggtgcccattatttctttctcatcctgactgctctggctaggacttctagtactgtgttgaataagactggtgccagtgggcatccttgtcttgctccagttcttaactstgacttttttatgaatccaggttacttttcttrtagaatgtcccactttctgaatttctccagttgtttttgcatgagtgtgttcagatgaagaggtttgggcacggattctccatgaggaatgccatgttctgctttgcttcatcccccaggtacctgccaaggccttgcatggagaccttgtgggtgggtgtatttggtgcatgaagccagccactggggaggggtctctgctggcattaatggatggggaccaggaatgctaaatttgcaaggaattatctcaactgcaaataacattttggggtgtatgtcggcagagcagttgcctgatgctgtaaggagttaatcatggtgactgtggggaggagggattagaatatagagcaatatgtgtagagtataaagaaagagatgaaaggctcaagacggaaagaagcctataagaaggatagcatgagtcaagtccaggtgaaggagatgatgtaagatgtggagaaagtttttaggagaaaggggcaaagctgagccatttcctgtttatttttcttagttgatatgaaacaggaaacaaaggcatctattaagaatgaggcctcccatgtaagctatggaatctagggtcagctgccagtcaataaatggatcggcaacatgtgagtgcctcagagaagtcagaaaatacccaggcagttcacatagttatgtgattttgtcagccatgttgggaaaagaaaataaattcttggcttacccatggtttgcaggtaggcaaatatgaagtggcatgagagtgtaagaatctaggctgatggataacttacctgtgttgtatgcaaatcctctcattgatttgggggatacgtggtggtgttttggttttctttggggtaacaaagaatagaagctcactcaaactaggcaaattgagggaggttactgtaagaatcctgggattaataggtagaatcacagaggaacctaaaaaaagaactatactagggctgggcctgcctgcatttggaggtggggtcccagctgctctggggcccagcagcacagtggggggtttgtacagatgtgctcctccttggcctaacttggcgacaactctgcaggtccatttcttcccgttcctctaccacctggaaaattctctttccttctagttaattttcctataaaagaaagaattggattgactcagcccacctttttctgccattctgtagatttctggccagcttatgtgttggctcttgtgagatcagatggctgtccccagtctaatcacttgtggccattggcagggattggggaacatacagtgctgtggatggtkgtgtcttttgaaggggctgtggctgagcaggcaccttccaccttttctctgccacctacacacagctttctctccatgcacatggtttcatggttcacccaccaaagtattccagctcctctccacacagccagagaggccctctcttctcccaagttggggcctttcctaggcaggagtgccaccttgcaatgtccattcttctctgactcagtctgataaaggctctggagatggttctttcttaacccctggactatagagatgacctgtggtcayccttgtccctgcggtgtattagcacccccctccagacacactcacacatgtaccatccccctttgatggtcaagaacacttagtccagcaccgttgagctgcatatttgcckcacctctcagtggcataaggaatatgaaatggccaagaggtggtctcagcttccactgaagtagcataattcaaggttgcctggaagaagtgctccaggagcagagcccagaatcatgggcatggaaagaaaacattttggagagtgtctttaggggcagatggatggcaccacctccacctcttacttctggttcttagacctccgagtctgtgctccaggagagccggtcccatttgttggtggctagccagtgtgtggtctcttcccctgagtcaggggcccatcccagatctctgttaaggtaccttagagttttcctgaagctgttgatgttttaagaattggttacactgaactggactgatttattttctttatataaatatatgcaatatagatttttgctataaagtttcacaaaataagacaatgtaatttgtttgtctttcagtgtgattatattaatgttccgactacagtgtttactcctctggagtatggttgctgtggattatctgaagagaaagctattgaagtatataaaaaagagaatctagaagtaagattgtgttttattacttccttaaaaaattctcttttaatcaacaatttatctttgcggtcactttttatttcatcattttgcaagttactatgatggttatattgtaggaaatcatattcctattttaggaaaattaggaattaatttaaatcctgtctgtctagcaaagaagaggaatatggttgggaaagagggaagtgyaatctataagtcaggacacttgaattacaagtaacaaaaatctatttgagcaaacttgtacaaggaagctcaaagttattttaagatcttttgggactgcaggggtaggaatggctacgggtggtaaggtgggaagttccagggttgtctgcctgtgggctcttcrgatttccaaaaggacgccctctacrcacctttattgctacctcttgtttaccccccaaccctgtccarttataaccttaaaaatattttcttacatcatttcttgctgggaagtttgattggcttttttctgcctactctcccaactaggagggagagggaggataaaaagaattggagggttattaatacttgatatttcaagtaaaagagaattgaaatcacagtgctttcccttgattgtatgatttaatttattattgagaatgtatttaaatcacagcactgatattccctagttaaatggcctaaggatttaagaaactcctatttaaatttctggtgctggggaaatgtgtgattaaaactttataatgttattttagatggttatttttgaaatttacattttagagaacattattttatcagcgtttataactaactgtttatataataataagctatcctttttgcattggttggtctttatgtgggtcttggaaaattgatgatagtaattatggatttaacatttagttttaaaactttctgaaattaatgaaaaattaaggtaggaagatgtcaggcacatgacaggaaggatgtacaagcctgtatcccagacaaaagagtatctttataggaaacaagttcctcaagttttggggattactttaaggtctttccaccaaggtttgctgcagatcaactcacctgttttatttatttatttattgcattttgacaggactgaaaatgtgatctgttagtatttttttaaagttcctattatagagaaacacaaacacattgtagagctgtacaaaataatttctttctttatatccttattctataagcttttttctattaatttttttacttcttgtttataaaaaaatgaagacacaaacacacacattagcctaggcctacgcagggtcaaaaacatcaatatcaccatcttctcccaccacatcctgtcccaggggtagtaacacacatggagctgtcacctcctatgatgacaatgccttcttctggatacctcctgaaggacctgcctgaggcagttttacagttaatttataagttgaaggagtacattctaaaataatagtagaatgtatggtataataaatacatacatcagtatcatagtcatatcacatttattatctttatcaagtattatgtactgtacatgattatatatgttagactgttggagactggcagtgcagtgtcagcatcaccagcatcaccacaaacagtgagtaatgtgttacactatgatgttacaatggctataacgtcactaggtggcaggaatttttcagctccattttaatgttatgggaccacagtcacatatgctatccatcatagaccagcattgttttgcaacacatgcagtgcatgattggggatgggaggaagtgtgagtgtatttagatctgtgatccattttgagttaatgtttgtcaatgttgtgagctaagggtgcagcttcatcctttgcttgttgctttcaagttgtctttgaatagcttttacatagtaaaggaaacactggtaactgttgtagctaagagtataactgtattgggaagatggggatggaggagggcaagaaggagctagagtgagtgctaggggacagggaagagagctcatcttgctcttgcatagagccraatcaataaataaagcctaaaataggaaagtcaggcagtaacaatataagcatgttatttagaaacatagaggtaaatacccaaatgattaaataaaagaggtgaaggtggtggcctctgggttcattgaaatgggtggggtcagagatcactgttttccacagcagagctttaaaaattatgtctgtaattgtgcataagttgataaaaaacttcaagagtaatttaatgaggggagccctaattaaatatgaaatgttatcacatggctgcagtgcttacagctgtgcagcagtggcacacagatggacagcaagatcagtagaacagaatgtgaaacccagaaatggattcaaatgctcgtaagaattagtatgtgataaggtcatattttaaatccatggcaaaacacaggccatccattaaagggtgctggaataagtgggtagctattaaggaaaaatgtaaagttggaagttgaatccacacttcacatccactttgaaccagaagggtaagaaatttaaatatagtaaaatcttcaaagtgctagaaggaaaaaccacatttgacraaaccagtgaaagaatgaaaggaaatgagggtaagtgtgagtgtttacctccttccttcatagcagaagtgatagaacacatcagaaatagtagcttgctgttttaaaaatcatgtttaaaacctggtaagagaacccgggaggcagagcttgcggtgagccgagtttgtgccactgcactccagcctggagtgagactctgtctcaaaaacaaacaaacaaacaaacaaaaaacaaacctggtaagagtttgtaccatctctttttaaccttagaggtgtatttttaggaaagtgtatcctaagataaagaaatatgtctatttctagtagctgcagagattaaaatgtttgtgttaaaataggtagaagtggtgggggctggtggctcacacctgtaataccagcattttgggaggctgaggcaggtgggtcacttgagcttaggagttcgagacaagctggggcaacatggcgacaccccatctctacagaaaatacaaaaattagccaggtgtggagatgcgcacctgtagtcccagctacttggggactgaggcaggaggatcgctcgaacctgggcagtcaaggctgcagtgagctgagatctcaccactgcactctagcttgggtgacaaagtgagaccctgtctcaaaacaaacaaacaaacaaataaacaaaaaaatgggtagaagagtttatttctcttctgttaaaaacaagttaaatcaattttgtttttggctacaagtaactgtatattgtgatacctccttaataaaaatttygttttaactctacatgcaccagcaattaatgcttttccctaacawttaaaatggttatttctgggtggtatttttaaatttaaatccatccatcgtggattattgttcatactacatttccaattctgtcactcagcattaactgcctgtttgtgtatggagtgattcagaggtgcaacactgggagaacacagcaaccccaagctggagagagggcacatggcattttattctggttcttagaagactgagccagattgaagaggcatagaggtacactcaaggcattggcatgagggcctggggacagaaatgtgagagacatgatccctgctctcccatggctgggttctggagctctaaatggctggagcggttttatttcttctgcgcctcctcaagtttgctggaatgtgagccttgttatcagggtcagctttgacgtcaggatctcagtcttcaactctgcagcccacacgagagcctgtgcctagtgctctgccttgggttgctggtactctayacatgtttgaaaactgaattttgtttgtggatttttgcttggactaacagccaaacaagcaaaacaacagtcaacacacatatgcagctagcatttcaggagccttgaccctggggctcccaacagatacataaagttggggtcactgaactttgaatttccgaaagctgctatggagattattgcctttatagaattaaagagcctatcaaggaatggtttccatatacattaattctgccctttttctctcttttatcttccagatatatcatactttgttctggcctcttgaatggacagtagctggcagagagaacaacacttgttaygcaaagataatctgcaataaattcgaccatgtatgtaataccactagaagccaaaatgctgtgatttttaaatgtagcttttatttttagtatttggatttctataatttttttttttagagacgggatcttgccatgttgctcaggctggtctccaactcctggcctcaagtgatcctcctgcttcagcttcctgagcagctgggactgctgcacttttatagtctttctaaggtagctttcaggacaatgcagagcacctccacgttgtcatttagttaacatgtcacagaggctgagcagtgacagtttgtgattgagccctaccagtgtcctctcaaaatacatcactgaaagctgccttttcccagggccatcttgatagcttgatagtttaaacttgatagtttagaactagaagatctgtgaaaattttggtcatcaaataataagttgtatgtatgcattttataaacagactgaatgtgtgtcaaaagtctttagatggagatgttcacacaaagtgaaacttgacttactgagctaattcctgatgctttcactaaagcagcagcccattattggaggctttcctcctcccagttatgaggggtgagcatgaaaatggttaayagccttcctcagtagcgtagtttaaagcacagtttgtttataatttgctttataaagaattctgaatgtagaaagcagtgttaagacttggttcttctcttgaagagtttatcatctggggagaggaaacatacaaatagataaatatgaactgcaacaagtgacatctacataaaagtttactgaacagcagtcattatcttgtttaattctcacatctctgtatttatcttattctcagtataacagaaaacagggtgttgcaggctagtagcccattagcatgtgctcttttgcctgaatggtgaagtcatccagagctctagggcttagtctgttggtagttgcatatggctacagggcagtgacagggatggcggtcataatggccctgaaatgctccaggttgggcaggttcacagctgtgctcctgagggtgggtgctcatgtgctgggctatatcctgattctttgggacagagttatctgaggtcaatttttggcagttgtgggcggcctttccaaagggagyagggagagactgtacacattgttaccctctgaaagtgagagggttggggtttgatgggagagccgctgctgaaggtgggacttgcagctgtcatgctagttctgacctcctcatgagggtgtgggctgcacctctgtggctgtcagccccgtttcccatctctgagcccctctgctatgtcccacgccacccttctggctcccgcccagrtccctaggccacactcttgtccttgctctttaactatggggagcatgccccttccctttaccctggccacatgcctatttcttgagcagaaccctcgaacttacgaaatggaaatacttgactccagctctagggtcaaaattgtaaatgagactttcctcactcaggaccttcatttacaccccttttctgcttgctgagcaacccaccacctcaggttccaatgcagtagtcttctgtgggccctgggaactcactctgaagtcccagccctggcagcttctgcctgcctcccctctggagtgcccgtcagcagatgtggatgcgtgtgactgttctgagctgttgctttttccagaagcttagtgggcaagggtttctcctggccctggcctccgttgcccttttatagtctttctcttcatctattgtatgcttttactgttgaagatcacagtgaaggataatctgatgaaggaacattgacaaatggacagcctagaatgcaccgttaccgtggaaaacgactgcacatcttgcttcccatcttggtgggtcagctcattgcctgcaccccatacctctcagcacacagccctgggtgacagccctgcaccagcctctcctttgtctccacttgatgttgggagcagggcatcttgcttcctgggccagcaacctcttatttccagtaaaacctgctgccctagagttattccaatgttggactttaattcagatttgttatgttgttgttgagcattgtctcagcataatttggaaatttacatcatactaatgaactccttcatgcagtgggtaaattgcttgttctagtaaatttgagtgcaaattaactctggatgtgcatttactggctcatttaacagattcttacagtggcttagtttcatggtaatgttctctgctcactttgacattgaagttctttttctgtagtagatactgtatattttaactgtgaatttgcagtgaatggatccatattcagaccattaacctactgggattctctttgttttgtttctgtattaaaggatcgggtgataggatttcatattcttggaccaaacgccggtgaggttacccaaggatttgcagctgcaatgaaatgtgggctcacaaaacagctacttgatgacaccattggaattcaccccacatgtggggaggtaggaaacaggaggttttaaaaattggcttcagttgatgtagtttgaaaaactattataaagcacttgtcagaaagatgtcatattagtaactgatttgtatatttttaaatttattttatttcattttatttttttcagacagggtctcactctgtcatcgaggctagagtgcagtagcatgatcttgactcactgcaacctccacctcccaggtgcaagtgattctcccgcctcagcctcctgagtagctgggactacaggtgtgcaccaccatgcctggctaatttttgtatttttagtagagatggggtttcaccatgttggccagggtggtctcgaacttctgacctaaagtgatccacctgcctcagcctcccaaagtactgggattacaggcatgagccaccatgcctggccagatttgtatattttaaagaatagcataaatataatattcagaatgtgtttttttaaaacaatactaacatctaaatatgtatttgttttctttctcttgaacaggtgttcacgactttggaaatcacaaagtcgtcaggactagacatcactcagaaaggctgctgaggctaggcctgctgctgtttagttctccttgtcatattctcatttctctcaaagataagaatgctctcggataaaatgagcctgtgctcatgacagctgctctgttactcagggaccagtgcagggctgtcttacgacacttagatgagaaagtagacaaggaaagaggacagcagtgggcatctgccttgtggtcttgmtgacagcgagaagcagtgggactgcttccttgacgccttagcttggagccccrttatgaggtgagccaaggctgactctcgcaagccaggactgagcttccctcggaaagacctttgagtggcaccattcacctaagttagcttttctggtcgctattgtttttatcccctttgctttgttgtttctgtgaaaatatattttcagttaagaaatgctataaagtagtggttttctagtgcgtgggcctagaattcacacatgctcactggtgaacagtgtctgtgggctgctgtgggctgcatttggatagctgtctgcattagcaggaagctgtacacactgtgtagggttagtcatctcttttcttttttgaggcacatttaacctactgtcaaaacgctgactcatgcttcaccctcacactcactacttggtggtgataaccttgaagctattctcccctaattaatatctcgagactgagcaaaatatctcatgtaagataaaagtacttgaattgctttttcatgttcatcttaatagtattatttccaaaagtttttaatactgtattatgtgaaatctaactaatttatctgtgaaataattccatcacagtctgtttaatgatgataaagttccataaatgaatacaggtaatattaagtggttgcatgggaatttacaaacatgtcagcatttcagaggtccttcaagacagaggcccatccaaggtccttttggaaaacctctgtgttcttgagtatgccacacagtagtcaatgcaaggctcttttaggccacttgctctcatgagccacactagctgtttagcttaagattggataggctggggtcacaatttctagccatttgtcttaaaagacaaatgttaagctaacagttaggaacactgtttgtagacaggcattttgttaccctctttggaggcagggaatggagcagtgggggagtggggctgggaacccaaagaaaactgacataggacctagttatggagtggcttttttatttgggagaaaaaaatgtgtctaaaaggtgtaaagtatggtgtggtaattgctatccatgtggcagaaacagtgcagtgggaagccgagggagatgttattaatttctattggctgtggggcaggggtagggtaattgaacagagtttaataaaagtagctgtatttgagctgaattgcaggagataaaaggattagattagaagcaatatggagagggtgtgattaatgctttcaacagacttgatttaaatacttgataaaatatatttttaataattttgttactgtattgctgagtgccacacacacacagagccagcagaatcccaaatgaagcaaaaccaaaaaccctggaagccttcaactcctgctttgcactgagcatggggcaaaaaaaaacgaaatcccaggcttgcatgggtggaatttctaataggaaacctttgtataaagctggaagcccaatgggctgtactccagtgcaaagttgagtgggaagcagactgcctcatagagagaggcagcagagaagcctgtgttctcactgatgtcggtggaaagaagcaatccatcttaagcatttgtaaccactgtccaggttacagaccattggaacggctaattatctttcttttgcaaggaggggaggatgcttacatataaacctatctgtgttggcttcctttcacctttttattttcctctctgtctcttctccctcttttttcctctttttcctctcctggggtaaatatggtacctatatattgatgagagactaattttacctggaagataaaactagtatgcatcaaataacatacagatgtatatagatctgcaagaaataattgatagtgtctgttatagtggagattttaacatacttcagtaatttattaggtcagacacacaaaaaaatcagtaaagacttatttttgagtagcagaattaacaagctcaactcaaagattgtacccaatatgaaagcacactcatttcaagcatgcatggaatatttatggagtttgccttgtgctaggccataaaggctaggcttaagaaatttcaaaaggctagtgtcgtataggcattggcaagaggatttcagcggtgggactaactagaaacccaaagaccttaaactccatatagcatgatggaaagtagagggaggagttggtgtgagggaagtgaggggttagtgggagaacaagctggagagttggtagaaccaggagctgcttcacaggaagcagagagcaatagaaagttcctaggctttgaagaatgataaacttgggaatgcctggtctcatgacttactagatgtgtgataggataaattgcttaaattttcttattcatttattaagtatggacagtattacctgtctcacagacttaaagaattgaacaacatttattaagttgttaatatagcactttggatggaaaatcttggcttctgtgatgataagtagggtcccattaaggaaagctcttgtggacactcaacagtacaaccagtaggcaggcagacaggaagaagggggacaaattgctgctcttgcagactttcactgtggaagggagcctccaggttggccgccaaattggatctccaccaatgggaaatcacacctttgtataatccccgcctgttagaccagggctggtctgtgtggccagtagcatatggcaggagtgatggtatgtccctgccacgattaggtcatgaagagattgcagcttaagttttggtcaccctcatgcactctctcaggtcacttgttttgcgagaaggcagctatcatgttttgatgacgctcaggaatcctatggagaggcccatatggtgaagaactgaagtctccaaccaacagtcagcaagaaactgaggtctgccaatgtctgtgtgaacgagcttggaaatgaatgctactccagtcaagccatccctgggccagcagcttgatagtaacctcttgagagactttgaaccagaaccattcagttggttactccaaattcctgatccttagaaactgtgagagaataaatatttgcaatttaaactgctaattttcagagtaatttgctacacagcaatagataactaatacattcaccaaggaaaattaaactagtacagacctgatgagttaataaaatgtcttggggactttattcctaggacagataaaataaacctcatatagattttaaaattcaacaaaaagggattagggcacagacttagcactgaacttacttcataattgcaaacaaggaaaccccaagcagagaagttcatggggtctagtggagtgccctctgagttggtgatcctgagctgtggctgtgacaggttcctgctaaacttcaattaaagcatccttgtcaaagcttgcaccaaagattactagggaaacctgttcatcaaacaaagctgtgtttattaagcttagcaaggaagagctcagccttgacagagtcgagtctcagtatcattgcaaatgggagttaggagagagtactttgtgagactagggttagtcatagggtagttataggagagagattagtaagtgtgtcttggcagcagtgggtcagagtttgaaaactatttgctggaatggtctgttagtggtcttatttttagaattgggggtatacgagaccatattgagtttctgttactgtagtcttttcttgaaacatggatctgaatgagctagtgtaaaagattttcaacttagataatttgttgtacaacatggcttagtatggttcatctatttttgagtaatagtacacttgttaagtagttggctttattttccaatggagaaccatccagtgcttctaagcagggaataacaatgagacctgttaggattttattgcaaaagattattaaatatttattgagacttatgtttcgagccatgctggaattacagtgactatactcacttttcctccataagcaaactggaggatatatgaaatgactacacccagacatggaacaacaaactgcaggacggtgatcccagacagaagggaaacaaatgaggtgatacttaacggttgcctcaactttctgcatggaagtaattttcagctccaaacaaagggagaactcagacagcctggtgaccttcctgagttatggtggacatcagagtttagggaggttcagacagctgacagttgtaggggagatgcaggtgggagctatggagaaaagagctccagaaatctgcaaaagggtgcccttgagtctttgctgaggactaaatccttagaatggaattcagaggacacatcctatgaaaagggggacacatccttagaatgaaattctagaaggttgggcaaaaagtgacagggagttgtaagttgaataattactgtaggtctcagaaggtggagaaaagttcaagctctgaccaccacagaggattcttcaatgatccctccaggcattttgtgaagacctggtaaggggtcatgtcttagtattagggtttatctggagtgaaagctatctgtcctagataaaattgaaaaaccctaggcttgatggaaccacgatgatccaaaagtaatggcctgcaagggaaagcataacgctcttcaaaggaaaacagcaaaacattcaacaatatgacaaccataatgtccaatatttggttaaaaaaattaatgcacatgctaagaaggaggaaaatgtgacccatagccagaagaaaaatcagtgagtagaaacagacacagaagtgacagatatgatggaactaacaaggatgttaaagccactattaaaactatgttcaagtgtttgcatggaaacataaacataatgagagaaatgggagatggtaagaagaaccaaatcaaacttgctgagatgaaaaattacaatatctgtttcaggggggctcatgagccttagctagtttggtactttgctgaaagtactcataactcaacataaagttatactcatgcctatggattattatagcaaaggatcaagtgcaggaacagcagaaacaacaaaagaaaacaacagtcaaaggttagatcacacacaggcttccacgacctccatgtctctttgaaaggcatacagatgtgcttttctctccagctgtgaactgaaagatacatgtgatatatccccacccaaggaagctcactcaagtcctggagttcagagttcttcaagggggactggtcacatagctacatgagaagcatggtgtggatgccagaccaggcaccagatgcacatcatgaatcttcatgtttaccttagacactgataagctggttcatcttgacccaccactttgggcctttataataagactatcattaagcagtaactatgtgaccattccaggagtttagttttcaggacttggccaaagatccttgtcctggctacagggatacgcaagaactgagtaaaataagcctattgcattgtttcctgcccatacctcaaactaatattcactggatagaatcagcagcagactacacagtgtagaagaaaaaaatgagtgaagaaaagatagtttctacatagcagtagaaaccatccaaaatgaaggacagaaggaagagactagaaaataaaaacgctgaatcagtgagctctgaaacagtctcagatggtttaacatgtgtaattaaggtcccggaaaggggaagcaggagagcatcagaacaatattttgggaaataatggaaaaaatttttacaaatttgatgcaaactataaaactcacagatctgagccctgtaaacataacacatcatgctaaaggcctgtctacctcagtacattttacaaagcccatcatgtctggctttcaacaaaaaattacaaggtatgctaaaagacaggaaaccgtttgagacagagcaagcatcagaactagaatcagatatgatgtgttgggattatcaaattgggaatttaaaacaactaaaataaatgtgttaagggttctaactgaaaaaaagtagagaacattcaagacctgatgtgtaatataaacagagaaatggaaattctaaaaactaaaaggaaatgctggaaatcaaatccgctataactaaaatgaggatggcctttggtggctcatcagtagactgggcacagctggggaaagaagcagtgagcttgaagacaggttgaaagaaacttcccaaagtgaaatgcaaagagaaaaaagaaatgaggaaataaaaagagatcatccaagaatgaggaagaatttcaaaggctgtaacatatgtgtaattgaactaccagaagaaaaaggagaatggagcagaagaaatatttgaagtaataatgcctgagaattctacaaaattaatgacagctaccaaactagagatctaggaagcttggggaacaccaagcaggataaatatcccaacaacaaaaaactacacctaggcatgtcatattcaaactgtagaatttaaaaagaaaatctgaaaaaagccagagggaaaaatcaccttatctatggaggaataggaataaaaattatagtaggcttcttaccagaaaccatgaaagcaam

SEQ ID NO: 96003 - DNA, 34214 bp, Homo sapiens
tacttatccctctgttcttcctaaaagtcaggtagaaagcattgtgttggaggagcctcaggaaggttcaagatcacaatcactcctttctctggatgatgtccttgagggagagaagaactgatagactagcttcccccattctctgagcctgaagaacttgagactgtaggataagtagggatttatagagcaatttgtgtcaatagcagtaagcaattcatccttgttgggattcagctatttgttaatccctaaaactggtacttttacaatagaatgactccaagaggagaataccttacatcagacactgaatatttccactttacacatatttatatatttaacaaatcagcattattggaaataataaacatttatgaaaagaaattaaaatttagcaaaggattaattaaaacaatatttactccgatgttttcatcattctcagactgttgaaattgacagaattatctccctttgacgacatcagcttgctcaacaattgtttattcgtttaaccaagccctttgtacttgcagctgtctgcctagaatactcttctatcattgtatagctggctctcattgcttagttctcagctcagatacaatatccttagcttgatcaccttatctaaaagaagcaacctctcaatcattctctaaacatcttgtttcctttattgtgttcactattctaggaaactaccaggcttattagtttacttgttttattaaacaaatatatattggtgaaagtaaaaagagaggaaagtgaatggattcaagatataagtttgtgttaaatgaccaggatctgctggtaaatttggcatagtgtacgcatatgtttgggaaatggaggcagagttcaggaatcaaggaagacttgcaggtttctagcttgactaactggtagtagtttactgagcatgaaagactagggcggggtgccaactaagatttatcatttaggtatattaagtttgagatgtgagtattgagttagatagagatactaagcacacagttggaaatgtaaatctggagcttggagaaacctaggttggaaaaataagtttggcaccatcagtatatcaacataaagatggtactgaaaatcatgggaatgaagatttcacctatggaaagataactgattgagaagatagttaagaaagggaatagcatgcataattcaataccatttacataaaaatttaaactgcacaaaacaactgtacaaattttacaagaatacatctaaacaaaaggatacaaaataaacacattataatagttttctaggggtttgaaaggagaaagggtataggagaataagaagctaagtgaagctaagctatgaggactcaaagtcataagaaccatataatggactttggggactcagggggaaggatgggagggggtgaaggatgaaaaacttaaacattgggtacagtgtacactgcttaggtgatgggtgcaacaaaatctcagaaatcaccactaaaaaacttatccatgtagtcaaaagccacctgtttccccaaaactattgaaatcaaaaaagagagtaaaaatatgaatagaaaataggaatagaaatgaaatatttaaataaaataagaatggatcttatactccataacatgtcataaggtcagtgtatttactcaacactctgtacctgaggtcccactatatttttaaaaatgaattaaagaggaaagactatttaggagtgagccctgaggcccttccctatttataagtgaaaatctgtcaaagaacagtgtgaaggaataggtagtgaaacaaagtggaagtttgggagagggaaatacggagactttgatatttcaaagagcgagaaagaggtatttccaaggagaaggggtgtcaattgtgtcaatgctgctgcaaacataggaaactaattgttcattgtatttgcaccttgcaggtcactggtgaccctggaaagggcagtatgaatggagtgacatgtactgaaggcagattgtaataggatgaagaaagaatgagaagtgaagtgaagatggtgatcaaatatgtcctggaaatgaggagggagttgaagtgggatgcaaagtcagagcagcttttgtttgtttttaacatgagagctgagacagcaaagttacagtattaacttattctatgggtcaattaagagaaataaccagacaaagtaagaaaaagagtgggtagtgtctctgaggggtaatggaatccagcacattgaggaattgaagtttttctggagaatggagagagaggttggttaactttctgagttggtaattttagtgttttgcaaagtttctgtacgtgcacttagtcttaggaataaaaaagttctgcaagacatccaacctaaacagtcatcacccttgctacctctccgccacttatccttgcacagaggcatcccttccagttcctgggtatatacttccacatctctaaagattacctcttggtttttatttctgtctgtccagtttatggttttaggtatcagatcatgacttctcactactgaagacgaagattaatgttttttttttcaccgtgtctgaatctctccaaacttctacattctttccatctccccatcctttcagtatagttacatcaacatttcagttagatcaatattcaacgtttgatttattataactatggccattcaaatttgataatgattattttcccttttctgcaaaatacaactatctttatttgtcagtttaataactgtcatgctttttccctttggttacttttctaagacttataaatgtaaccctcaaactctcccccaatcagctaaattccttctcagtatattcaaggcattagcaattttatctttttgagtaaatctattccagaggctgtgacctgcttccatctgagatggttgctctctaaggtaagtgcacagctgtcatagcctcctccaggcaatatgccacatctgtctcttgtgtcgaagaccctattttctaagtccataatttcctcttcctttgtttactcctagttacggtggagcacttacttgaggcgttttcttgaaaagtgtagataagaagtaaattttttgacatcttgatcatgtgaaaacattttaattctcttcacacacttgatttctctgggtatagaatataaagttggaaataattttccgttaacaatttgaagacatcattcaactgctgtctggcttccgatattgttgttgtgaagtctaaggatttctaatcctttgcttatttatttttctctctgaaagattccagtctcttctctttgcccttggtattctaacatttcttgttgacataactcattctggctagttcatatctgctagttctacaatatatttttctgaatttatttttttaaggtttattccattttttcctaatgtttcccctacattattcacatgttggacatactgaactgtttctctaattttatttacttcttttattttccttctctttgaatatttgctctactttctgggagacttttatgggtgtatcttgcaaattttctgttaagcttcctctaggaaacccactggtaatctcccaggctgggaggtatcctaaattagaatttgcaaaagtctttagtttgaataaggagaacattttgattgatacaatttgaacctcgcaatcaattttgtcagccaggtgttgagatttagaacacaggcaagagaaaaccattgcacttttcccttgtccctcagcaggacaccaatcacatcccctaccttaaacagaaagcaaagtaaaacaaacaagaacaaaccaggcaagtatcaacaagaagaaagcaggtcaatattattatcagacaagtccaaagttaaaaaaaaaaaacccaaactctaagcaaagtaaaaacattatttcaaatagataacataagtcattctaaaatgaagatatctagcctttattaaaggctttatgtacgttttattacgaattaataaaaataaattagctaagttaatatttcctaaattttagtcatttatatagcatcttcatattatactgaatattttacttcaaataaaatgaataattaaaaatggaacttcatattactactgcagatagaaaatcagtttcactaataaatcgaagtaaaacacacaaataaatatgtggatgttcctgggcatcaatttttctcttctatgtacaggaataataataggacctatctcatagggttgtttttgagtgttccaagaattaatacatataaagtgctttgaaaaattctagaacataatatgtgtcataggtaatttttaaaagggattaaaataacctatttataaaaaggctattaatttgggttttgaaaagttaaactgtatggtagaaataagagacatgctcgaaacaaaaatgaaacaaaaaataaaataaaatgagaaatatacagcaggcaaataatagccaatatgaaattggtagagaaatatcaatattaaaaaaagtttaaaaggacaagcaacaataacaataaagaggggcaccacacaatgaagaaagagatgatctatgaagaaatgataaacatatgttcattaaagaattttgtgtaatagcaaagaaaaatgttctttattaagaaactggataaaatatttcatattcatgtgatccaatatgattaattttaaaagatcatggctatatcttaaaagcatagagttcaattatgcaacagtaaaactttaaagtaaaatattaaaaccattgtttgtatattagtgtatgaagcaaaaaatacacagaactgaaaggatgcatcaaaataatgatatacacaataatgatacctgctgggaaggaggagaacaaaaacaaaacgtcattccattattagcaatgttttaaagaatttgcattcagttttctagtgtgttttgattgtagttcaactattacaatctcatttgaatttttatattttaaatatgtgtcaaatttataagtcacaaaataacataatgttaccaaaaggtttggcaagtttgtaagtttgactcataaatttggctttgcaggttctggacttttgattttaagaacatccgatcgctctctctttactgtcatctggttccaagcaatagaaaagagaaaagataaaactgtggttcagatgcaattttatatcaattcctgcttttctgtaatcaactattatattaaaacaatatgcctttaatttgaaaatgtataaattagctatgcaaaaaactgggagaactatatacaaataataaaaattccgaggttccctataattgtgtacgtcttccacaatacattaaaaaaaaaaaaagagttctgagggtataggctaagaagagaaaggaaacggtagcgatctcaaaatgataagttaaaagaaataagtaagtagcttatttttcagttgtgggattatgaataattactatttcattatctacactttgctgcacttcccaaaatttctacacagaagatacaatctggaagaaatgaagaaagatttcagtagtaagaacgtgtaatgagtgattacatgataaataaaacaataaatatttctttctaggatatttcaccaaccaaacacgacctgattcaccaactaatactcccgccttctaacagccacacgtaaaaatcagaccggctccaagaataacctgagcctcctttcccataattcccttctttctagtttcccatgaatccgaaggccttacaccccacactactactagaaagttaacccgccccctcattctttactggtcattcacgattggtcctgccccacctgtcggtgtgaggctgttgattggataagagcggaggccggtgggcggaacggtttctgacaaccggcgtggaggcgtggccacagccgcccagaaattctacccaagctccctcagcaccatgtaccgagcacttcggctcctcgcgcgctcgcgtcccctcgtgcgggctcyagccgcagccttagcttcggctcccggcttgggtggcgcggccgtgccctcgttttggcctccgaacgcggctcgaatggtgagcgcaggccgccatcccccggcctccccgcagtgaccttcagccctcctgcctgccggcctgggcgcccgcgacttggcgggagagattccccgggcgtccgggccgcgccagactctgggcttagcgcccgtgccggcgtggcgggcctcccggcctcgggacgcctcttccggcgcagggatggagccgcagcccgggagagcgcttggggagggacgggggctgtcagagagggtcctactgggcccgctcccggcgcctcctcggagccgtccgtggcgggccgaggccggggcgttttgaggtaacttcgctgctgctggcgcgcaggcccccagccccggggcgctgccctcaaggacagtgccggcgtgggcggagggtgctgggagaggggcagctcccgcaccgtcctgccccatagctgggccttgctggccggacactggccgcctgtgcatctagtggtttctgaactgtggtttgtttcgccaaggggcactgcactgctttcaggccctccaggtggggtagaaggttcttcgaagattttacttcctttgaaattgcatgctcagtttgttaggctgactatggtttcccccgtaattgttgtaaaactcttcaattccgaataccgcgggcatagtgttctgaagcatgtttgagcagattggctaggagctgaatcggtactttttattcagaaagccagctaagaacttaaagatccaagttcaggttatgacatgcttacgtaagtcattttgctctttagagtgtcatctttaggaatgcaggcttttaaaaagctttaaatacatatgtatattgttaggaaacgtttgagaaatgatagttgaagagttacagttctgcactggtgtagcatgaggtttgcaatctaagagatgtgatttcaaatccgtatgcaaagttgaaatacttacagctactcagcaaaactgcacatgtgaaaataccatgtagcgagtgctcattaaataagtgccccatctagggtatttcaaagggccagtactttttctggactctaaacttcaagataatttgattgggtcactatacctacgatatacaactatactacagaatcagagatgttttgtattcctcgaactccctgctcgaataattttagggcattttaaaacctttacatatttttaaatttatttattgtttatttagtgttttgtaaagggaagcagactggagaacttctgaatctatcctgttgatgcaaatgtcaaaaaatagcagcactactttgctcttagaattgtaatgttagctaaaatcagatggaggtagtttttgttttttctagttctggtactttttgccctctaaccattctcaggtccaaaatctctgttggttttgttaaaagttcttcctgttgctaatgttgagaatttcacataacccttsatgccctaaggtaccttttatttaaaagaacacatacaaattcattcaatagaaagatactgtttattgagtgccttccacttaccaggccctgtaaataagacagtccmtatggggatagggttttacaggcagtgttttattcttgtctttagtggagattaaataagcaaagcagttaaataagcaaataaatcacacatgaataattagtgtgatcattgattattaaaaatgcattaaaaagtgcattgagaatgagaatatttaacaggcagaccaactgtgatactgacttggtagcatgatggcatatatatagtgtttatatatgtaaataatgtttatacatttcttatataaatgaatatacatatgtaatatatgtgaataatgtttatatataaataatgtttataaatttcaaataatcattcttagaccgttttcaaaagttcccagtaaaataagcattaaactaagtacattgaattggccaaatcttgaccagtaataagcatactcttgaaatggaaaagattactatttgtatttcaaagtctttatgtttatcaccagcatagtatattagttctacagtctgtctttaaagcctgaattaataagtttgtgtgacaaagagctctcaaggaaagacctgaaagtgaggaagagaatgagaatccaaatagtatttttttgtctttgtgatacttattcaggtttctttctctttaacagctgataagatgcgattacttttgatcctgggtttcttttcaacttgtaatagtgttgtattcttgtctttaggcaagcyaaaattccttccggatagaatatgatacctttggtgaactaaaggtgccaaatgataagtattatggcgcccagaccgtgagatctacgatgaactttaagattggaggtgtgacagaacgcatgccagtaagtggcatttgtggaaatgttggctattttggatgaagtaggctgtattcatgagtcactttactttataaatatttttcagagttaaaatgtaaagttattagaaaagatggcttcgtgagtaataagaggttctctttcactaaaatgttaaagaactttttgaagttttagcatgctattattttgagccatcgctttgaatattttggattttttaaaatttaaggccgggcacggtggcttatgcctgtaatcccagaactttgggaggccaaggtgggcagatcacgaggtcaagagatcgagaccatcctggccaacatggtgaaactctgtctctactaaaaatacaaaaattagccgggcacggtggcgcgcgcctgtagtcccaattactctggaggctgagacaggagaattgcttgaacccgggaggcggaggttgcagtgagctgagatcgcaccactgcactccagcctggcgacagagtgagactccgtctcaaaaaaaaaaaaaattaatttaattttaagttccgggatacacatgcaggatatgcagttttgttgcataggtaaatgtgtgcyatggtggtttgctgcacctctcaacccatcacctagatattaaaacccggcattagctattttttctgctgctccccctccgcccacaggcccctgtgtgctttgttcccctccttgtgtccatatgttctcattgttcagctcccacttacaagtgagaacatgcgggtttggttttctgttcctctgttagtatgctgagggtcacagcttctagctccatccatatctctgcaaaggacatgatctcattcttttttatggttgcataatattccatggtggatatatacaactttttctttatcctttattgatggacatttgggttgatttcatgtctttgctattgtgaatagttattttggatttttatttggcagaactaaatgattgtcttttcactcttgctgggtatttacagatttttactagggttctacagtttgtaaatatttttatttcaatactcattcttttttcccccactaatttaaaactgagattttttaaaattacactttgtattttggtttcagtttcctaaaaagtgtatagtacacaaacacatcaaagtattastcttaaccatgtctgacatataatagataatatataagtatttattcaattccatatgaatgattaaatgatgagaaaactttctaccacattcaattaaatttaagatgccattaattagaagatgcaccaataggcaccactaagaaagaaaaatgctaccaattaaggttgtgacttaccattgattacaagatacatcttgatttcagagatgttaaagtgtgaaaagaattgagaaatgcataacatattctacgggagcccaaccggagtatgaaaaatagtcaatgcaggataggctagtaagcctagaagtagataggcttcatcctgtgagatattgtttaacacttatcttataaatatgcttttattttcaataattttaagtcattcctaagccttcaagactgcctcttgacaggtatatagaactttacaacaggcagctgaatctttgatgagaatatctttgtcattgccatctacagccttcttggtggtgaggtaaacatagtttgactacgtggttaggtgaaaaagggtagtgaccaatcctaaaataatctcatattattcaactccagagactaaggaggaggtcagccccagctagtgttggtgggagtgagcatrgctgccgttttcattgatctgtgtcaccagcatgttttgtggttctggtggggcatggttcctgctgctgctgctccagagacagcacagccattgggattgcacacctgtgaaaggcagacacctggggtctcgattttgtcatactttctgaactttattatgtgtaaaacagtctgtatgtactctaaactgagtagtatgattaaactcaaccctttttacttgaggtccagaggaaaacaaagctaaaaagattatgaacatctaatgtgaataaattaagaataaagtgacctgtcttttctctctagtgatacattttgccattttatggtgttcgttgaacctctttctgctgtgaatgacccttttttatttttatggtccataaacactgggggtcattcactccattcagatggccagcgttgattggcattcacctttgcccttggtagtggttcagcccactacctcagtgtttgttactgtggagatttaaattcccatttgtttttgtgtttaaagtttttaagtttctaatcctgtgtgccatctgtcctcatttcgtttgagtcaaacgtttctaatgttttaattttagttacttaaaattgaaatttcaaattttctggttttccttttctatttgaccctcagcttatacttactctggtccaggtttatgtttttaatgtgtcttatttcttacttttcttggctttttctactttgattccagagatagcaggttctctcttatacattcatcattctcttcctttcttccctttctcccttctactctttccccattcaaacctggtgtgggatctatacaacaatctgtattattaattttgacaagaactcacaattcacttgtcttataaaaactaggttttcatttcagtttatccttttcaagcttggtgaggtgatttgggatagacaatgaaaatatctgcattaatggggttttatatatatcggaagctgtcacctttaggtctggagaatcttgggtttaaaaaaataattcttctgagagaaatgtccagggagttactgagtattaaggctttactagctaagtagaatagattgctttttggccttggggtgaaatgataacccagtcagtcactggtagtctcatactgattggcagttaaatatatcccttatttatttatttttttaagaggggaaggaaacaattataatgtaacgtgggatccagtaagagaaaataatggttcttgctggtgaaaagattgagtactaaatttgtttttatttatagtatatgaaataaacacatataatttattgtgtgtatttgtgcataggattgtattcgtgtgaatatgtgtgtatatgtatgtgggagacgtacacacatatatatatgaagagtcaatgtatttgtttttatttggttccttaaacaaatagatctatgataatgttgattcttggttcatgaattcctgtctataatctttctctataaccgaaacattttagagctatagtgttactgttttattgttattgttttatgtatagcttttgcatctgccaaaataataaacttccatgcttaagtaaaattgtaaatttgaawtatttttctgattaattttagaccccagttattaaagcttttggcatcttgaagcgagcggcygctgaagtaamccaggattatggtcttgatccaaagattgctaatgcaataatgaaggcagcagatgaggtaggaggtgataagtgtgtttgcttaataacctcagacccatgccatactctggatgacgatatgctctggcagaaggaaaggggaactgtgaattcttgaattaatgaatttcaggggagggtggtagcattatttttagtgrtgatattaatatggtgcttaaaacgttacattgtgacaaaatttctggatgattttataccttttgtttttaagccttttgactttccttaatttatatagttttaagaaaattttttgaaaagatatcatttgaactttacttgattttttattttatatataaatctttttaaaaccagttgattatttgataatgcatattgagaatgtaattttactaatatgctaataacattgtcttaaagaagcaatcagaggtaacagaactgtatatatagtgttgttaattacagcactatttataataatgaaaacaaattagacaatgcgtaactataacagctacttatataaattatatttatatggtaaattatagaaaattacttttttgaagattggcatgcacaaagcctagcctatgagaaatagggaggaaagtttgcaaaaatatatgtattttacgatcctaattttgtttaggaaaaaatgaacagaaartgtgtgtttctcatayacacacacacacacacacacacacacaccctcattgcatgagatagagactggggatgccaacatgctaatagtcataattactgagcaatagaactatagtgactgttttacttttctcagttctcaaaattttctacactaatcacatatttttatataaccagaaaaaagttttattttaaagtggaccagttgttcaaggtaatagatttctcaagtgcattctgattttttaagctaaaatcattccagaagattgttaaccacccatattttacaaagcacaccatccaaaaactaacacataagctggatgtataaaaatacaacaaaaataggggcaaatctgggcagcgtttatttctacatttggtgattactgctcattggacatctgtgcaatgaagtagctattagtgaactcacattttcaagttactagctcattagcatgctgactctggcaataacatctgttggatattcctgctgagcaccagcaacaaatatatctagagactaaacgtatttgccagccttaacaggtggtcctctgttagaggaggctgtgggagagagrtaagaaagatacctttgattcccttttcatttgaaaccagtgaattgtcataccattcactatagataatatttcactttttaaagtatctgtggttggagcaagtgatgcttcagaagcttagatatgtgggtcaactgtattcaaactctgtggcataatcagcattattatttccttttttaaaatacatttttaacattttttctgcaggtagctgaaggtaaattaaatgatcattttcctctcgtggtatggcagactggatcaggaactcagacaaatatgaatgtaaatgaagtcattagcaatagagcaattgaaatgttaggaggtgaacttggcagcaagatacctgtgcatcccaacgatcrtgttaataaaagccrggtcagtatgtgagctttgctgttttttggttataaattgaaaagcatacctgagattgttcttgtaaaacaagcattcactttttgacaagaagtgttcattatttaatggataaggcttcttatggttcttatttcttgaaggaatsttggttttatgtttcaatccttataaaaattatttttaggacacctgaatttagtgtatgtatttttttattgtttaaaactctattttgaaataattttagatttataagagaattgcaaagatagttcaaatagtttctatatcccttcactcagcttcccttattgttaacatcttatgtaaccatggtacatttatcaaaactaagaaattaacatagatacagtactcttagctaaacaacagactttaaaaaaaaaacaaaaaactgaggctttcctcagtttttccactcatgttctttttcaggatccaatcaatgctatacattacatttagtcacatgtccccttggtttcttctaatctgtgacagtttcttggtcttttgcgattgtctcagtcctttggggctgcagtaataaaatacaatagactgactggcttataaacaatagaagaagttaatttgtcacagttctggcagctagaagtccgaggtcaggccactggccaattcattggcttggtgggggcccactttttggtttgtagatggccatcttttctgtgtcctcacatggtagaagggacaagggagctctctggggtctcttcgtaaggacactaattccgttcatgagagctttgccctatgaactaatcaccttgcaaaggccgcatctcctaatactattaccctaggggttaggatttcacatagcagtgaccttgacactttgaaagcagtggtcaggtattttgtagaatgtccctcaattctkgtgtgtctgacgttttctcattagattgagacttttgaatttttgagaaaactatcacagaaataaagggcccttctcattgcatcatatcaggggttcatgatagcaacatgacttttactggtgatgttaaccttaatcacttggttaagctggtacttgccaggtttctccatggtaaaattataatttttcctcttctataccctgttcattagaaataggtcactaaaccctgcctgcattccaggcactgtatttcagtttctagagggaggagtatcaaaaagtttttgggcttacattaaaatcactgtagtaattaatagcgcgctaccttgaggctaggcaaacatcttctttttccttaaactttttcctactatttttagcattcatcagggaatcttatctacagcaattacttccatggtgttttaatagtgattttcagttttctttattcattctacacttgttagttgaatttttctgcaaggaagatttgttctctctgtcccatttatttatttattcagttatttgggtatatcagtatggactgatggttatttattttattcttcaggttatgatcccatacttttgtttatattgttgcttaaattctttcagctctgggaacccaattcatttggctcttgtgtccttttaggcatgccaccatccttttacttttctgaagtgtgttccgacttcctggtactttaagatgctccaagctcattgtcttgtattgtttctgccccagccctagaaacagccatttttcaaggaactgttggagaattcttattggaaaatgatatttagaaactgagatctgggtgctaagtataatttaatatatttttaagtagtaaggaagaagtgtttttaatacacgttcattgtataagggattttcccaatctaatacttgcctttatgaatttatgttctatatatactgaagtctgaagtctgcctcagaaaggtagagttatagatgaaacgtgattggctacatgttgataattatgtaaactatttgaattcaggtgacaggtacataagtgtttattataccattcatcctacttctttcgtaagtmctttatattttgcatagtaaacgtcaaaatatataaataatgtatctttttaaatgacagtatacttttatatatatctgtgtgtgtgcatgcgtgtgtgtgtgtgtgtgtgtgtgtgtgtgtgtgtgtgtgtgtgttttagagattgtgcttcactctgtcacccaggctggagtgcagtagagtgagcatagctcactgcagcctggaaatgctgagctccagggatcctcatgccttagcttcctgagcaagtgggaccataggcatgcaccgccatgcctggctaactttaaaaatgttttcagagacagggtattgctctgtgttgcccaggctggtcttaaactcctggcctcaattgatcctcctgcctcagcctctgaaagtgctgaggttataggcatgagccactgcacccagcttgatattatgttttaaaagtacagggtcaacagttgaggaaagagcactgagtatatactacctggctaggtctcaggtttgccagttgctaaatattttggcatttatacagtctctttgagggcttggctttcctatttttaaagtggtaatctacctcacagaatttttctaaacttaataaagagctgtttatgaaagactgtatgcactgtataattgtaagatattcaattataagattttataagaatatataattcaataattgatgtaatttgatataattataagatattcaactacaytgaagatactactgctgtcttcaagtgcagttgttaactatacttctctgtattttgctgtcatttattagcaggcagatataatacgtaatacataatataatacataatatattatataatacataatataatataatacgtaatacatatataatacataatacattcagtatacttaatgtgtataatacagttctgagtatgtgttagaaaccaggatgctgcttatttgattctataataactcacctatgacatgccacacatacatgtaactgagctgggttttgagtagttagttggagagttttttaattgagaagtttaattcagaagtttgtttttgttgcctctgatttaacattttatatttcttttgaaaaatttccaacagagctcaaatgatacttttcccacagcaatgcacattgctgctgcaatagaagttcatgaagtactgttaccaggactacagaagttacatgatgctcttgatgcaaaatccaaagagtttgcacagatcatcargattggacrtactcatactcaggatgctgttccacttactcttgggcaggtataggagtttgactaatttgattcaatttagagcttggtacaaatggccaatgtgtcatccttgaaatctgactagcttaaaaggccaaatttgtaaccggaaacttcagtgacagaggttgttctgttcaaccaatcagtaattttcattgacatccacttagaagaaaagcagagtatactggctataagtcagattcagtcagactgctcgggttcaaatcttagctttgctgtgtacaagctatgggaccataggaaartcatttagcctttctgtgcctcagttttctgagctacaaaatgaggaaaataatttccctttcataggatagttgtgaagctctagtaagttgatttatgtagagtgcttagaagcatgcctggcacacagtaagtacccattcatgttagctaccatcatcaccaccgtcatcgctgtcatctccatcagtatcatcatggtttttcttttgtctttcttacctaaattagtaggttatttaaaatttaatctcaaagtgattaaataaggtagatctttttaagatggatctggccgcatgtgaaggagatactactctcttctccaagatattagaaagtattttcatgtttctttttcaatgccttaaggaatatctaatagtatacattgtgaaggaaatgtaaggaaatacagggaatgacttttgtcttagtaaactcacactccaattggggtagcttaatttccttatggaaggaatgaggaaaacttgaaatgagtaattgaaaaacaaatgatgggactaaattgaactcactggattgagttgcttcttaaggctgtgtctcatttctctttgcatcattagtacttaggaccatgcataatttctaaggaggaacagtatgtatgttttgaaacttttgaatatttctcaagtttctaattttaacctttttttggtgttgaaaactacaatactaaataccatttgggccatgactcagcctcctgtgtaaaatcatcattcttcctgttaagacagaaaattacatttttctgtttgactttatcagaagcatttatacttgcttttattgggattgtcttttgagttcgtgcattgttccctgtcaaagtgtattttataagtgaatctatctagtgtgtttgtgtgtgtgtgtatacatacagtcatgtgttgcttagcaatgggggtatgttctgaaaaatgcatccttaggcaatttcatagttatgtgaacatcacagagtatactcacacaaacctagatggtatagccttctatacacctaggctatatggcatagccttttcctcctaggctacaaatctgtgcagcatgttactgcattggatacaataggcaatcgtaacacaatggtaagtatttgtgtatctaaacatatctaaatgtagaaaaggtacagtaaaaatacggttttataatcttagggtcccactgtttatgtgatctttcgttggctgaaacatcattatgtggtgcgtgactgtatatgagtgatgttatatcagatgcatcaggtctacctataatgagttatatcttttgaaatgttttctttagaacagtatggcatcctgtcacttatggttttttagtgttttcaggcaggaaaaaaggatagatttagtgtaaccatgtatcttggtttgtccagttaactcccagtgtatgccttttgtttctgcatgactattaatagagccctttctgtgttcaaaacataaattctgtggttgctttaattaaggcatgtcaaaatttggaaccagtgttgacattggcacattgatgctatgatctgactctaccgttacctcctattctttttggaaggtccttcaatgcaaactgttaccttcctgtgctattcagtgagtcattagcttcccaagtctctgtagaatgtcttcatatttcctggtaggtttatacactgaaattgtatggagaatatttctatgtttgcatttttttgggggagatgagttactattttttcttacaccaaagttgtctgagrcatcccaaaaaataagaaatcacttcagtttctttagtagactgcaagtaaaccaataatttagtgtagtaaagttgttctttttaaagtgtatttcctgtgctgtttttctttgcttcctattaaaagactagattataataaataggctgcatgttatcagtggcattgtcgtaccttatggttctataaaccctcatccttccctatactttgctcatcataagatttgaagtagtataaataaaacttgattagcttgtaatttagtattctgaaaggtatttttaaaaatttctatttaatgcagttagagtaacttgtaagctattaggaattactwattcttaccttaattttcttttcttttcaggaatttagtggttatgttcaacaagtaaaatatgcaatgacaakaataaaagctgccatgccaagaatctatgagctcgcagctggaggcactgctgttggtacagktttaaatactagaattggctttgcagaaaaggttgctgcaaaagtggctgcacttacaggttagtgatcacgtgaattatttctcattttcatttctcattatacgtggtctgtacattttctgagtgttcctgtcttgaattcttgtgaatttaaagttagaaatgatatttttccatcaaacatgtgttttaagtatatttctgaagttataatgttaattatttgccttttaaaaaatgttccatgtaggagtttatacagcatgccattaaaatctaccagtgttagctttgtttactagttagttttcaattaatttccctttaaagttttgaatagcagttttcaaaataggcagaaaaaactgagtgttgagtaagttatttgaatagtaaatatgttgtagacagacttaatttcttttttttcctattatgtcatgctgtgataattctttgaattattgacctttttgaaccatgtctttcctttagtagagagagtattatactttagataatgataactattattagggccaagttgtcatcttcagaaaactctcattaagatgtagatgttaccagacggttagggtagagataattatacactgcacatgatagcttaccagctgatttgtctttaaaccatattttaatagaaaagaactctacttttagggtttggcaaatgtagatttataaaatttttaacatgggggttaactgagaacatctaactcattttagcacactgtttttataggggatcttgtgggctcctggctaggggagaggatgaagcacagtaaagtggacaaagaaactttaaaaaattgtattaggggccggacatgggggctcacacctgtaatcctagcactttgggaggccaagatgggcagatcacttgaggtcaggagttcgagaccagcctggtcaacatggcgaaaccctgtctctagtaaaaatttaaaaaaattagccgggcatggtggcgggcgcctgtaaccccagctacttgggaggctgaggcaggagaattgctggaaccctggaggaggaggttgcaatgagccaagatcgtaccactgccctccagcctggctaaaaaagcaagactctgtctcaaaaaaaaaaaaaagaaaaaaggtattaggaaaggagtgtggtataaaccagaatgaattcccatatactttttactcaagcatagtcaggcatcatatacgtgtgtttgcagtaggattgtgttttttctttcagtacatttatcatacttgttatttcatctttttaaaatgtagtgcctggctaagcacagtggaattacactcctgtaattccagcacttcaggagaccaaggtgggtggatcgctagagcctaggagtttgagaccagcctgggcaacatggcgaaaccccatctctactaaaaattaaagaattagctgggcgtggtggtgtgcacctgtagtcttagctactctggaggctgaggtgggaggattgcctgagccatggaggttgaggctacagtgagctgtgattgagccacactgcactccagcctgggcagcagagtgagaccctgtctgaaaaaacttaaaaaatgtaataccagattctttctactcctttaggacttcttttaaaaatgtagacaaaatttgagtcttaagtaaacatttttttctgaagtaaaatttttattttttcgtatattggaactttctgtttcacttgctaatggtagaaaaatgtttagtttaacttgttcacccatctaggatatttttcttttctttaggcttgccttttgtcactgctccraataaatttgaagctctggctgctcatgacgctctggttgagctcagtggagccatgaayactactgcctgcagtctgatgaagatagcaaatgatattygatttttgggttctggtcctcggtcaggtctgggagaattgatcttgcctgaaaatgaaccaggaagcagtatcatgccaggtaatcacatagctagtaaatgttggagctaaaacttgactaggtcctaggcattcttagctatggaccatgtctctctttgtttaaagttatcccgmagctggatgcrcaaggcgcactgttccagcatgtctgtggtcctctggtcaggactgctgggcacgtcacctgacaagataggaagaaagaatctgacttagcagcaagtatttcgaatcccacattagaaaatgtagagcaggctgttaaagtgatcagcgygggttgaataaaaagaagtcataccaaacttcacttatttcattttttgcattccgttatatgcctgttagatatagcaagtgacacaacagtgtatgtctggatttcagcaagtcatttgatagattcgcatgatagtcattgattccagtggagaagcgtgggcagtgctggcagatgaatgtagctgggtgaacagtgacatttcagaagtgactaatgaagtgacttcagtctagaagaatatattggtaacaagctgaagggctctgcccttcaacactttactggtgactgagggtgaaggaagagaatacatgctaatcatattaacagttaacaaagttgggatagcaatactatggatgacagaactgagwtccataaaggccactgtagcttgggctaaaactgacaatgtaacttttaatagtgagaaaggcctgactctagatttttatggaaattatggatctgtagaataagaagagatgaaattttgttttaaagtacttcatgttgaagaatgacataaagrtttagttgattgcaaatccagggtgattgccaaaagaaagagaactgggggagtcacagataaaggcaataatccacccaataatctttccagtgtgttaacttgtactggtcagaggaatctgggttgtttgattcaaacttggagcttgtccaaggagtgtgagcagggtagtggggttccagagactcgtgataaataggaaaattttagcttagcatcaccttcccctaggaagcctcccatgtgttagtgaagggtcgcttttataagtgttctgatagcagcatacactactctgtatttaccccttataattgccagctctttctccctagcctccaagttctgcgagggcagggcctgcatctttcttattcagtgttgtatattgagtgcctggctccataaatatgtatagaatgaatgaaaatcatgaaggtggagaactatatttaatgtgtagttgtggctactcgttagcctttgaatgattcattttgtggctacccatcccaccttccttggttggtttgtttcattaaattacactgatggttgggccttgctttattgtatatcttactctatttagtgaaattagatttctttattctcctgattatttgcataaatttagtctttactctgtcattggtggttttcttgaaggcaaggtgaaccctactcagtgtgaagcaatgaccatggttgcagcccaagtcatggggaaccatgttgctgtcactgtcggaggcagcaatggacattttgagttgaatgttttcaagccaatgatggtaagctttaaatctgatttttaatgttttttgaccaaaggcttattatcttggttttgtatttcataaagacttctagtgattccacattgggtagttgggtgacataagtagcagttggaagtcaagcatttattaagttaccagaataatcctagataatagaaattagttgacttttaacctaagcaatttgatgttttttttaatagcccgtttaagaaaaataaaaygcctccctacaagcctgtctccttctcatgctgctgctttcttcttcaaattcagtcttcttggaaggatagcacatactcactttcatttatgctgtagtcaccacagcccagcatggccccctccacgcttgaattattctcccattcattggtgactacctcagtccagctggcattgcgcagttagttcttcccttactaatagttgatgttgactgtccctccttgaaacattcttcatccctgctttcttgaacattttttcaccagttcttcttctgccccctgtcagacttcgtttcattgtctggctttacctttccacatacttgaaaacattgtgtccacccaaaccgttctttttctttcgtctttacgaagatcgatagatgcatcgcgccatttctcatcagtttcctcagctgcagatagtggagctgttgccataatttagagtccttcatttggacaaagtgttatagctaaagtagagtaggggcttactttctcttggaatctcttctaaattctaattttaattttataagaatatgcaaatgacaaatatggagtatatttaatatattcactaaatatttattgagtaccattttctatcaggcactgtactggatgcataatagagatagagcaatgaaaagacagatttcttgctctcatggaatgtatatcctagtggtaaataaaaacacaggccagagcagaactcagactgttaaaattttgctctcaggtcagattccaaacagttaacacgagatacccagcatttataggtgcataacaataaatgccttgttaatctttttaaaattttatttttaatgtaaaataaagataatcaatatttgccttattacaaggtcattagtagcaaattaaaacttagattatatgtcttagagtccattgttggaagtctagttttcagaccggagttttagaccagaggatattaggatttggatatatcttaataaatattggaaatgttgccaacaaagccaaaacaaactaattgattttatactgttttttaatattatatgaaaagttattttacagtgactggagtattcgttaaagcatagaaaacctagaaatttggtgatcattagattttgccctgactttactaattgcctcacactcatrctgaactttcgaacctctgcatctttgctcctcttccttctgcgtggaagattctttttccttctctggccaagtcctctccataaaataggatttcaccagttccgacaactggagttaatttctctttctctatggtctctaacacttcagacctctgttttaaatacttgctatgggctattttgtgttttagtcatttgtatttatgtctttttcaccttttttagatttctgtgccttcaaatgttcatgctttctttcacatttgtttccttggttatagtgccttaaaatttgtagaagatctatatgtttattgaattgtatatttactgtcaaccagaaaataatatgttattggacaaaaaacatgttgccttagtaatgtctctctctctctctctctctctctctctctctctctctctctcwctcactcactcaaagattaaaaatgtgttacactcagccaggctgctgggggatgcttcagtttcctttacagaaaactgygtggtgggaatccaggccaatacagaaaggatcaacaagctgatgaatgagtctctaatgttggtgacagctctcaatcctcatataggtaagtgtttaaggaataataatatcattttgaatgcaaaattaaaaagctaaaccatttttaagagacaagtggatcagtgtttgagaacagcaaatttcttttgaatatggttttagtaaaatctcaaaatatttgaaattgtgtggaaaggtactatataacttgtatggtgtcatagttctttcaaaactagatctattatgcctcattttatttgaaatgtatcgagaagtagtagttcaaacttattttgatttyaatggaattcagaygccaaatattctatgcagaccattggggaaggttatttgtaagaccttcagtgggtaatgtcactaggtggcactgctgattagcaacattgaatgaactcatttttctaccttccctagatctctacaatgctttaattttgttgttttattcaattcagaaatggaaagttacaattaaaagaaaaagtttatgtattcattgcttatagtgaaagggaggaaggaaaatgcaaatattttgtctaaaaccatgctattgtattataagtcttttttggaactgtaaatatttcattatgtagaatcaaacatacagatttgggtagtagactgaccatagagatctccattaaataaactgtttacacttttgtagattttgaggcattatgttgcattatattatgatgtgttaaaagccttttacccattcttcctttctgctaagcagaggttaatatattttctgcctttctgttatagaacaagttatgattcacttatttggcataatatggctactgcttcttctataatcttgaactttcaaggcaaattttatattcctggtttcacatcaagctataattacagttttttaaaattagagctcatttgactcttttaggtagctctgagcccagtatgatatcagttttttggtgtggcattgagattggtaataatgtttgatccatttaaaattatggtacatcaactacatctggaaaaacacaaaggggaacccagaggctcgtgtgagcagttttcatcagatctttacttcagaatgtgttaccaaaactttaaattagaggtgtctcctaaagttgaatgattggcaaatctttattggaatcaacttattgtgacataaaaagaattgttagaggccatatgagaatgagatgggtcaacaccacctcactagttgacttggtgtgagccttacaaccctctgaatcatgggttccctatattctcattatgtaccaggctggttgccaatagtgtcttgttggacttgacagctgaaatgcttagactttaaagccattattaaaataaaagtactggatatatattgatctcaagagtttaacatgcaaattctttctcaaagcatttctgctttaagaaagatgcccttttcagtaaatggcatcaataaatgccctttcagatcaataaatgcccttttcaacatatttagcattcacaaattcagttaagtaataaaagtaactatgcccatgctttcttttatagctgattaataattgcatattgacacatgccatcttattgatgatgtatactgcctcagcaagcttcttccttttggtcatatttctctgatcttgttttttttctcccgcattggtttcattttcattcctgctttttcttcttgacatatatatatatatatatatatrtwtatatatatatatatatatatatgttaagacagcttgcagaactgccctgcccccacttttattaatttgaaaagcaaataactctgaagtaaacagtatgcctgtgatcttttgtgcagtctgtatttctgcccagactccctatttgtgtccctgtaatgtctgggaggaggccagggtatagaagccattgcagtggagagccacatagagaagagccattggaagcagctctggaggcacccctccccaggccctgcctgcgcctgcctcactgcgaggacttctcccctctcagagccactcaccacagttgccagacgtgcagtgctttattttctgctggactggagcatttagcttgttaatgtttctttagaaagataattgtttctagttaaacatgttgtttgaaaaatatacccagatgtatatttttatgtcgtggtgctataatttctrcttttttccccttcaaaatatctaagttactggaaaatttcaacttaggaacaaatctgttggagaaagtgaggtatgtttaagtgtttatttcttaaggaaagtaaatgttctacataaaaaatgattattgagataatcactgttaactaatttaaaaacaaaaaatgtcatttaagaggcccatatagcatcaatatcaagtaaacaattatgtcaccttttgctttaggaaaccaaatatcactgctaacccatatgtcgtctttttattttttcttcagggtatgacaaggcagcaaagattgctaagacagcacacaaaaatggatcaaccttaaaggaaactgctatcgaacttggctatctcacagcagagcagtttgacgaatrggtaaaacctaaggacatgctgggtccaaagtgatttacataaatttataatgaaaataaacatgtataaaatttaaaaaaacagactcccatttcttaaaaacggataagtttgaaaggaaactgctrttgaacttaagcatctctagcagagcaatttgatcagtatataaaaccctaggatgtgctaggtctaagatggattaaacaagtataaaataaaatacatttataaaataaaaaggaaaacagacttaaattttctcctatgttaattgacttgtattatagttgaatctatgatatttgtgcatgttgtctttgtgacttcataagttaccaatttctaaagggttttaattttggaggttattggtggtttaaaaaattgcccgattatatcttattatctcattcccaaactatgtccttagccatcttttattttcctttgatttggagacacagtgaccaagcccttttgagtggggatgtgtatatgtgtgtgtgtgtgtgcacgcacgtgtgtgtgtgtgatagaataggttaagaaaattgggacatacatatcctgtgtgttaaacacacacctatccctccaaccttgtttctgttaccacagagggaccagatcaaggccaggcatggtgggtcagggacaccgactttaggagactgcgctttgggaaactgaggcagaaagatcatttgagcctaggagtttgagaccagcctgggcagcataatgagatccctatctctacaaaaaataaaacaaaaattaggcaggcttggtagtgtgtgcctgtaatcccagctactcaggaagctaaggtggtaggattccttgagcccaggaagttgaggctgcagtgagccaagattgcacccctacactccagcctaggtgacagagtgagaccctgtctcaaaagaaaaaaaacaacaaaaagactgggttaagaattacaggacaagggttagaaagataaagggagcaggcaggaagatgggaaggaaaggaaagatgtcctgaaagtgagtcttgttcatcatctcaagtgctgagattcttcagcagaaattcatttgaaacaaccttaggggattttgaattagcagttatagggagatgcagaatagggtgacccaaatccaaagctaaggaatgtatttaaaatagagccaacctctactatgcagggagtcggaacaggcatttgttctattttttcttctacctcgtgtaataaataacaggatcataagaggaactctcattaactaaaacatctcatctgtaagtattactctatcaggtacattttaaaaaatgggatatttaccccctaatattcttgggaaatcagtcacattaacaccaactcctctgtcgtagtttgaagtagttgctttatatagaatttaaaagcgtaatttaaaaagttctagaaacattgtgatgaaagatgaaatttatatttttctaatttcttaagcgtgaatggtcactattaaaaggctgttcaaactttaaaaactgaactatagagaacctataggatctactttttagctcatgcaatactgtttctgccagtgtttttcagagggcgatgcgatgatgcttgtgtagcttgctttaaaacaaagcatgctttccgttggcacattctgtttggttttttttagaaaaagatttttattggaaaataaaatcaattagactgcatagctatgcctggaccccgacaaccaaactggcaactgatctgtagttgtgaaacagtttatccactatggtgctgaatgttttgccttagcaggcattctcagtctaaataggctgtcatttgagggtcacgagagacacagtgacttatgtaataaagattatggcagatcaagttcctagcctcagacagtctttgcacagctgtctgatgtatcccagcatattatagggcatcatggaatcctttgagttggcagtcatctttgtgtgatgttagtgaagtgaaaccgctttatgatgcaatctaaataaggcttgtagaattccctgttggagggttgttccgaaagtcaacttccatgttttttcgctaggggcaattttgtctcccaggggacatttggcaatgtctggagacatgtttggttgtcatcacagaggaggggggtgctactggctctaattgggcagaagccagagatgccgctaaatgttaatgcacaggagagcccctccgcccacaacaaagacttttctggctcaagatgtcaataatgccaagattgagaaacttagaaccaaaaagtatgtctctgtaaatgctcgccattcagttaggcttcactccttgtagggagagtagggacagggggagtgtcctggagttgctgtgactttattcattgaaattctaaggtgtcttagaaatgagcaagaacaagaaagtgaagtattagctgatcatggtgctcatgtcttagaatgacttactcccagcaggtttgtgccagatcaactccatgggggtcaacgccttgcaaaaatgtcatgctagagatggagacaaagataattcatgcatccctgtaagcaaacctgaaggaccaggggctttcttgagcagacagatttcaaagggggaaagtcctgggatttatgaatgaactgcttggtctgggactacacccaactcaacacacaagtagcagggaattcatagaaagccaccagtcaaatttactctttcttttaatggttcagtttggtaacaaaaaaaaaaagaaggaaaaaacatacatacatatatacatacacacaaaattttttgagaatatttcattctcaagattatgcttttgtgcatggctatgttttacttttctcttcttcctcctcagtgtccttttggtctttgcagcagaaagaaatctgggagagacaaatgtaataatagaaaaagggtggtattataaagacgagattaaaactggtaaagtgaattatttttctttttggagtaaatttattgaattggccactcagcaattaatttttgagcaattgatgtagagcttccacatgcaatctgggtcaggagaaagaaactgctaattatcgtctgccatttatgatgttaagaagcagagcgctgaggtcatctgtgtcaagccaggtaggtgagagacccttgtattggtatcttctgatcatcctggagatacctgctgacatttcaccttgcttttcagggctttccccaaaagactaacattaggctcccagccacaggccagggtgctcagacaggtaccacaacagctcgttccatccccgctgttgtttcagcatcaaatgtaagcttacggaaccagagcatgagaagccctgggtccttacggttaagagatagaagagaatgagatatggctcctatagcaaacattgctctgtcatagatgagccttctcttaagaacttggggtcatgcatgcttaattgggccttaatcaggtgaggaagtgactttagaaagccgagttcttgatgagagctgcatgttttcatcagtaacccagggcgattcattatatcaagacttttagacacaggtgagatttgaaggtgaaaagaatggccaaggaagaggcagaagggagatgagagataaccactgaaggagaaagacgtggccatggaggttaaattggagtggctcatattctagatgctaagggaagacagggaaaaagctggttgattggctaatcccagcactttgggaggctgaggtgggagaatcgcttgagcctaggagttcaagaccagcctgggcaacatctccatttgtagagaccccatctctacaaattattttaaaaattagccgggcatggtggctcatgcctgtggtcccagccacttgggaagctgaggcaggaggattgcctgagcctgggaggtcaaggctgtagagaggcatgatcataacactgcaccgcaacccaggcaacagaatgagtgagactgtctcagaaaataaaaacaaaagctggtagacccagtggacttaaattccacctctgctgcctactagttatgatttggggcaccactttaggcctataaacctgtttccttgtcctcacaacagagctatgggtacatatttcatactcatattcctaagttcctatgtatatctaaagtacccagcacaatgcctgccccagttagctttctaattccctggagacagtgggcaaaattgctaaatgctaaattgattttaagagggtgaaacaggtaaaatgggattaggccattttttttttcttcaagaagagactatataattcttcaagaattatattacttaacgatataatttatcatccaaccttgaagcctttgaagaataaaaaagaataaaataattcaagttgtataatttttgaaacttattgaccaaaaaattggttttatcacattagtggtgctctaaatagtgctactcaaaagctaatttcaaaaataattatctccaggttgaggtgggagggttgcttgagcccaggagttggaggctgcagtgagctatgatcaygtcactgcactccaacctgggtgacagagggagaccttgtctctaacaacaaaaaacaccagttttctctccagtagggtcttaatattttcacttcttccataaaactgcctacaatcttctttaagttgcctttatggttaataaatgtaaaatgttgatattttcagtgaactcctctgtagactacaatatttttaattgggcaattagtctctctacagttgctgatgtaccggaaaacctcagagaaaattctactaaatgaaagatactttcaataccattttttgtactgaaatgtattaataacttaatattttctttttgcttccactcagactaacttaatttgatgactaaaaaaaaaaaaaaaaaaaaaacccagaacttgttaaataaagtgttcctatttatggttaatttgccatattgaaatgctgcaaaattgtaaggcttctcaagtgattctattccaatagagaatacaaatttgcacaacattgtaagtcagaatttcatcaaataatttttctcaaatgtggagatttttcaagttaaatmtcatgcatgatttgacctctcaccatttactttgttcggttcttgtttttgttgagacagatttcaatgtcttcctgttggcaagctttttctcaatcattgcaattgaaatttaagagacaaaaaaccctgaaattttggtgctacacttgttaaatacctagattaaagatttccaactgtattagtttcctgtggctaccatacacatcaccacaaatttgatggcttaaaacaacagaaatttattatctcacagtcccggaggccaaaaggctgaaatcagttgcacagggctggtgcttgcggcagtccttcacccatgggtatatcactccagtctctgatctcatggtcacattgcctcctcctcttctgcttgtgtcagattttcctctgtctcccttataagaacaaggacacatgtgatggcatttagggtccactaggataatataggacaattgcccagtctcaagatccttaatcacatctgtgaagccctttttggccatataaagtaacgttcacaatttttaggagttacgacttatatatctttgacagccattatttggtctgatacactaaatattaaacaaattactgctgggcacagtggctcacgtctgtaatcctagcactttggaaggccgaggcgggtggattgcctgagttcaggagttcgagaccagcctgggcaacatggtgaaaccccatctctactaaaatacaaaaaattacttgggcaaggtggtgtgcacctgtagtcagctacttgggaggctgagacacaagaattgcttgaacccaggaggcagaagttgcagtgagccgagattgcaccactgtactccagtctgggcaacagagcgagactctgtctcaaaaaaaaaaaaaaaaaaaaaaaaacccacaaaacgaaagtttagaagatacattcacaaaacgaaagtttagaagatacattcacgaaactattccactgtaggatgcttaagatgatttatgaagtaattctaaaagctggaggaaatgtgtgtaccaccaacctattttgtttttgacatcagctttatcacaaagctttttgattcagttactctaaaattgtatataa

SEQ ID NO: 96004 - DNA, 75720 bp, Homo sapiens
  misc_feature (1)...(75720): n = A,T,C or G
atacaaaagtttattacctcttccttcctcttccaactcaaagatcatcaaatccaaattattcagatgttattataaaatgtagctatccagagacatggaatcaacccatcagtggcagattggataaagaaaatatggtgcatgtacaccatggaatacggtgcatccataaaaaagcatgagctcatgtcctttgcaggaacatggatagagctggaggccattatccttagcaaactaacgtaggaacagaaaatcaaatactgcatgttctcacttataagtgggacctaaattatgagaacacacggatacaaagaaggggacaacagacactgaggcctacttgaacgtggaggatgggaggagggagaggttcagaaaaaatagctattgggtactaggtttagtacctgagtgatgaaataatctgtacaacaaacccctgtgacacaagtttacccaaatagcaaacctgcagatgtatccttgaacctaaaagttaaattaagataaaataaagttaaaaaataaaatatatctatcaatttaagtttcatttagtttggattgtcaaaaaaaataaaagcaacatgagatatgaaaattgtcacttttttggagaaacagtcatttattactgactctccctataacagaaattgaggacatttctgagaggtaataacaaaattatctattctaagaatgaactgagaaaactgggacttactataaaagtaataataatcattacttatcagtctattagcatgttgtttacatgctgcacagacttcatgattaataattaatttcttttatctcaactattgacttgacataattttttggcccataagtggagagttatttgacccgcctaataagagatgtagaaacatcatagaacaatagttatcagcatctttatagtcagttttaatgtcataaaacactgttttagccagattatttgtgaggtgggtcacaatttgttatacataggagttaaagtatcaaaatttgaaaattattttaaaaataagtaaagcaggtgcaatacgtttttactcagataatatagtattaatatgtgtgcttctttgagtcaaagaaaaagggtaagtttctagctattaagcagagaattgtatgtaaacttcaggctatcttatctgtgcccaaactgctaatattagtacttccatgagagttcatcttttagatgaataacattgaaaatgaaatgtgtcatgtgttgtggaaaagggttttgaacttctaggcttaaagagagcaagtagcacaacgatctctagttttgtcccatatgggctatgtagataccaaaggaacagctattcctaagacagacctcactgatattgcatacggagtgagtgctgaatcacccataagcacaaggcagaagcaaaattaatcttctctaaagcaatacactgatgcctgaagcctcaaactacttacaagtaggttttttttttttttcaactaccattttgagcactcaaagcttaaaatgctcacagggaaattagataacataagtgtctacaaacgataaataaccatcaaaacaaagccacagtagaaattatcagacacagaccgtaagacattcatgtttattatgttaagtaataaacataaacttgaggattttggcaagggtgctggaaactaaaaatattgtggtacatatgaaaaataaaataaaaattccagaactaaaaaattgcaataatcaaagttaagagcataatggatgagtttatcagctgactagacagtagaaaaaagaattgggaaattcaataatacattaaaatacataatgcattaacataactatccatagcgaagcacaaaaggacaagcaatgaaaatacagattaaaggataagagacaagggaagaaaccaatctctattaagcaacccaatgatttcctgctaggatctataaaaataaatttttatgtagatacatcttagtgaaacgacagaaagccgaagactcaagttaaaagataaagattaaagactagactggattttaaaacgttcaacagaatgctgtttacaaaggccacataagaataaaagaaagttgaaaccaaaaggttggaaatgatataatatgtaaatgctaacctaaatataaaagctaatagtactatcaaataaagtttaaggcaaaaataattatttgcttcataataataaaagctttagtttaccagtaatggatagcagctttaaatgtggattgttccatatagatagaaatgctgaagaaacagacaaataccaatcacagcgtgagattatttaacataacctttttcagtaattgacaaaacaagcataccaaaagttagcgagaatacaaaagttttgaacacatgattaataaacttgacctaatggatatgtataggaaaatatatacattaatttcagaatatatatatatataatatatatatattctgaaatacttgaatatatatatatttcaagtacacacaaagcatttacacaaatttaccactttatggccatacaatgagtcttaacccgtttcacatgtttgaaaatctatagcacatattagctggcctcactggaattttgctaaaaaccaataacaataagaaaactaggatgtgccatgcatttggaacttaagaaataaacctgtattccaccctgtactggaggtactagccagcatggaaagaatcattcaatcagtcagtagcagggggagagagagagagagagagagagagagagagagagagagagagagagagagagagagaaactaccatgattgtggtgaagagaaaaatccaccattcagtcaacaggaaagaaagacaaaaaggaatgaaggaaggaaggaaagaaggaaggaagggactgtcattgcgattgggtgaaaagaaaaatcaaaaaatctacagacaaaatcaatagaattaataacttttgcagtgctgctgcatacaagctcacaaaatggaaaataatgtgtttctaaatactattaatagtagaaaatgaaatgaaagatattatttacaataaaatttaaaaaatcaattacctaaacataataataggggatcaaacctctacagggaaagaatataactttgtaagccttggagatgacaaacagatggtggggaggggcatatcatattctgaatggaaagacgcagtagtcaaaatagttattctttccagatagatgtataacttcgaagcaatcccagtcaaaaatcccaaccatatttttattttagggatttttaaaatggaattaacaggctgattctaaaacagatggaaatacaaagcaccaagaatagtcaatacattattaatgaaggacaaggtgggtgaattgatgaagatattaaggattgtattaaagctattgtaatttggctttggaactggcattagtaggtatagtatgggcagtatagactatatggaatgaaatagaatagaaacctggaacgagacccacacatatatgaacactggacctacaccaaaggcaatgcgggaaaaggaaagtcttttcatttattggtacagggaatattgggtattcatttggaaaacaaataaaattttgacatctatatcacagcattccaaaaacaaaaaaactaactccatgttgatcatagacctaaaaatgaaaggtaaattataactattttagaagtcaacatggaagaatatcctcatgacctcaagattatacaaaaaaagtgataaaacatgacatgaaaaactctaaccacaagggaaaagaatgtattaaatgaagaatattctttcatcaaaagacaccactaggaaagcaaaaaggcaagccacagagtgaatgaaatgttatttgtgacatatctaagtactaaagttcatatgcaatgggactcaaaaaaggaaaaaaaaattcccaccctccccccccaaaaattaacactacctatacagaagaagaaaaagaagttgtgaatgaacaggtaaaaatgtgctcaacttcactgataatcaaaggactgcaaattaaaagaacactgaaatataaagcacatctaccagactggcaaaaattaaaaattcttggcaatacatacattggtgaggatacagcagaagacaaattttacacattgtgttaagtaaaagctaatgcactactttggaatgtaactttcgtttattcagaaaggttaaaaatatgcataaacatggctgggcgcagtcactcacatctgtaattccagcactttgggaggctgaggcgggtggaccacttgaggccgagttcaagaccagcctagtcaacatggtgaaaccccatctctactgaaaaaatacaaaaattagctaggcgtggtagcaggcacctgtaatcccagctactcgggaggctgaggcaggagaatcagttgaacctgggaggcagaggttgcagtgagccgagattgcaccattgcactccagcctgggtgacagagtgagactccatctcaaaaaaacccaaaaaacaaaaaacaaacaaaaaagcataaacagcatatgaaacctagagatactcatacatatgtagatgacattgtatacacaagagtgtttatggcaacaccattattcatgatattaaaaatttggaaacaccccaaatgtccatcaacagcacaatggacaaataataaatgacgataaaaatgaatgaactggaaaaacatgcaacaacacaaatggatcttaagagatataatattgagaaaaagaagcaagttgtaaaaaaataaacagtataagttcatttataggaaagttcaaaaaagtcaacactaaactattttagggatgcatctatcatggtacaattatacataaaagcaaagaaagttggtatggcagttacctctacgaaggaggggtgattaacagggggcacgttagacttctgggattctggcaatattctctctctgcacctaaatggtagttacatggatacttgctttacagtaacttattatactgttcatttgtgttatagttcataatttttaaaagattttttaacaatgatacatattgatactgaggaattgatacgtattctctacatattgatattgaagaattctcaagctatatgttgtaaagtgagaaatatgatgtggaaaaagtttttaaatgtatgtttaaaaagaaaggaaggaagggaatgagagagtgagagaaagagagagagaaaaggagagagaggaagaacaagaaagacataatcaacgtgtagaagaatacggtaacccacacaccaaaacagttgttgtctttgggcaggaggaataggtggccaagggtcaaggttagcaggattactattcaccgtgtactcttttgtgtctttaatttcatgccatgttaatgtattacctattcaaaataaataaaatacctaatcatgcttatccacaaggggtcactattgaatgccatttaactctagttcctaaccagggaaaaaaacgttctgaattctttatgtgcttaacaggaagtgaagaaacaacttcatttatgttcttattttacattacaccacatcatgttccagaaaacaattgccattcgcaaatcatgcacaaaagtataacatttaaaacggagtgaaaaagacaaaaaagtgaatagataatatgaagtcgggaatgagtttacagaagcgttgtgtcagtcatctcccctagtggtaattagactctaaattttcgattctaaaattagattctaaattttctagcatctgggctgaaaaaaaaaaggggaagtatggtcagttacacaattcaaaatgttgatcgggagaatattaagaccttgcagagaattttccctggtagagcctgttaaaaacaatccatgaggaccctttagatgaaatttttgattggtcttaaccacaaaaatgatccacagatgaattatgaaaccatgtcatcttactctctaagggaggtataagatgtttttggacttcagatgagamgggctccattcatggttaatcatgaatgaaaacgaaactaagaatatatgctgtagaaaaagaagaagaaaagccacaagactgcttaaaaatttctgtgtcttacacagaagatagaaaaaatagagtgtctccaattggatggattttttaaaaaatttggttattgtaatggatttattttttcttagagctgagctgattgtactttggccaactaatgggttaatactgtcaagggaaattagccctgactaaacattgccgctggctcatgaatgcactagscttggggcagtataaaaactcagagaaatcagtgtgtaggagacacagaaatcagtgtcactcagtgacagaagcaacaataattgtgaaaaatacttcagcagttatggactcatctgtcattcaaaggaaaaaagtagctgtcattggtggyggcttggtaagaattttcagatggattactattgttggtggtattatattaastattattactcgtratgattattattcgtcacttctgcaaattgttaattttcttgtgaaaactctgatatttaaatacagctattttgtttatttttttaatatttttattttcatagatttaatatagtatgagttttaatctgttctttttcaggaaaggtattttatagccattaaatacaaaggtttctgttttccctcatcattttggtttaggatttgttaaaaagcaaaaataatgcaaattgaatttgattttatccccaaattggctatgtttttaggaacaggaattagtctcaatattcattttaataaaaacatttgttccgctttgtttaataactcagttaatgctgtctaatgagaataaaagggtcaagaaacatgaagctaacgtcaaagtatcatgttgaatgttcactagttatatgagtaattgggaataagatttatgtggtcgcctgacttacttgactcttccagtggagcacctaagacagtggagtgaggtgttcacctctcactgagcacgtgacgtaaaggtgctggggcttcccccatacctaacaagacggaaggagaggtcactctctgctttcatagttatggtgccaaaggtagttctgtttaacatgggtctgctccgattcaactttgctttttcccatctcagcagaatttctgtttcagaatacaaacatcccagttagtcaaggttaaatcatttccctatcacctttggtcaaatcatttggagacttttcattaattattcatatatccactcaacaaaaaatttattgagggcgtaacactgttctaggctgaatatagatggtatattttatgccacacatgtatttatacagtatatgctgtcttttgttctgccttccttagtgtcttttccccaaagtgctagaacagttcttttaatatttctgattctaaattttcatttagaaatgctatcacatgatgtgttggtcactggttgggacatgtgtcgtcactgcttcatactaggcttgtgtccaatctgtcctatcaaaatgttgcacaaaatgagaattcatgtgttcaacaaaatctgattactatgtaccaatattgttttaggtagtagggatgcgagggtgagaattccagagaagaaaaagacaaggaagaagaaaacaaataagacaatttcagttaaagagaagcactatgaaagaaacgaaaacagggtartgctgtagagagtatctttgggagtacctgtttagaatgtggtcagggacagctgctctgctgaagggacatgtgaccagagacctgaatgatcagatagaactaactacgtgaagatcttgagaaagagcatttcaggcagagggaacagcaggaagagaaaccctcaggcaataatgagctgcccaagttcaaggagcagaaagaaaggcaggaactgcctgaggccagagaagagtagctgatgaggccagaaaagctgacagaccagatcttgtaggatcttagaggtccaggcaagaagatcagattttgttcaaattacaatgggaaactattggaggattttaggcaggaaattaagttgtgattttaaaaggtcccttggaccattatgtggagaatgactaggaacattttaagatgacaagatagaccagttaggaggctgttacgttagctcaagacttggactaaggtggcagcagtgatgtctcattttaaaaattgtctcttagaaatccaagggagagataacaaatatgtgattgtatatatggttttggggggcataaaaatgtgggtgtcatccatggatttctccctgaataacatgagattgtcatcatgtaaccacgtcatacatatgctggaaaataggagacaaaaattactacttgcgtattagggagcaactaaaattcctctgcaaaagaattctatccatcctattgttcaagtccatgcttacgcatcatgtttgattcctattgtcattttgtgcaaacgcttattcttctttcactccatcagtaagmcttgaggctctatatccaaaatacatttaaattctagccattacaaccatcctggcccaagccattatcatccgccatccttattcctgcaacaagctccaaattagtctcccagctttaactccttttcccttatagtccatactacacaccacagccagaaacacccttctaaaacatgagtctgatcattatcatcccctgcttaaaatcttccaatgatctcccattacaaataaaataaaacccaaactctttaccaaaggtcttgtctgaactaagcctatctgcctttctggcttcacccctttccctttttatttgttaatcttatctaccagtatcggaaattacacactttgggtttttttttttaacctgtttcttagatatctactccaactaggatataaactcttattaaccaatgtattccagaggctgtaattatgcctaacattatgtattgggtggatgaataaatgagaggaatgagaaaacttaatgatataaaggtgaaaaaataataacagatgcatgtttgaatattgagaaaattatttttaaaagtattgactaaatagagcaattcaagaaggttaatgtctttacatagaggacaagattacatttttgcccatcttcttctgtttttttttccaccctcccttcctacctcctcctttccataaaccatatcccagtaccttatactgtctaacacattaaaggctctcccctggcccctagaaaaaaaaatgasagttgagaacctttacttagacatccaaaaaatatagtgaacttccctcaattcttatcagtggtagcttaccatgtctagtaaacttgcctaatgaaaagtcaccctgagaagttattmttgctctgatgtagtgatcatctgatattgggttaaaccagttgatttcctttctttgaagacatgttcagtcaaagagatcaacaaaccagtaaaaaaactcctaatgagaaacaaaaggtaaaagaaactaaaccataatcataaaccaggtaaagtttaaatattgaaaaacaagtgggaaaagatgttaaaatagcatttcaagaacattgacctaaatatttagaaagacccctgtattgactgatattttcctccttgtgtgaattacaactcccccatcccttctccagccaatgggattacctcctgctagttccagaaggtaactgcaggacaatcaacctgtgaaggcttctcctctctttaaatgcccacagggctttgtttgtcattatcaaatgctgccttctattaaaattttgttatgcatagtttattccccatagaagctttttacttcgtagatctaaagattattttatctttggctcctgctacctttataaaggtttcccagtgccttataatgtgagccacactaaaatattytctgtgcatgagtttgatttcagaacaaagtggagaatcactcctttagaagttatgggaaatttttaaagagttttttttttaacacaattatgtcatgaggaatgtagtcctttcaatgagtaacttaaaaaaggatttggaaaataatctcaattttgcatgctggaaggagttctacagtgtagcttttcaattctagcacatcatttcaaaaaaaacctgcattacaaaaaaactgccatacaaactgccttacttcatgttagagtgatatgttttcttttctttatgaagtgagagagaagtagacaagccagagaagtaaacaaaggccatctaagctaaacaagtgtccttaatccacatctgaattcagtccttaagactcagaaaatactgcttttgataactgttttcagtgtttacaggtatgacgaaagtgatcagagcaaaaaggcaccatttcagtgacagctaaagctactcaagacmccattttttgactgaagccaagagccttggtaagagggctattaagcattccagtctcagctgactcctgctgttgcaatgtatgtccactattctmgcatgtattttggagatgtattttaggatatcattcaaatatttcttctgttcctttctgcaaaaaagaaaccccactgtagagagctttgtgatctactctccctatgtttgacccaggaaagttctccatttagtagtatttagagggtgaggagatttgtacgtattttgacttattgttgataattgtgccctgccccctggaattcaagtcaagtcagtggcctctgctgatgaaattgcttttgaggcaacttgaccttgactctatgagagtttatgtctcacagctatagatgttaaatcctgtcatggatttataggctcaaaatggtcttgatgccaaactgtccccaaatggtgtttctgttctgttcttcttaggatttttccacctcaccacttactcttcactcagcttcatgggatggaaaaarcattattcattgaggggactgggaatagcagagtttgcaaccagctggacackcaggaaatcttaccctatgggtctcagtttcttcctcttggactaaaactagattgctagtcttttaacactaaaattctactgcttctttttcacactttctcgctcacagatctctagctttgttctcaacctactcctttctaaaaaaagaaatcaaatgtcacccagaattttcactttccctgaagtaaacgtcctcagtgcatatgaaccatcaaatggcttataatcctgggttgaggtctacacagaatttgattcaagtgcatactttatattttttgcaaatattaatgagctataccatgaaaaagacataattactgttaacctttattgttattattttatcaatgtgaaaataaactaagctctattygctctactcttgttttgataccaaactaggcttgttctgcccagcatgcagtaagtcagttactgagataacaagtgtattaatccgttttcatgttgctgataaagacctacctgagactgggcaatttataaagaaaaagaggtttaatggactcagttccacgtgactggggaggtctcatgatgatggtgaaaggcaaaaggcatgtcttacatggtggcaggcaagagacggcatgcaggggaactctcctttataaaatcatcagatttcatgagactcattcactatcacgagaacagcatgggaaagacccaatcccatgattcaattacctaccgctgggtccctcccacaacacatgaggattatggaagctacaattcaagatgagatttgggtggggacacaaccaaaccatatcaacaagttttgcagtaaagagaagattttattcacaggacagcccagcaaggagayggaagaacagctttcaaatccacctctccaaagatagggcttagagatatttatggggtaaagaagcagggtggtctaaggtgtggggaaggtgattagcagtggggaaaaatgaataggtggtctgagcatgcataatcaaggttcatgactcttcataggacacatgttcagaaaatggtggcattagcatgctgtgaaggtgaggtttttggccttctggtatcagaaagtcacttcttgggcatttgtgcaggcccagttgaagggcctgcaactctcttctttccttcttctatctgctttctcattctcctattatccttactccatagtaataaggcccaggagtcaatgggcaaggtagaaagagggttggtggtctctttcaagtagtttaacttgggtaagaacacctagttcctgaaaacaaaaacaaaaacaaaaactttaagcaactattaccatagtgacatacatgccagagacgttgtctataaggaagctagtgacagattagatgtatattgtttggctacatgacttttagctatatgggctttgagatcaactagaagtaagcaataaaaagcaagcaaggcaggctgtttggtgggcctcaccatgttagacctgggtttcagttttctatttcataggctctgagccttcttaaatatgaaaaactctcattagtggcccatatctagcaccttctaaaaacagaggtggaatggatttctttgtggctgtgcctcataaatcccactctcacctcagggaattcatccctcagagattccttcatttgctatctggtgggaagtatctggaatggaaccaacaactttagacagctccagactttgttaagtgcctacaaagagtgtgtctttcattccttctcatttggcgcatcctcctcccaaatactctcagattatttcccttctgtccatattcactcatgcattcgtctagtcctctatctgtctactcaaagaaaaagagcaccctcatacactgttgatggtaatctaagccggtatttttttcctggaaaacaacttgaaaatatacacatctgtagtcttaaaaatagtggggatttggctgggcacggtggctcaggcctgtaatcctagcactttgggagtccgaggtgggtggattgcctgagctcaagagttcgagaccagtctgggtaacacagtgaaaccccatctctactgaaacacaaaaaaattagccaggcatggcagtgtgtgcctgtagtcccagttattcgggaggctgaggcaggagaattgcttgaacctgggaggcaaaggtttcagtgagctgagatcgtgccactgcattccagtctgggcaacggagtgagactccgtctcaaaaaaattccagaaagcagcaatagctacttcacccttgaagttggcctaagcatggcattgcattcagagtaacaactgtccttcagccaatgagaaattaaaagcaaatagaatctaatgtaggctctcaaaaacatcaaatctggagtgtattcaaaactcccaacaaaaccttctgaaatgatattgccccagtcaatctgaatctctttcgtgtgctttgcagttattccaaaagcaagacaaaggaagattgagcaggctcctcttacrctctagaccatcaatattctctccscagctcacttcagactctcttctttccctctttgttttctcattcccctgttatccttactccattcccccactagtaataaggcccaggagccaacggggcagrtagaaggagggtgtggagctcggaattggccagtgtttcaatcccttttattcaaaattgccctttggtgggccatttcattagtgagattttatcaaaagaaacgtgtatgcgtcatacaattgtctataaygctaaagaattaaaataacttgaatatccaaatataagcacactgcctacaatcaaatgtaatgcaagtattaaatgcttttacttcagacatcttttgacgtggaaatgtatttagagtacacttttcattttttgaaagaaattatgaaagaaaatatacaacctgttaccattttgaaaagaaatatcatgtattttatatacatagaaaatgttaatattggttgccattggtggtaaaattgtgaggaattayttttttcttcacatttacctgtattttctaattcattagaatttgtggtttatatcagagataaaaagacaaaatayaagccatrcaaatattattcctctctgggaatttactgcctggtggaagtcagacaagactataaataaataattcaatgtacttgagacattaaaacacatctatatacatatatatatataattacagaagaaaaggcaaacaagtcttttggaggagtagaggtatcaggaaaaactacactgaggatatgagtcttaaaggaaaggtaggcattttccaaaaactgaatataaggcagggaaggatagtattcaaaggcatggaagaataaaagtgcatggcatattcagaaaacatatagtaaatttagtatgcctattacagatggtgcaagagaatagtgcatgagatagtgcatgagaatagtgcataatgaactggagaaagaggttgggatcacatgtaagaatccattatgtcatattgaaaatttggaattttttcctgaaaagataaggagctaataaacaactgtaagacaaaaataatcattcaacatcttatttagaagataattagtgattgggcatgatggttcatgcctataatctcagctgtttggggggccgaggcagaaggatcacatgaacccagrggtttgagaccagccttggcaacatagcaagatcctgtctctacaaaaattaaaaaaattagccaggcatagcagcacacctgtaatcacagctacttgggaggccaaggcaggagatcacttgaacccaggagttcaaggttgcagtgaactatgatctcagccttgcatgcctgcctgggtgacagaacaagamcctgtctaaaaagaaaataaaaagaagatgactagttctagtgcagagtacagattgaatgcatacagactggggaaagagggttattagaaaacggwtgcagtagcctggtaaaagctaatgagggccccatgtaaggacagagctgtgggtagcagaagatctgctgtgagagagactgaagaggaacaatcaataggacgtattgcctagcttcatgtatactggtaggtagagaggggtgttaaatattcaccgagctaccctggttgggtgaattagtgaatgcaattgctattctctaagatatgaaatatataaggaggaagaaagtttatggaatacagaatacagaagaaggagaatgagagggytgaggaatgggaatawgtcaamttttagctatgttgagagggagatgcctatagacaggttcagtagtcacagatggagttcaggacgaagatcaagactagagtaaaagtcataaattttcttaagagcactcagraatgtgcatcattcaccttctcataagagggaaaatcaagaccactgcttggctttagagatcaattccagatgacacagattagagaactcagggtaaggattaaataataaaacaatatttggcataacatatgcaattctggaagatgtaatatttactaacaaagtatgaagacactgatgtgcttattgcattgtaagtagagttaacagtctgattcttctcattgcattgatatacccaaagatcaaaatcttgagacgtcaaactatagtttcatgaccaaatatggatttcaacactattaacaagctttttaaaagttagatagacagaaaactcagaaacattcatgattcytaaggattagggaaggtgttatacgcttcattaagtcaaaagtagttgacamatgtttaatattgcactatcagattaatttcaaatatattatatcaaaagacataaaatgtacggaatttttataatcctgtttcctcttcctaataggatcacagtttttccctttccttctttctttttatttttttgttgcttatcagttcaatgtaagattcaagggtcaacatttataaatttaaatggtttacagttttctcatgatcattggctacttgaacaattgctgytagaggggtcacatgggaactgacagaaaagctcagcaacggaagactggagaagcatacctcaacatttatagaaaggaaatattcaaataatatttttaagtggtaggttaggcatccctatacagcacatgacctgtaaataaggaagtatgacgagacagaagaaagtggagaagcgagataatgatacattgggtaaatccayaattatgtaaccaaggamtgtcctcaaagtcttgtacacacaaacaggytagactggttattcataaaaatgtttaatttgcaaaattattttgtgagcaaacatctcactatcgtgaacgtttggtgcttcgaaacaaatacagaaacttttcataattgttcatgtccttactgggaacagtcctgtctctattaaggctttaccctcagaaccagaatcaaaaaatagttttgtttctcccagctgtctaaccctgcccaatttcttctctcctgtgctrtcctccttcactatttatgctcagsaacccagctgtgccttaaccaagagtgtgtggtgcgcttagcatgctttacacaccacattttctttccacttatatatttctgtcttagtccttcctgccagcttaacaactcaagatggcactggcagttattcccaattaagcactttttacagaaagtgagaggggaaagaaaattacagtctgaaagctatattgttagccacgcccwttactaccccttctggctgaaccgacgtaacacctactattgtattttttctttaaatttatttgaacctccgttacacagaattgcggtcatatttatacgagmtctatttccttacacagtattatgactggtcttggagaaaacacttttacttccttgtttgtttgtttattaataataataacaataagcggccatgaatctactactcaacacaagaagtgacagagtgccagtgacttcatcaactctgtactcgtcccccacccattagaagcattatgycaagtcttatttgtcactcccttgcctctttatatatagttttatcctatattatttacatatttatctcatgtatacacgtacatatgaatactacttatgtgtttcaaaaactatgtatttgcatatgtctatagtttagttctgattgttttcattttgtatcatgcagtataaaattatctgagtcttattttttcacttayagtcttgctaatatattcatatcatatctcactgtgtgaatatgccataatgtgttcgttcattccwctctgatagtcattcgggctattccccgcttttttgtttgtctattttagttatgaaaggcactacactgaacaacctggcacatgtcacccaatatacatatagcaaaagtttctcctgtgtatatgcctttaagaggaattgctggtttgttcaatatgtgaatatccaacttgaaaagataattacaagcaatgtgtaggagatcccattaggcctcatcttctctagcacttaatattttcatgagcctaagttagatttaatcttaatgtgcccacactacccgagatccyttattctcccataaaaacaattaatacatgttcagttggcaaacacgtaagcgttggaaaggtatgaattggcatctgccaaccttagaartattgaggcagaatctccaccttggtcagccctcctcctctgagatcctggaatcaattttcatcaaagaaaaagaamgtaacaaacccatgcaaccagaccattggcccatcattggcttagagctgatcctattccaacacagtcactgagagctttgtttgcagcattatatattgtagctcctttactgtggttgaatttttaggagatggatgaatggatttcttgcttctgaatcccaggatctctccttttaggccatttccctacattagattttcactgatcacttgttgtttagattgtggctttagtgtcctacttgcctttctccctacctgttttctcagtaagagagactyatttctattaggttgatgcaaaagtaattgtggttaacggtaaaaaccrtgattccttttgcaccaatctaataaatgaacctcctgtgtcttcattccaactctcacgacctgttgtcttttgtgataattgacttcctaaaagaaagaagcagaagcttctggacaagttaaggactaygcttggaaatggctcaagggtaacttctactgcatttttttggtcaaagctaccacaggccyttctagatttaagagattgtagaaataaaccccatgtgttgatgaaggagtatcaagatcacactggagaagagcatgtaggataaaggatatcatcatgaccatctttgaaaaatacaatttgccacatttgtcaagaaaaaattaatctttttcatgtgtgttttctagaacttgacttattctttttgttttttacattgatttttacctgtgagcccagggctattttgcaaggggtctgtgaaataacatgcctacaaaattttgagtaagtaggataaaattatatgacttaaacacataattatttttaaagtatatgtagatgatttgtgactaaatttattatatatttttaaacaatccatgttagaaattcaaataatataaaagaatctgcaaatttttaatgtaaraagtgggcctccatactcaaaagtggttcattaaacattgatacatttatacctttgtctctttttactaaatagggtgtttactgggcacaaggacttatcttggtaacctttgagtccctaaaatttagcagattaagttatatttagtaggggctcaataaattttggcttcacttggttacaaactttacttaaaaatgtaatctctaccattatttatacactgaacaaatatatatgaagcacttactatgttacaaacacaatggtagatgctaggaataaaatggtgagcaaaacctgttgatagcttagaaggacagacagatattgattatagaatcactctaaagatgtaaattttctgttgttgtaagctctttgtattagtttgctaggcttgccaaaataaataaatcaccacaaaccaggtagcttaagaaacagaaatgtcttgtctcacagttctggtgctagaagtccaaaatcaaggtgtcggcagggttggttccttccgagagctgtgagggaaagatctgttccgggtccctctccatggcttgtagatggaagtcttctctctgtgtctcttcacatcatctttcctcaatgcgtgtctgattcccctttttataaagacacaagtcatattggactaaggcccaccctaatgatatcatcttaacttgattacctatattaagatcctatctccaaataatgtcacattcttacrgtactgggggttaggacttgaacatatgaagttggaaggatgcaatttaccccaaagataaagttcaaagcactgtgagaactcataattgcaggatttgaggwagggtggcccaggaaatctttttttagagagtgaagctgagtggagacctggaggatgaawggaagtttactatgtaaagaagaaagataacacttctggccatggatataatacacgctaaacccctcagcaaggggcagcatggcaaatacaatggctaaaagaaggatagcaaggctggggcagaagggtgacatgatcagatttgtatattttaaaatgtggggaaaatctgaggcytatggtgatgtcattttttttccagagaggatttatgtttgtttctgttgggtggctgtgattaccagcaatcaaaaattaatgcaatctgatcaggactagagatgatttccagacaggcccttggatcattggtttccttccagtttgcccttctcctgggatgtacctgtttagggtcctgatctaaaacataaggggtttatcagaacctgccctcctgagcaaggggtgcgggagtgtcccagactccaaattttgtacttctagtttcatgagtctgtcaaaaattctactgaagtcctcagcctctcttgcatttgtagatgcctgtaggcatggctccaaatgccaggtcatctctctgcgtctccttttcctctcagtagaggtattagttcaaatgacctattacaccatcaccctaaattactgcttgtggaaaataaattggaaagaggcaaaatgaatgctggtagaatacacagaaaatttgatattagttaagcataatgattccaataactagaggcagaaaggtgaaaatgaaaagagatgggtagatggaaaaacattgtaaggtagaactggcagaactgggaatggagtatcaaggagagacggtgactcctagctttctagtttgagcaactggatggatggcatatcattcacttacatagggaatatgtggagagaattgatgagatgggaggcgatgatcgcaagtttcaattcggatctgttgattttgaggtgctttgagacatacaagaagctgtatcacttaaacatttgcatgcatgagctcaaaaaacagatctggataggaaatatacattttcacatcatcatggatggagaagacagacttggatggagatttgagaaactccaatatttgtccgtctttgcaatggtgaaagaggaaaagtgggactggccagagacgtatgaagaaaaccagaaaatgagagaaggttaatgtttccagaaggtttagttaacggtattgactattgttgaaaattcaagtgtgataattatatacagatgactttaccaaatacaggttgccagtgatgaggtagtaaactaccacagcctatataaagctactggtagggcaacactctaaagctttaaaaagacaagagatcagaaaaaattcttcatgatctcagaataggcaaagatctcttgaacaagacatttgtaattgcattaaaaataaaatgactattgtaattgcattaataataaaataaaagattggtgaatatggttacattaaaataaacagcttctcatmctcaaaatagactatagcatttaagaagcaagacacagaatggaagatatttttaatgtttaaaaatgacaaagactctatattcagactctatgaacaactaaacaaaagaaaaagaaagaaaagaaaaaagataggcaacccaatagaaaatgggcaaaagatctaaacagacacttggtgaaagaggagatccaaacagccaatcaatatatgaaaaagtgctcactgcactccagcctgggtgacagagcgagactctgtctcaaaaaaaaaaaaaaaagtgctcaacttctttagtaattaagcatatgcaaagtaaaactacattcctctccracttaccagctcccaccctcccactccacaataatgaaaagtttgagaacatcaagtgctggcaaagataaattttcagaagctgctggtgttacaaccaactcttgaaacagtttggcatcagaaaagtgacggtacataaacttttgaccagatattccacttccatgtatagaacccttgaaaaaaagttatcatatatgtaccagaattcctgcacacacacacaaatgttatttgaagcattgttaacatattcccagaccagaaacaactcaagtgtcctttgacagtagggcagataatctgtgatctttcatttaatgaagaatcatatagaaacaaaaaaaaagatgaccttaagtttayatgtaaccatataaatgaatcccacaatgttgccttagagaagcaagatgcaaaaacaaacaaaacacacacacacacacacacacacacacacacacacacagtgtgattctaactatagggttttaaaaaatgggtaaatggckgggcacagtggctcatgcctataattctagcactttgagaggccaaggtgggagaatcacttgagcccaggagtttgagaccagactgggcaacatagtgagaccccatctctacaaaaaaacttaaaaaatttttaatgggtaaaattaaagtatattgcttagaaatatgtatacctaaaggctaaaatgtaaaaaagcaagaatgggttatcacaraagtcagaataatgtttacgtctatgtgaraggaagaggactgtaactggggaggaggtggggggagttttggaggaatgacgctattctactttttgaccaaagtagtggttataagggatataaggctataaagaattgctttctaattattctgtaagatatatatgttttatgttctttctgtttgaaaattacctcactataaaaaagtaaaaaaaaaaaaaactacttctaaaatcatattacttaatcttgaataaatattgctatttttgccactgatacttttcagcagaaattgagtaaatcaatgtgataaatgaggctggtaaaatatgaccacacacaatgtgaggctagtaaaacatagcctcacatgatgtttcattttgctgctaaaaattccctatatttgtggaatcagataaatatttaatttttttttaatttctaggttggrtcattacaagcatgctttcttgcaaagaggaatttccagattgatgtatatgaagctagggaaggtacgtccatggtgaaaaaagcaggatgaacgctgggcacggtggctcctggcactttgggaggccagggcacatggatcgcttgaggccgggagtttgagaccagcctgggcaacatggcaaaaccccatctctacaaaaaatacaaaaattagcctggtgtggtggtgtgtggtaggaggattgcttggacccaggaggcggaggttgcagtgaggcgagatcatgccactgtgctccagcctgggtgaaagggcaagacccaaagaaagagagagaaagagagagagagagaaagaaaaggaagaaagaaagaaagaaagaaagaaagaaagaaagaaagaaagaaagaaagaaagaaagaaagaaaggaaggaagaaagaaagaaaggagaaagagcaagaaagaaagagagaaagagcaagaaagaaagatgaaaagaaagaaagaaagatagaaggaaagaaagatagaaagaaagaaaaagaattgcaggatgtggttctaattctttgacttttctttagattttctgaacttaaaaagtttctttaataaaacgcttttcttaaaaaaactagttttgtttaaaaaaaaacaccaactatctaaatttaatttaatataaagttactgctattagcattttctttagaagagttaagaagttctttaatgtggttccgaatgaaccagttgttcagatgcagtaattttgctcatcctgagctaggatataaagtgtgcgtaacatggagtctgcttccaatgtctcagatactcgagtggctaccttcacacgtggaagaagcattaacttagccctttctcatagaggacgacaagccttgaaagctgttggcctggaagatcaggtacttaatgtatctttcttacagaagataatacctggtatttttcaacaattgcatggtttgatttcatcctggcttaaaaagtaccrtttaataccaagaatctctgcatgaaaactcattctactaaagcttttaaaattcgaaatttggcaagagggtgaacattggacactcgaggcacccgaggaggaccctgcaaccggatgattgcttctgatattgggttctcaacaggatggtgcgtcactgcctgtagaaagtgagagtcaagatggcatccaggataaaaggagccagattccttttttttttcaattgcacaggcccgtaatatcttatctacaattctatactccaaaaagactctgaaaatagaaagcttctcatcactcattgagtagcaaaatctgacttgacatgagactctttgtagtcttttaaaaatctcatttagcataaatatgttttgctacagaaattttgtgtttgattatggggcgggtttatgtgatatccagcatatgtgtactacactactttctaaaattgaaaaattctgaattctgaaaccatcaggccccatgggtttggataaagaatggtgggcctgtagtagattttcatcatgtgagcttaatgttgtagaacttttcactgtctatgttagcttggtaatataaacagacatgatagatgtatttttcttgatactactttcagtgacaatgtgtctttgagctgacagtactagcaaatatgagtgctatttgcattcctattattttctcccagatagcagcagtcatgtgtaagaaaacactttgcattgaatgttaggaaccctgggttttactcctcataatctccctttttgtcatgatgagaaaatcacttaacctctgtaacaacaaatcacttccctcaatctgtgatattcgatttagatcagataaattttaagccggttctaagatctaagattaaaaaaacaaactaaaagcttcaggatcaccattttcattgaaggagtttctaccacgttgggcttctatggtctttcacaatttttaaaatttcttggagaatatatgaaattacatttaaaaatcaacttctatctttcttgcataatgccatgttactgtcattgaagtcaatatttctggtttcatttcagattgtatcccaaggtattcccatgagagcaagaatgatccactctctttcaggaaaaaagtctgcaattccctatgggacaaagtctcaggtaggtttaccccggagatcattgtgcattgattataaggaagtcaaagtctggaacttgcctcttgtttgatggcccctctctctccagccctatctctgacattgcttggctcagtctagaccccaggaatacagatactagttggcaagtttattcagaggagatgctcaaaacaagccccagcccagaataaacattcaggaagaattagctgttactgctcttattgtgtcatttcttgcctttgcgctgccctgctacctgggacagcctttccttcttttctccttttcaattaggtagagaagatgactatcttatttgtcgtcaagcataatgtacaagaacaatctagaaggtttcatgatgttgttgcccttccctaactcaccctcttgctcaaaattgggcttataatagaatgtatggaatgatccagaaatgctttgagtactacatgatttctaaaagaacagaggccagatgaagatggagagtttatgaaaggagactcattatcctgctctgtgctttccctatctttcacacagtaacacacagaacagggggaaatatgtatttgtattttatctaattagaccttctgattctgtttcttgagagagaatgaatgcaccaaacatccatcgacaacagaaaaactccaacttcctttatttttatccagccatgcctccttttatgaagtgcagcgtctgagtgagaattcatattcttctaagtctctgaccctcagcagagctctcattgaaactagacctgtgcttctcatactcacccgggatcctgttaaaatgcagtctgattcattaggactggggtggaggcggaggttctacgtttctaacgagcttccgggtgtttacttctttcactgagttgagagtgaaatcaacgtaatcgtctcactgttcacttgtattaacaaggaatgtcctgaggaaggccaagtcatcatagccgcccccgcttcagagactgaaccagtaatgtatccatagataagatacggttcaaatatcagaaaagctaaatgaggagagggacttggagatgacaccatcaccccaccaccttgtctgtgtgtgtgtgagtgtgagtgtgtgtgagagagagagagagagagagagaragagcgtgcatacattccccaagagagtgaaagcgttggtgtgagttccctttttgcggccttcaatgcattacaaggaggaaacggcccctcccgcatcattcctgctacttctcaattcttaagaactcagtttatgcaaaatttataggggccccacatacttcagtttttctttatcgtcacttttatatctcagtcaaatatggcggcctccttgccctttaagaactgcataaaattgctttacctggtcagttccacagcctgtgggagcacaaagccattcccatgactccgggatttcttcacatccccgggagcccaccttctcttggcctcctttgcctcttggtaccccactccctctcacctggtattggccgtgtaccatggtggtccggatttgaaatatatctcctccaccaattcccacagacaacactcactcaaaagatgcatgggtctgctgaagacctacgggtcatgaagagacctcgttgtggatggcacgggcgataatttagaaatctctaatctgcaaattttgacctccaaaatcctttctgactcccttccctggcctccctccttcagctgttttttcttttgaactttctccaatgtgatgtccagattcttcttgtcttgctgggtcctcccatcttctccccaaattgccctggaaactgtcaaaatattctctaatatacagagcaggtcagagctcctcagttcttaatcctaacctaacctcttatgctcaaaatagagaaatggctcccccttagtagaaaacattctcatttgaaggtattgagaatagataaaataaactttttttctaatatgtctgaggtagtcagtactacaactaatgtcttacagatctccaaaggatatatctaaccttttttaggttttactattatctttttggttacagaggccactttatagcgcttgacttgtttattcttatttattcttcatcagatcaatcttgtagaattaaatattggagaagtaagacttgatgggaacgactcaaatatttggttatgatataatactgtccaaagatatggagtagactagaaagggacattctggtgttcctgcagggatgacaagtctatcagttcccagatgactgatgtggaaagaaaataktttccccatgtaaattaatcttcataatttgggccaagcacagtggctgacacctgtaatcccagaactttgggaggccaaggtaggtggattgcttgagcccaggagttcaaaaccagcctgggcaacatggcaagaccctgtttctataaaaaaatttaaaaattagccgggcatggtggcatgggcctgtactcccagcaacttgggagacttaaggtgggaagatcgcttgagcccgggaggttgaggctgcagtgagccatgatcacaccactacactccagcctggggaacagcaagaccctgtctcaaaaattttttaaaaaattaaaaattaaaaaagctttataatttgaatgtttcctaacataatttaaatagcaagtttgatttctgttgaaatacagtctattaataacctagctttgaggcagagaatgaagatgtttctgttcattttaaattatacaaagaccagaatttcctcttcagtcattgccactgaccaagttatttttacaccaagtatagatttagctgccaatgtatacttctacttttggatgaggtgaagatttataaattagtgtatatgtgttaaaaatatttgttatgtcccataatttggaaaattatatgctttaaagttttaaagaatagattcaccctgaattaccagcttgcattatgactttaatgggccccaggtgggcactttggcctccatgggctccttttctagaaaaaggataaatattaaaaattagattttatgggttcattggtataaagattaataaaatccaggccagatttattattacatattttttattacataatacttttctttccttccttccttccttccttccttccttccttccttccttccttccttccttcctcccttctttctttctagacagagtctcactcactctgtcatccaggctgaagtgcagtaaygtgatctcggctcactgcaacttaggcctctcgggttcaagcagtcctgcctcagcttcctgtgactacaggcacgcgccaccagacccggcttgtttttgtatttttagtagagacggggtttcgccatgttggccaggctggtcttaaactcctgacctcaagtgatcagcttgcctcagcctcacaaagtgctgggattacagggataagccaccatgcctggccacttttttcctcctgatttaaaaataaactaaaatcaaaacatttttacaatacgtttaagagtccataaaaatgttttgattttagtttatttttaagtcaggaggaaaaaagtggccgggcgctgtggctcatccctgtaatcccagcactttgggtggccaaggtcggtggatcacctgaggttagaagttcgagaccaggctggccaacatggcaaaaccccatttctactaaaaatmcaaaaaaaaaaaaaaaattagctgagtgtggtggcaggcacctgtaatcccagctagttgggaagctgaggcaggagaatcacttgaacctggaaggtggaggttgcagtgagctgagatctcaccattgcactccaacctgggcaacagagcaagactctgtttcaaaaaaaaaaaaaagtattgtasgcccataggcgctgtgtctaccttgcctcaagggagggtcagctttgctgaattgtcctataaagtcagaaacaaccaacacatgttccatgcaaggactggtcctattcctatcaatcttcatccctgccacaaccaacacacacacacacgcgtgcacacacacacactttttacattgaaatgaaatccttcaaagttgtctcttcaggaaatagcactttgattctagtgatactgtcatgactgaagtttttctaagagctaaatttggagacctaagctgaaaatattacatttatgatttgtttttaaaacagaactctcttgatgaaaattatattttagctacaagagaaggatttgatttttaaagtattaaactttgaaaaagcctaagtgtaaacttggatattgtattatatgtgtttgtttaaagtgatcttttttaacaaaaaaatcaaaggtcacttagcgaaatggttataaaactaagcttgcaaccctctgctaaataataaatatgttttattgctgagtgaataacttagaattatatttgtccattcaccagaaacaaacagtatctactctacttttcttgcagtatattctttctgtaagcagagaaaatctaaacaaggatctattgactggtaagtctaatgtttgattcatcagttgtcattttgagtaaagcacatgacactaatcttgtcatatgatttattggatttgtttgctgctcctttttatgggttatgaagagcaagactatgtacactacaaagtccttcttgaagctaggtctgatagctcatgcctgtaatcccagcactctgaaaggctgaggccaggatcgcttgagtccaggaatttgagacccgcctgggcaacatggagagacgctatcactacaaagaataaaaaattagctgggtgtagaagcgtgtacctatagtcccagctactcaagagcctgaggtggaaggatcacttgagccagggaggtcgaggctacagtgagatatgagtgatgtgattgtgccactgcactcccagcctgggcaacagagtgagaccctgtctcaaaaaaagaaataaataaatgaagtccttcttgaaaatatcaattgcctaaagtttttagagacgaagtcttgctgtcacccagactgatgtgccatggtgcaatcatggctcactgtaacttcgaaatcctgtgctcaagctatcttcccaccttggccacccgagaagctgggactacaggcacatgctaccacatacgaccaatttttttacattttttttaaaggcagagtctttctatgttgtccaggttggtcttgaactcctggctcaagtgattctcccacctcagactccagagtagctgggattacaggtgctagcacccacttcactgacaattctctgaattgaaatcatttgttcaacatatactgaatccctatggtctcctaggcactgagtgaatgagtgttcacgctgatgaagaactcacactctaatggaacgacagataaactcaaacaatttgcaaagtgacacaattagatttgccttttgggccaggcgtggtggctcacgcctgtaatcccagcacattgggaggccgaggcaggcggatcacaaggtcaggagtttgagaccagcctggccaatatggtgaaaccctgtatctactaaaaatacaaaaagaaaaaaaaaattagctgagcgtggtggcacatgccggtaatcccagctactcgggaggctgaggcaggagaattgcttgaacccaggaggcggaggttgcagtgagccgagatcatgccactgcmctccagcctggctgacagagcgagactcagtcccaataaaataataataataataataataataaagatttgtcttttagagagatgaaaagccatagtgtgaagactgagaaagggttgcaatcttcaaggcatttccataatctctgggcacagaagggcccaagaataaagctatagtaatgtggctggagagtagagtgtagattcatgatatttgtaagagaacaaatcgagagataggggatatagaaagttgagaaagagaaaggtgtaartagaaccctgaagttgtgaatttgtgtaactaaaaaaagcctacgtgttcatggaaaagccactggattacaaattaaatttgtggtttgcgtagttgatccagtcacacmcyatgtatcccttacyaagtctaagcctacactgtagttgcttttcctcccttcagcatttgcattcaacggatttattcccagcaaagcatgccacttaatatttctactatcttttaaactagtccctcgtgatggagcccagtagactctgatttttaaacagagactgtacatgatttatctttgtttctccacaatctcctcaatatatctactgaatgtaattgaacgtaatgggattcaactgggaggaggaggcctatgaggaatttcactttagttgrttcaccagatacaagaaagagggtttagtattattattaattgtatttccttagttatatttgtcagactgccttttggatggatagatgggtggagtggagccagtttgctaggtatattcaggttgatctcaagaaagcaaatgaaccagccgggtgcggtggctcacatctgtaatcccagcaccttggtaggctgaggagggaggatggctcgagcccaggagtataattgcatcactgcattccagccctggtccacagagcaagacatcaactctaaaaaatcaaaacaaaacaacaacaagaaaactccacaaaacagcttttrcaaaaagcagtacagcagacctatgacactgtctttcaaaaatcctctcaatctatcaagataaaactaatagcaaacattcatcgaagcaccaagctgtatcttaagtgttttacatgcatagatttgcataaccctttcaacaactctatgagggggaaattacttttatttccgttttatagatggtgaaatggaggcttagagagcttggatcacactgttagtaagtggtagaatctggatttaaatctgagtctgtttattccaaagcccatgcttttaattattatgacttctgcctccaatattatatataaaacatctgctaatactaaggaacttaaaacatgggaaaggtacaatcttggtgtacacaccagaagttccccaaattgtctttcactaggaatgtgctgcatggcacacaatttcataaatgccataaatacatcaataaaatgaacgctgaatctcttcactcttaaactttgttgggcatataaagttcattctttctttacgaggcatcaaatgtgggaggttttcattccacacatttaatcaattgtaaattctcatttctccctaactgcacaaactcctctctgaaaacattgttgctacatgatttccctacgtcggcatttcatgcgggattgtttcacggttcatctgctattctgtgagatgttaataattattaagccaaagcaaacagacaaaggatgtgtggccaaataagtctgacaaaccttgcatcaaacaagttttcagtcttttttcttatagtacttctcagggcttttattatattcttggtctgcattgtggatcttccagagcagcacagtccaacatgtggccacaaataccaggcacgtgtatacttttccaatttatgctaaccatgttaaaaaaaaaaaaaaagcagcaggtggtgttatgtttaataagatattttaacctaggccaggcgcagtggctcacacctgtaatcccagcactttgggaggccgaagggggtggatcacctgaggccaggagttggagaccagcctggtgaacatggtgaaaccctatctctactaaaaatataaaaattagctgggcgtgttggtgggcgcctgtaatcccagttactcaggagaatctctggaatcctggaggcggaggctgcagtgagctgagatcatgccattgcactccatcctgggcgacaagagtgaaactctgtctcaaaaaaaaaaaaaagatattttaacctaatatatccaaaatattatttcaatatgtaatcaatatcagaaagttattcactgtcattctttttatatatacttgttctaatttgccaaaatcccatacaggcaacacatctcaatttaggatagccacactccaagtactcaaacactacctgtggctggacaccagggcagcatagcccaagacagagtattcagcattactctagtctttggcaatggaacagtttttttagggagtatatcccaggagtaacgttctacaaaaaattatttaggatgcaaaatactatatacttatgtaaaaaataaacataattttttaaaaagtttttttcacaaacacatgttatgtttctaaaatatatccttagtatatcaggtcaattctgattacttcaaagttatttgccaaactacttcttctacatagatgaatttctttggtttagggtctctcagattttgcaagaaagttaaaatcttcaaaccccaaatcaaactgaaacaaaaaagagtaaaataagacaagattgagatgaagagaggagataagtacaggcaggaatagaactcctgccttattttccccatttttttcaaattcaacattctttttatttacgtttttgacatataaaaactgtacataattaatgtgtacaacttgatgagtttggtccttaattttttcactttgtgtgatctcaggcattttacctttacttccagaatcttagttactccytttttaagatgaaggattttgaactaaatcatctctgaagtctattccagctctaacacctgtattctgatttatacctttaagaacaataaataggctatatttatagatgaatacatgagcattaatagggacaaaatcacattttactgttgtaacaagggcataattaatagttcataaattgaaattcactcaattctctagagtgctagcaggcaaaacagaaaattacgaaaataatttgtttcagtttattgagaggtttcaaagcttcttactcattttccccctaactattccagtgtttgatttcaaagagatttaaaatcaacaatctctatttgtgacaacttcaatcagaattccagaaaactagctaaaaagagatatagagacatgcgtaatatgaggaaaggagtttgactgaatatttccartcacaacaaagcctcggattagaggcgacttctgaaatatgtgatgcttgcttctttcccagggtgctaataattacagcaatgcaagagtttgcacaatggaatcagttggatgttttytttttgagatgaggataattgatttttattcatctgttttactaccaaattatactgaaatagttaccaaacagttgtcaaattaccatttaagtgaacttatttttacattgttatgaataaaattctctaccatactgttcccagaaaacaattactatttcaatttgattaagtgaagtaagaattgagatttcatttctgtttgcctctttctccatttcctcagctgctgagaaataccccaatgtgaaaatgcactttaaccacaggctgttgaaatgtaatccagaggaaggaatgatcacagtgcttgggtaactacgggtcaggttttggacttcagaggtgaaagctgggagtggagaattgtatctgcaaactttgttctttggctcttttgaaagagttaaaagattattgaaaggatcatccaaatagtttctagattcaaggaattttagattgcaaataggccctgatggccatctgaacaccaatgccaataattcttaattctcacacttgctcaccttcctactgtactgtattccacactggtgactctaatgtgcttcaaactctctcctctctcaaatatacgtgaccctccactgctctcctcctgttctctttccaggtgctatttctctgcctttccttggatgattctatttcctctaaggttccaagcctcatatsccactcttgcgatatgctatggatccacgctcatgggttcaacaaccacatctctaagatgaacatttccagtccaagcctctttcttcattctaaatccttatagaagctcaaatcaatttatgttaacttctcatcaaacatccttgctggaacatcttgccattatctcaaacatatctaaaaccttgatcacctacttctcccaaatcacatcccattcctgacttccccagaactaatgcctgaataatttgaatcattcatgatgtgttctttcccctgtcctctcccattaaatctataacactccccagtctatcctactttctactggcttcagagtctgtcttcctccttctagctgcaggacagtacttccggctctcattcctgcacatgtaatataatgtgttgccatcacctcatccctgttttctgctccctttggcattcggccttctcttcaaactgccaaggaagtyttcttaaattgcaactcttcatacatcattcccctaatagataatttcagtttcccttttgccagaataatgttttaaaatcttttatcttgacattcaagattctcttcttttccccttcckttctctccctaccttgtattcttttcttaagcttttcttctaatacctgtgctcaagacaaatgtattgttcttagaaaatcctgtggttgttcatacattcattcgtacacttggaacacttgccctgttttcaagattctcctccttcatgcagaaatctcaaatcctgtcacacttctgtggcctaccaagtctttattaatcaatatggtgttgtgctattctcataagcaaacttatgactgggacaagtgttttcatctaaatgttacatctattaactcaaagctccaagtcaaacatgtgaaagtgagctttctaagttatctatggagccactacttctcatacccagaggtacatcatcattttcaccactagacatatttttcttttggatgttttgttctatttttcagatctgacaaagttcccaaagatgtcacttgtgacctcattgtaggatgtgatggagcctattcaactgtcagatctcacctgatgaagaaacctcgctttgattacagtcagcagtacattcctcatgggtacatggagttgactattccacctaagaacggagatgtaagtccttgccctttttcaaccccttcccacaacccttgctccatgagcgcgaatgcgtattctagtgcagtggttctcagcagcatgtcttgatccattttgaggcctatcacaagaactttgtaatgaagaataaatgggatgcatgggtatctttttaacagcacgattctcagtccttccttgtttgatatgctttctggagtgaaaaagaaaggagcagtctgggcacagtggctcatgcctgtaatcccagcaatttgggaggccaaggcaggaggatcgcttgaacccaagatatcaagaccaacctgggccacatagggagactctgtctctgtaaaaaatacaaaaattagctagggatgtggcacacgcctgtggtcccagctactcgtgaggctgaggtggaaggattgcttgagcccaggaggtcaaggctgcagtgagccgagatcatgccaatgcactctatcctgagcaacatagcccaatcctgtcttgaaagaaggaaggaaggaaggaaagaaggaaggaaggaaggaaggaaggaaggaaggagacgggaagggaagggaagggaagggaaggggagaagttacaaccctcttactggaaacacataaaggatttaaataatatcgtttgtctatgttctcttgggagaaaaaaacaggttgatgatgaatccttcagtatactgacaatccagagttcttataaccatgattaaatcaaataatagttattaaataaaatgactagaaaattgttgtaaagtgatttctattgtgtttttctcatttcctggttaaaccatatgtgactggaggcaaataagtggtatgtaatgttttcatgttgtcataagcaaataagtgtaggaacttgttaagaaaaaattgctaacagaaacaataaggatattggcttataagtatggatatgcaaacaacattaaatacttgatttgcatataaagcatacatttttaagatgctgatttaatctatcctcttaaatccagacaagggtaaaacagctagtcaatatgggatagtgttgttaaatactaaatatcagccagtaaaatccatattttcacatttcattacctttctgtttcatcctcatggtcaaaatgtattcgctaattttttagtgcttattgtactggttttcagatagcttctgctctcatggcccagaatctgataactctggatataggataacagaattctgttgaaaaattgttccagacttaagaagaactgtgcttgctaaagtagatttaagaaagccctttattttctaggtatacataataaatagtaataattgatggytttaaaaaatgtctccactcttttaagaacattgtttaggcatggcaatgtgactcagacatgggagcattttgacatggcccaaaaacaagcttatgagactttctctatttttctttgtgtcttttttttcttttgttcttcatgtaatgtgtgaaatagacacttgcactcttctgatggttggagttgggggcaagagattgggtaaatggctttctaccactagtattactgttaaagcgaagtaattgcttttcatatgtattcctcttgcctattggackgcactgtaaggtcaagagttatgcacgtactcatttctgtgtctgtgtgttgggctttctttgggagtctgaggctaaaaaaacaaggaagacacagtcccttcacctaagacacaaataactatgatacagtgtaaaaatgttagctccaagactatgctgtttttttggtattcttactctgtaagctatacatggaaggtgctctcaaaacatctgtagaaaataatacaaatatgaaataattggaaagttgattgcatatttctatgtatataatacccctgggaaccttcaaaaatgtgcgtcacttgggtctttgggtcaattgatctacccaagcaattaatacttattcaggctgttattgtattaatagtaattacagaggacccactaaagagataagactcttctctattatttatgttataggaaacaaacgataagaagcttgtttctaaaattttggtttggctcatgaaatttaaatgtaagacctttttgtccagtatagataagttctgaaataaggcaaaagataaagtaaaaaatatatatataaatatataatgtatgtgcatacattatatatgtgtgcatatacacacatgtacacatctagatatgtgcatgtgtgtgtacatatataccaggtataattataccagctatgattcaagatttgagaacataagatgttctctctctctgtctttttccttacatatacacacacacgcacgtattctgaaatcttgaaatatacctggtatcaaaaacctacctaaggttgagtttataaagacagaacacaaagtgttttctaagacaacttctattttatgtagcaatagatgtgcgtatcatcgtgtagatgctactggttttaattactgtggaaactattataaagctgagtccgttttataggtttgctatatgaatgcactaatcaatcatatattcttttttctgcagtatgccatggaacctaattatctgcatatttggcctagaaatacctttatgatgattgcacttcctaacatggtagtatagaattttttatcaactgtaattttgcatttgtaattaatgttgtttattacttacatttgtacttagaatgtatctacctaattgatctcttcattgtttaatccatttagtgattatagctttgaaactttgggattactgaggaaaaatctgaaggatttccaattatttactttggaaaggagatttaacttacatgaatggataacaagagtttatgtgtggtggtgcctgtcatctccactaaagacaatttaggaggaaacagcccttccagtaaagccaaagagatttaggttatctatcaggaagtgattcagcctttaaggtctgtagtacattggaatacgcattatcaaaagagagcatggggatgggcgcagcggctcacacctgtaataccagcactttgggaggccaaagcgggaggattgcttgagctcaggagttcaagactgatgtggccaacatagcaagaccttgcctctactaaaaaaaaaaaaaaaaaatgccaggcatggtgacacgtgcatccccaactactcaggaggctgaggtgggaggattgcttgagccccgaagatggaggctgcagtaagccgtgatcatcccattgcattccagcctggacaacaaagcaagaccctgtttcaaaaaaaaagagagcatggcttttctttcattagaccctagagacttttttcctaggtagatatagctgtttctctggttggggtcttttttgtttctgttggtatctgtcctggggtccagggcctagtaatacaatcctaaaaggaagaaaaagagatgtcaaatctaaccaacctattagtaatttaaagactgtaggctgggcgtggtggctcatgcctgtaatcccagcactttgggaggccgaggtgggtggatcacctgaggtcaggagttccagaccaacctgcccaacatggagaaactctgtctttactaaaaatacaaaaaattagccgggtgtggtggtgggtgcctgtagtcccagctactcaggaggctaaggcaggagaatcgcttgaacctgggaggcagaggttgcggtgagctgagattgccccacagcactccggcctgggcaacagagtgagactctatctcaaaaagaaaaagaaaaaagagtgtagtatttgctgtgtgaaaatggagagtttacaatatagaaattgtccgaataatcaaagaagctggagagcacccctgggacttggcagagcttttctttgggagcaggggaacaaagtgacagtgcctttcctgtctgcttggacattccttccaaaagctccctggtcacagcaagaagtcttgtgatttcaggagccacctagtgccagcgtcacttggcccccatcccctttcactctgtttctcttcttctcacagaacaaatcattcacatgtactttgttcatgccctttgaagagtttgaaaaacttctaaccagtaatgatgtggtagatttcttccagaaatactttccggatgccatccctctaattggagagtaagttgcaagatgtgccttttgctccatttgttttaattattccaaattcaaataaaggttatgcacctgatttcagtttgggttaaacacgatggatcatgcaktaacctggacagaaacctacattagagcaaaagtntaagtggatattgtgctgtgagcaggaattctgaaaaacacccttgacgtggccagttcctccgggaaagatgagccaccaatgtccygaggcttttgtgcatcttatgcaggctcctcaggctccttggggcttggcgtgccacaggaactggctgaacttttttctactggtagatacacaaatctttggcacagcagatacatccggcagcctcagatcttggatcctacacttactagacacgtaagctttcccrtattccactcgtgggaaaaggttgataaataatagaacctatcccaaagggttgtcatgaggactaaatgagatcgtgtctataaatcattcagcacaaggcttagcgcatattaagttgtctctctagacacctccaatgatgtcttcatgaaggcagcgcaatgctacagagagcatgccttagtcagttcagtgagccataataaaactaccatagactcggtggcttatacatgacagaaatgtattgctcgcagttctaaaggctgagaagtgtaagatcaaggcactagcagattcggtgtctggtgacgccccacttcttggttcatagatgacagtctttttactgtgtcttcacatgctggaaggggcatgggatctctctggggtcccttttataaaagcactaatcccactaatggggggtccactcccaagacctaatcaccacccaaaggccccatctccaaataccatcacattggagattaggattccaatataggaatgttaggggagcataaacattcagtctatagcagagcaagattttcacactgcttcttccccttacctccctgagtttcacctttaaaatgggtatctaccatggggcatttgtgaaaattaaatgagctaattatgtaaaagggataacccactgctggcccatagcaggtcttttaaaaattgctagtcacttccttccctgaagactaatttagtctctatggatcccaccttctccagctgtgaagataaatctctgcacaccagaattagaccttgtgtactttcaaactggtttcatggctatcttttgcctttccagccagatttaagattcttgaggctaggtaccatttgtctacttagagcttcctcaactcttctacagatgctttacaaatattagggtttttgtttgttttttattataagcaccatgttgtacaataaatctcttgaatttattcttcctgtctaacttaaagtttgtaccacttgaacaaattattcccatcccccaaatgctagttttattactgttatctatttccaaatacataaagattcacattaatttcaattttggtttattgtcttctaatcaaatgcacagtagcatttgctcaattttttatggaaacctaaaatacactgctgcatttgaaaatctcatggcccaggtgcatgataacaaagttttaataatatatgatacagaaatacttaaattattcaaatgcagccaaacttttatttttaatgtgattaacattgttgcagaccaagaaggtaattagaataatggaattttaggactggaaaaacttcagtttttcccttttctsttttcttcttggcattcttgtttttcaacaaaacttcgtgatagttaatttagtaaacctgaaagaatttagcaggatttaatacctaatttgatgtctttatattcggattattttcctttgaaggaaactcctagtgcaagatttcttcctgttgcctgcccagcccatgatatctgtaaagtgctcttcatttcactttaaatctcactgtgtactgctgggagatgcagctcatgctatagtgccgttttttgggcaaggaatgaatgcggtaagttctttttccctaggtaagtccctcaaatacttctgggtcagtctcagctaacaagtcttacgtaaaaaatatgtctaagactatccccacataatccctgaaagcacaatcaattcagcaatcataccagctgtgtagctagattgatcactctaatcagaatttggtttaatcaatccagtaatccatagtagaaaaaagcagaaagcatagcgcactcatcccttggtatcaccaagggatcagctccaggacccctgtggatacaaaaatccatggatgctcatgtccctgttgtaaaatggcatagtttttgtatataacctacagagaatctcccgtatccatttttacatctaattttttaaaattttttaattattatggatatatactagttttatatatttatgtgatacatgcaatattttgattcaggaatacaatgtatatgaccatatcagggtaattagggtatctgtcacctcaagcatttatcatttctttgtattagaaacaccccaaattcctctcttttagtgattttaaaatatataataaattattgttaaccacattcaccctattgtgatgccaaatactagatcttattcattctatctaactatttttgtatccattaactatctccactttacacttccaccctactaccattcccagtctctggggagcatcattctatctccataagtttaatttttatagctccctcatatgagtaaaaaagaatgtgataattttctttatgtgcctggtttatttcactaacgtcttctggttccatccatgttgttgcaaatgatggcatttcattctttttttatagctgaataatattccattgtgaatatgtactacattttccttatccattcatccattgatggacacttaggttgattccatatctttgctattgtgaatagtgctgcaataaacatgggagtgcagatatctcttcaatatactgatgttctttctttttgcatatttacccagcagtgggattgctgccatatatggcagttttatttttagtttgttgaggaacctccatgctgttttccatagtggttgtactaatttatactcccaccaaacgagagttcccctctgtccacattctcaccagcattcgttatcacttgtctttcagatcaaagccattataactgaagtgagataatatcattgtatatttgatttgcatttctctgataattagtgaagtttagcaatttttcatatacccactggccatttgtatgtcttcttttgagaaatgcctactcagatattatttttattattttattattttaataatcaggtattatcttctttgagaaatgccgactcagatattatcaattttaaaacatccatttttaaattggattattcgttatcttctgactgagtttgagcttcttatatattctgattattaatcccttgtcagatgggtagtttgcaaatattttactttgttctgtgggttgtctcttcactttgttaattgtttcttttgctttgcagaaacttttttttagcttgatatgatcccatttgtcctatttatttctgagttctctattctgttccaaaggtctatgtgtctgttttttgctttggctgcctgtgtttttgaggtcttacttagaaaatttttgcccagaccactgtcttggactgtttcttcaatgttttcctctgctagtttcatagtttccactcttagatttgtctttaatccactttcattttatttttgtatatggtgaaagatagtggtctagtttcattcttcagcatatggatatctagttttcccagcaccatttattgaagagactgtcttttccccaatgtgtatgttcttggcacctttgctaaaattgagtcaatgctaaaattgaatgtggatatattactgggttctctattctgttccattggtcaatgtgtctgtctctatgcccgtaccatgatgttttggttactttagttttgtagtataatttgaagtcaggtaatgtgatgcctccagttttgttctttttgctcaggatggctttggctattctgtgtctttggtgatttcatatacattttaggattattctttctatttctgtgaagaatgacactggtatttttataggtattgcattaagtctgtagattgccttgggtaatatggacattttaacaatattgatccttctaatccatgagcatggaatatctttcctttttttgtgtcctcttcaatttctttcatcaacgttttatagttttcattgtagagatctttcacttctctggttaattcccagatatcttactttatttgtaattattgtaaatgagattaccttcctggtttctttttcagattgtttactcttggcatatagaattgctatttatttttgtatgttgattttgtatcctgtaactttattaaatttgtttatcagttctaatagtgtttttggttgagtctttaggtttttgtaaacataaggtcatattttctgcaaactaggataatttgacttcttcctttccaatttggatgttctttatttctttctcttgtctaaatgctctggctaggacttccagtactacattgcataaaaatggtgaaaatggttgttcttgtcttgttccatattttagaggaaaggaaagattttcagtttttcctcattttgtatgatactagctgtggtgttgtcatatacagcttttatcatgttgagatatattccttctatacccagttttttgagaatttttatcatgaagggatgttgaattctacagaatgctttttcagcatcaattgaaatgatcatatggtttttgtctttcattctgttgatatgaggtatcacttttattgatttgtatttgttgaaccatccttgctaccctgggatgaatcctgcttaatcataatgactgatttttaatgtgttattgaatttggtttgcttgcattttgttgrtaatctttgcatctatgtttatcagagatattggcatgcagtttcctttttttgttacgtctttgtctagttttggtattatggtaaggctggcctcttagaattagtttggaagtattcctcctcaatgttttggaataatttgagtaggatttatattagttccttttttttttttttttttttttgagatggagtctcgctctgttgccaggctggagtgcagtggtgcaatctctgccgactgcaacctccacctcccgggtttaagcgattttcctgccacagcctccccagtagctgggactacaggcacgtgccactatgcccagcttatttttggatttttagtagagatgtggtttcaccatgttggccaggatggtctcgatcacttgaccttgtgatctgcccacctcagccttccaaagtgctgagattacaggcatgagccaccacgcccgggcaatattagttcctttttaaatgttttgtagaattcagcaatgaacccatcaggtcctgggcttttctttgatgggaaactttttgttactgcttctatcttgttacttgttaatggtggaatttctttatgattcaatcttggtaagttggtatgtgtctaggactttattcatttcttctagattttcaaatgtattagcatgtagttgctcataatagtctctaatgatcctttgagtttctgtggtatcagtgtctccattttgacctctgattttatttatttgagtcttctctcccttttctgtgtctagctaaaggtttgttgattttgtttattttttaaaaaaccaactttttgtttcattgatcttttgtattatattttagcctcaasttcatttttgctctgatctttattattttttaaagaaactttaaaaaattcctattgagattattttctttttaaattaatgtatatattttatttcaatagcttttggggtacaagtgttttttggttacattaacaaattatatagtggtgaagtctgagattttagtgcatctgtgacctgagtagagtacactgtacccaatatagttttttgtcactcactcccctctcgttcaccattctgagtcaccaaagcccattatattactctgcgtttctgtactcataatttagctcccacttataagtgaraacatacagtatttgattttctattcttgagtcatttcacttaaaatattgggctccagctccatccaagttgctgcaaaaatattatttcatacttttttacggttgagtagtattccatggtgtatatataccacattttctttatgcactcattggtcaagggacacttaggttggttccatatctttacaatagagaattgtcctacaataaatatacacatgcaagtgtcttttttggtattggtattgtttgtatttttgtacagtttgtattttttgctaatttttgtagagacgttttgccctgttgcccaggctggtttcgacctgctgtgctcaagggatctgcccaccttggcctcccaaagtcctaggattacaggcctgagctactgcgcccaacccatttatttatttctgttttagttgcatttgctttaggagtcttagccatgaattctttgcctaggccaatgtccagaggagtttctcctaggttatattctagaatttttatggtttcaggtcttaggtttaagtcttttatccatcttgagtttatttttgtgtaaagtgagagacagggattcagtttcattcttctacatgtggctatccagttttcccagcaccatttattaaatagggtgtccttgcctcaatttatgtttttgtatgctttattgaagatcagttggttgtacgtacttggctttatttctgggttatctattctgttccattggtctatctgtctacttgtatatcaataccatcctattttagtaactatagccttgtagtataatttaaggtccagtaatgtgatgcctccagatttgttctttttgctatttgggctcattttttgtcccctatgagccttagaattgtttttgtttttttctaattctgtgaaaagcgatgttggtattttgataggaattacattgaatctgtatattgcttttgggtagtatggtcatattaacaatattgtatcttccaatccatgaacttggaatgggtttccatttgtttgtgtcatctatgatttctttcagcagtgttttgtagctctctttttagggatctttcacctccttggttaagtatattcctaggtattttattttattttgcagctgtgataaaagggagtaagctcttcatttgattctcagtttggttgttgtcagtgtatagcaacgctactgatttttgtacattgattttataacctgagtctttaatgaattcatttataaaatctgggagtcttttgaatgagtctttagggttttctaagtatacaaacatatcatcagcaaacattgatctttggacttcctttttgtcaatttggatgtccttcatttccttctcctgcctgattactttctctaggacttccagaactatgttgaataaaagtgatgaaaatgggcatccttgccttgtttcagttctgaaggggaattcttcagattttccccattcagtatgatgttggctgtggattcatcatatatggcttttattattttgaggttagtcccttctatgcctagtttgttgaaggttttcatcataaagtgattctggattttatagaatgctttttctgcaactgtagagatgatcatatggtttttttttttaattctgtttatgtgatgtatcacatttattgacttacatatgttaaaccattcctgtatccctaggatgaaatccacttgaacatagtgtattatctttttgatgtgctgttggatttggttagctagtatgttgctgaggattttgcactgatgttcatcagggatgtttgttggtagttttctttctttgttatgtcttctccttgttttggtatcaggatgatactggcttcatagaatgagttagggagaattccctctgtctcaatcttttggaatagtttcagtaggattggcaccaattctttgaatgtctggtaaaatgcaactgtgagtccttctggtcctgggcttttattttttgttgacaattgtttcgattactgatttaatctcactgcttgttattggtccattcaaggtttctatttcttccttatttaatctagaagttttgtacatgtctagaaatttatccatttcctctaggttttccagtatgtatgcaaaaaggtgttcctagtagtctcaaaagatcttttgtatttttgtggtgtccattgtaatgtctccagtttcatttctaattgagcttgtttgaatcttctcttatattttcttggttaaactagctaatgatctattgattttgattgtcttttcaaagaatcaactttttgtcttgttgatcttttgtattttttgtttcaaattcatttagttctcctccgatctttgtttatttcttttcttctgctgactttgggtttagtttgttcttgtgtctctagttccttgaggtgtcacatgatgttgtcaatttgtgatgtttttgaactttttgatgtaggcatttaatgctataaactttccttttaggattgtttttgctgtaacccagaggttttgatatgttgtgtcactattatcattcatttcaaaggattttgaaatttccatcttgatttcattgttaaccccaaaatcattcaagagaagattgtttaatttccatgtatttgtatagtttagagatttccttttggaattaatcttgagtttaattttccactgtgggctgagaagataactggatatgattttgatgttttaaaatttattgagacttgttttatgacctaccatatggtttatcttgaagaatgttccatgtgctgatgagaagaatgtacattctgcagttcttggatagaatgttctgtaaatatctgttagatctatattttctagaatgtggttaattccattgacagcactagacagatcattgagacttctgtctcaatggagtgttaaagtccccactattactgtgttgctttctacctaatttcttagatttggtactaattgttttataaatttaagagctccagtgttaggtgcctataagtttaggattgtaatatctacttgtgggatcaatccttttatcattttgtaatggccttctttgtctttttttttttttaactgttgttttaaagtctgttttatctgatataatagctacccctgcttgctttcagtttccatttgcatggagtatctttttacacccctctaccttgagtttgtgtgagtcctatgtgttaggtgagtctcttgaagacagcagacacttggtttctgatgtttttatccattctgacaatctatattttttaagaggagcatttcgacaatttacgttcagcattagtattgagatgtgaggtgctgtttcagtcatcatgttaattgttacctagatactttgttttcttcattgtgttatgttttgtaggctctgtgagttttacattttcaagagtttctatacttgtgcatatcaaccttttgtttcaagatttagagctccttttagcatttcttgtaaggctcattaggtagtaaaaaattccctcagcatttgtctgaaaatgcgtttatctctccttcatttatgaaactaagttttgctggatataaaattcttgggtgacagttattctgtttaaggaggctgaagacaggaccccagtccttgctgacttgtaagatttctgctgagaagtctgcattagttttcctttataagttacctgatgcttttgtctcactgctcttagaattatttccttcatgttgactttagatagcttgataaccatacaccttggtgatgttctttttgtaatgaatctcccaggacttctttgagcttcttrtatttgcatatctcaatctgtagcagggtcagaaaagtattccctcaaattagtttccaaactttttactttcttttctccctcaggaacatcaattattcttagatttggccattttacataatcccatatttctttgaggctttgttcatttcttttgattatattttctttattttgtctgattgggttaattcaaaagccttgtctttgagctctgaaattctttcttctgctttctctagcctgttgttaaaatgttccactgcattttgtaattccttaaatgtgtcttccatttctagaaattctgattgttttttctgtaaaatatctatctctttaggaaatttttcattcatattctgaatgttttaaatttcttcatgttgtttttcacctttctctggcatgttcttgagtaacttaataatgttttgacatctttatctggtatttcaaagatttcatcttggtatggatccattgctggaaagccagtgtgatcttttggggttgttatagaaccctgttttgtcatattaccggaattatttttctggttccttctaatttgggtaggctatttcttctaattatttttaaatttatttttgattcaactgtgtttttctttaatttcctttttaccctgttaaggatgtgattttaatgtttatagtttattgtagsctaattcggctcttggtgctttcagagttgaagactctgtgggttccttggttatggagagtctttgtttgatgactggctttctcagatgctggttgtagtagcaatgtgcttggtgtgtgtacaagttcacggtctcctatggggttggaatggtagagatattttgaggctcatctcgtttcccatgatgtgcacttttttatttatttattttttccccagtattttatttactgagttgaatagctcaggtttcaggccagtagagaaggtatccctgggcagaaactatttatggctaaagcaggtgggtaaatgcaatatgaaatgttggtcagaggccccagccttgacagaggtggttgggggagctctcagtgaaacacactgaagtcttttcaggggaaacggtgggagccacctctccccttttccttctggcctcccctgccaggccaactggaaagtgatccacctcccagatacatccctgacccagtgttctggctattcagatcagacaggcacctctttccatctgcaggaatgttgatgttccaagtagagaggagttgtgactctccctcttgtgcaagcctgagcctgaggggtgctccctcatgtggggcggcagtcaccctgaagtgttcctgaatggctgtctataggccacccttaccaaacttccatgggagaagccccattcccactgtgtttgcagtggtggatgaggaggaaaacaagtcctcttctccaagactcttcatgagcaccagcgctgcttgactattgggttagaactgcagacttttcttgctgagcccagcactgcaaacatgactctgatgaaataaacttcccaccagcagaaagatgtgggactcaagtcctgctctccagattcttttgtcccatggcatgtttcattgatgtggtacactcctctttcccctgggaataggagtccctgagagctagactactgtgaatgctgttgctcctctaggtccagcaacacagtggagctgccacacttgaggccactgtggggaatgtctgcaagggatccagtaatgtgacctgcccttaagtcttccagcagtgggtaccagtaccagctcagatggaggggagtgacatagactctgtgattccttggctataaataggcttagtgtgttggctatttcaaatgctggttgtaggagtaattaactggttatgtggacagacttagaacttcctggttagccagggtggtgtaggtaatggtgtgtattaatctgttttcatgctgctgataaagacatacccaagattgggtaatttataaagaaagagaggtttgatggatgcacagtttcatgtggctagggaggcctcacaattatggtggaaggtgaaaggcccttctcacatggtagcagacaagagaagagtgagagccaagtgaaagggttttcccttataaaaccatcagatctcatgagacttattcactaccacgagaattgtatgagggaaattgcccccatgattcaattatgtcccaccaggtccctcccacaacacatgggaattatgggagatacaattcaagatgagatttgggtggggacacagccaaaccatatcacagtgatagctgaggtcatacacaaattttctccttcctgagtgcaggttattctacctgcagatgctgtctgtaatggactgtgtcagttggcttctgccaggtggttgtacttgcaaaagagcaccaggtttggtggtagcagtgggatttctgcttgccttatgttacctaggggaggtactctggtttcttacgtgatgggcagggttataaagctcccaaaagtttctgtcttttgtgttaagctaccagggtaggtggaggggtgaagccaggtcagagttgtgctgggcaggtccatgcaagcagcattccctgtgggggccaggagacagttttctggccactaaggtaacgcttcagggatgaggacaactgcctctgcttcactgaagagtttgcccagcaattagggagtagcaggcggcagtaagctccacccagcttccatgcacttggcaaggcaggtcttacacccacagtgttctgctagcaacagctagctaagctccaggaagtctacactcaaaactgtcctaggccataagccttctcctcagagacagcaactggtgactttcaggccactcccctcccagtccacccacaaatccagggcacccagcttctgcactcgtggctgtagcacacttcccattcacctcccagttctggccaagagagttcaaccctgctcgagattatatcacagattttagttgggagcttctctcaacctgtgactgctgcctgagttagcttgcagacttccatgaggttcccagtaatgtagaatcaggaataacctcccttggtttgtactggagaccgggaatgtccaaaagtctcttccagctgctgctcctgcttttatatttcccactgctcactaaatcagttccagtgcttggtagggttaacgccttcccccatggactggattgccaggttccccagtggggatttatatcctggaggcaggctctcaccctctcacactttgaggacttaacaatttttcacatggcttatagtataggttgcagcagcctatctcttcttttaaagggtcttatggtttccttccgttttcctgttaagttcctgtgttgcctcctggaaaaaagttcacagtgtgtatctctacatagtctctacatatatctctacatatctctacaccacattttatcttcccaagtgggagaggcatgctaacattgcctccaattcactgtcttagggggaaagattttttctttcttcaactaattttggattcagtttgctcttgcttttatagctctttaggatacaattgttaggttgtttatttgaagtttttctacttttttgatgtaggtatttattgctatacacttcaactttagtactgctttggctgtgtcccacaggttttggtatgttctgtttccattttcatttgtttcaagaaatctttaaattcccttattggtcaatttcttcattgacccagtggtcattcaggagcatattgtttaatttccatgtgtttgtataatttacaaagtttctcttgttatttatttctagtttcatctcactgtggtcagaaaagatacttgatgtgatttcaatttttaaaaattttttgagattttttttgtgacctaacatacaacctatctttgaggatgtttcatgtgctaaggaaaagaacatgtattctgccttttttggataatatgttctgtaaatacatattaggtccatttcttacatactttttctttattttatgtcttgatgatctgtccaaaggtgaaactggggtgttaagtacccagctattattgtattggggtctatcactgtctttagttctaataatatttgctttctatatctgggtgctcctgtgttggatgcatagatatttactattatattctcttaccraattgacctttttgtcattatataatgaactcatttgtttgtctttagagtttttgtcttgaaatccattttgtctcatataagtatagcaactcctgctcttttatgatttcyatttkcttggaatatctttttccatccttttattttcagtcgatgtgtgtctttataggtgatgtgaatttcttgtaggcagcatatagttgastcttatctttttatacatccaactgctctatgtatttttattagggaatttattccatttagtttcagtattactaatgataggtatggacttactgctgccatacagttacttcttttctggttgttttgttggtcctcttcttctttcttccttcttgttttcctttgtgtaaaagtgatattctctggtagtatgttttaagtttttgcttattattttttgtgtacctatcataggtttttgttttgtggttaccatgaggcttgcaaataacatcttacaaccaagtattttaaactgatgacaacttaacccggattacaaagaaaaagaaagaaaraagaaaaaaagagaaaagaaaagaaaagacaaacaagcaaagagaaaactaaacaactctacactttaactccatccccctggcattttgacattttgttgtctctatatatatctttttatactgtctctaaaaagttcttgtaattattatttttgataaatgtgtcttttggtccttctactaaagatatgtacatactgcagttacagtgttaatagtatactgtatttgtctgtatacttactattaccagtgaattagataccttcaggtgattttttttctcatttgttaacatccttttctttcatattgaagatctcccttgagtatttcttgtaagacggatctggtgttgatgaaatctctcaggttttgtttgtctgtgaacatatttctccttcatgtttgtagaataattttgctgcatacaatattctaaattggaagcttttattcctttagcactttgaatatgccaatccattctcttttgtcctaaaggtttctgctgcaaagtctgctgccagacatattggaactccttttatgttatttgcttatttttacttgttgctttcaggatcctttctttatccttgacctttgagagttccattaatatatgctttgatgtagccttatttggcttgaatctgtttagtgttttatgatcttcttgtagctggatattcatatctttctctaggtttgggaagttttcattattatttctttgaataaactttctacccttatgtctctctctatatatgttctctttaaggccaacaactattagatttgcccttgtcaggctatttcctggatcttatatgtatgcttaattcttttttattcttattgtttccctctgactgtatttttatatagcctgtcttccagctcactaattttttcttctgtttgatcaattctgctgttgagagactctgatgcatttttcaattgaatttttcagctccaaaatgtctgcttgatttttaaaaattatttcaatctctttgttaaatttatctgatacaattctgaattccttctctgtattatcttgatgtttgttgaacttctgcaagacgagtattttgaattctctatttgaaaggtcatatatctttgtcactccaggattggtcactggtgccttatttagttcgtttggtaaggtcatgttccttgggtgttcttgatgcttgtggatgtttgttgatatctgggtgttgaagaattaggtgtctattttgtctattttgtcttcacattcttggcttgtttgtacctgtccttcttgaaatagctttccaggtattccaaggggaatgagtgttgcggtctaagtttatggtcactgcagctgtatcagtactaggaggtgccctaagcccaggaatgctacaactcttgccaagtcctagaggcacaatgrtgcttctaaatgaagcattgtcctaaagggagaattccttgggttactaggcaaagtatctcagtctcttytcttttgttccttgaaccacaaggagtttttctccccatgctaggctgcctggagttgggggaggagtgacacaagcactcctgtggccaccacagctggcactgtgctgggtcatacctgaagctaacacagtactgtgtcttgcctaatgcccatggtgactactgcctggctaccactgatgtttattcaaggcccaagggctctttagttagcaggtggtgaaccctgccaggactcagtcattgccttcaaggcagaaaattcccttctgccccagggtgggtatagaaatgccatccaggagctaagacctggaatcaggggcttcaggaaactacttggtgctttattttattgtggcttagctggtacctaactaactagtaagacaaagacctctatactttttcttctcctttccccaagtgaagggagtttttccccaagctgcactgcctggagttgaagaagagggtctcaggtacttaaaatcatctatagattacttataatacatatacctaatacaatataaatgtcatgtatataattgttatactgtatttttatttgtattcttttttgttgcattatttttattgttttttaaaaaatacttccaatcaaaacttgactgagtccatatatccagaacttgggtatatgwrsytgrsyatatagtattctgttcagttagaaaaaatgtaccwatagctcaaaatttggaaacttggctatcagcaattcaagacttaattttttaaatatattttttctaggcactatgcataaatatgtaacattagcctcaaagaaagaaaataataaacatttatctcatttacttatttatttttctttttttattatactttaagttctagggtacaggtgcacaatgtgcaggtttgttacatatgtatacatgggccatgttggtgtgctgcacccattaactagtaatttacattaggtatttctcctaakgctatccctcccccatcccccaaccccatgacagcccccrgtgtgtgatgttccccttcctgtgtccatgtgttctcattgttcaattcccacctatgagtgagaacatgaggtgtttggttttctgtccttgcaactcatcatcactggtcatcagagaaatgcaaatcaaaaccacaatgagataccatctcacaccagttagaaaggtgattgttaaaaagtcaggaaacaacaggtgctggagaagatgtggagaaataggaacactttcacactgttggtgggagtgtaaactagttcaaccattgtggaagacagtgtggcgattcctcaaggatctctttcttttctactttttctttccaaaggaaagcaaaacctgattgacaaggttgagtaaaactatgagctgattagaygttgaacactactgccttcatggaaatgttactattttggccagaaaaagaattcagaaaagaaatagcgtttaaaagttgaacattcatttcaaggaatcctaatttgtgtgtgtgtgtgcactaatagcttcataatcattaatcatatattattttggtcaytggcatatattccaagtaaaaatagcttttgaatctaatcaattatattctcyatgaagcagtggtaaacatattgttttataaaaacataagacattaactgtagcacagtggataagtgcccaggacctgacattagaatacttagttttaaatcctggctccagaatttactgcaaatatattcttgtgcaatttacttaccttatctttactttcttatccataaaactggaattttaggccaggtgtggtggctcacgcctgtaatcccagcactttgggagaccgagacaggtggatcacttgaggtcaggaggttgaggccagcctggtcaacatggtgaaaccccgtctctactgaaaatacaaaaaaaattagctaggtgtggtggtgggttcctgtagtcccaactacttgggaggctaaggcaggagaatcgcttgaacctggcaggtggaggttgcagtgagccgagattgtgccactgcactcctgcctgggtgacagaccgagactgcatttcaaaattaattaattaattaataattaaattaaattaaattggaattttaataatgtctacctcagagagttgtgaagagtaaatgaattaacttaaacaaaagaatataaaactattatctcagccccatatggtatctctcacttctatagtattgagactatataattgatttgacaaataaatctgcttgtttcagatgtaatctttataattgatgtgaaaaatattttatttaaaaaatatcttaaggccgggcacagtggctcacgcttgtaatcccagcactttgggaggccaagccaggcagatcacttgaggtcaagagtttgagaccagtctggccaatgtggtgaaatgccatctctataaaaatacaaaaattagctgggcgtggtggtgcacgcctgtaatcctggctacttgggaggctgaggaaggagaatcatttgaacctaacaggtggagattgaagtgagccgagattgtgctgcactccaacctgaacaacagagcaagactccatctaaaataaaaaaaaaagaacaaaaaaaaaaaccaaaaagaaaaaaaatctttatactacctctaaagctgtagcttgaattcctaggaaacaggaaacattgttttcaattctccatcctctctgtatttagtatagtacattactaattttgtggacttcttaatattgctttaatcttgagttataggaactaaattaataagtagttttatcctatcattaaattgctctaaatatgaatcttaaagacttgaatgagtttaaatataattctaaaacttatggtagagcaatataatgatttcttcttctcaaagaagtaatggaatctatcaaaattaaaacagtaatgtaaaatcttggtcgaatttcagatcactgtatcatatatatgtaaattggacaaagataacactgccaagcatgaagtctatggtctttttttttttttttttttttttttgagacagggtctcgctctgtcacccaggctggagtgcagtggagcgatctcggctcactgcaacctccatctcccaggttcaagtggtcctctcacctcagcctcccgagtagctgggaccacaggcacacaccaccacatccagctattattttgtatttttagtagatatggggtctcatcatgttgcccaggctgatctcaaactcctgagctcaagcgatccgctcacctcggcctcccaaagtgctgggattacaggtgtgagccatcacgtccaggcccgatggtcatttttaaccataattcaataccatgtgacaactcaactgctatgtactagttgagaataaacagtgtatgaattatcttcaccaatggaatatctattcaaaatcaataataagggtttcttttttattatttctagtttcttatttctctttttttttcttgtttcagggctttgaagactgcttggtatttgatgagttaatggataaattcagtaacgaccttagtaagtaaggtcaatttctcaactggacatgtactagctcttctgactaattgtgggcttatttctgatcctcaatgatcacaaacctgtgatgtataatgtatattatctccccagrattacatatttttctactaatagtctatgccaccgttttcccatagcaacaactaacacccagaaaaagaaacatagtttcttttgaagtttctatgtggaggtccatgaagtgattcactcagagatwaaagctcagagtacccgtgcttggcagaaataggctgctttctctcccttttcagcctaggtaacaccctctgcctgcgcctcctagcaacagtcccaacgttttggcaccagggacgggtttcacggaagacagtgtttccacagacagggggtggggggagatggtttcaggatgaaactgttcctgctctgatcttcaggcgttagttggattctcataaggagcgtgcaagctagatgtctygcctgtgcagttcacaatagggttcacgctcctatgagaaactaatgccactgctgatctgacaggaggcggagcttgggcggtaatgccatctcaactgccactcacatcctgctgtgcggcccagttcctaacaggccatggaccgagggttggggayagtcaccctacaacacatcctcagaaacacttagaagctccagtgttttttgccctatcaaagattgcatctaatacttttttttttgagatggagtcactccatcgcccaggctgaagttcagtggcctcagtcttggctcactgcaacctccgcctcctctcctgcctcagcctccagagtagctgggattacaggcatacaccaccacacccagctaatttttgtatttttagtagagacggggtttcgtcatgttggccaggctggtctcgaactcctgacctcaagtgatccacccacctctgcctcccaaagtgctgggattataggcgtgagccaccatgcccggcataaattccttttttttttttcattatttttcagttatctctgtcaaatactgaggagccagaggcattttgttcccgcccttccttcctagtcctgatgtgattggtttgcacatgaccatggaggtggatggagggtttgtatattacatatataaaagaaggcacaaacaacagcctaagaactggataaccttttcctacttcccagcatcacgtgctttcaaaggccacctctgattttacacttgtttcaggtaaaggatagactagagaactggccttaaacttacacccagtttcaagtcctgacttgccaacttattaactgtgtgatcttgagcaaatcacttcatctttytaaagcctccgttctttttcatctataaagtggggatgatactctcaacttcagagttgtgaacactgaataatttctataaagttttaaaaagraaaaaaaagcctaccgtaaagtaagttcatagtatatgtttgctgtggtgttttagaaagtccaagaatactggtgcctgggtctgaagagatcatagaattccaggacaaattttctcatcttttttttcttttttttttttttttttttggttatttcccagtcatctctctcagatgctcaggagccagagatattttgtttcctcctttccttgtgctcgcgtgactggtttacacatgacgttggaggttgatagagggtttatgcataagaacacactgtcaacgctggtttggggcactagagaacaaagataaagcaataatatagattaattttgttgtaatttttatttaatcacaacaggaaatgctctgtgtattrtcaatagtcatagattgttggttatacagaatggttatttatagttyaaaaaaattagcgagagcattggtagtgaacgtaccatttaatttgacctgtgtagagttcagcacatttttatagaaggttttggaaagatgtattatttaacttacaggtttgtgtcttcctgtgttctcaagattgagaatcccagatgatcacgcgatttcagacctatccatgtacaattacatagaggtgagtgagaaggtttggctttattccatgagatggttcactgatattctaacaagtgttcttttctttttctttgcttcagcccccatctcatgcatgctatataagaatacctacagataagaaaacacacayacacatagcattccttagacttgggtggattgtgactctggccagtggcaatgaccaatacacattatctctatctacactttaaggacgtttaggaggtaacaaaacctctgataattcacatgcttttatcttagacatttagcaatatgttactttaatgaaaatacaactttcagatgtgtcaacatatttagaaaatctaagaaatgttgaatggccttttcactcataacattataacttgcatatttagagtagcattgattatcctttggaaacttatgcactaaaaaaaaatgcataataccaaaaagaaattcatgttcaggaagattagtactttgaaaaaaaaacatattaattccattttgaaccagtcacatgtaaagctcatggtaagtgattgtgattatagttttaaaataataaaatgaaaggatttacaagataaatttaaagcagagtgaccagctatttgccatctctcctgaagacagaaagaaactggacttcagcttgagcaaaattgcatcagatgtggtagaggataacctacaagatattgtaggctttattgatgtatcttgtcttctcctttaaaaacgggatggctacgacacagtatctgtcctaaaagaaagagtaggtccagacaaacatagctttaaacaatctctttttgccgtaagcaatattacaaaacaaccaggaagcaacagaaaattagacaaatctttgagctcacagattgcctgcagttctggttaaacaaaccctctgctgaaattgacttcctctattgaaccctgagcaaaataaacttccctagcaggtttcgtgtaattgctgtacattttcgaggcaacgtcctatatgaccgacatttaccaaaatggattgggaatgacattatggaaacaaaaaattatttgactactttgtgtttggcattgcgatgagtgggaatgaagaataatactaagtcgcagtgagaaatagctgtatttgttcaaaagcgttctttaagactgtcattattgcagatgcgagcacatgtcaactcaagctggttcatttttcagaagaacatggagagatttcttcatgcgattatgccatcgacctttatccctctctatacaatggtaaggtctggactgaagacttttcctcattttgattttctgtttagctgttaaagaatacacaagaatactttttaaacttccctgcaggtcactttttccagaataagataccatgaggctgtgcagcgttggcattggcaaaaaaaggttggaacagttacattttatttattttttaatgtggtgttttgaaatgtcatagtattatgattatgtttgtttccaacaaatacagaaataatgggacagacaccaactgtttgccttccaaacagaaactgtcctgagtacagagagggaacagtgcttactgaaaaacattacaaggaggtggcaaagagagcttttgaagggaagaatctcaagatagaaactgatgctaatatttctcaactttttactttattttagcaagatgtactgttcttgatttttgcttcatgcaatattcttatgagtttaatttgtaaaattagacagaactgaatcacttttaaaagatctattccaatggaatgctataatacatccattttgggcagttggcctagagaagccattaaatggaaggaattctgattccctagtcttccactttggggattttacaacgtcatttattcaacagacagttttatttggtacataatagcactgagctggcatggtgatgaacatgaccagttcacacctttcacaaagctcagaggctagtaggggatacagacagtggcactggagagagataaactgcccccgaggagaacaggaggggccaggacaggggaaggcggaagacacatgagaaacatatttcagtggagctggaaggcagcacagtgtgtgagaatggtcagagggtggaggcggggctttaaacacctggagtattatcttgagagaaacagggagcccagggaggccagcagactcaggtatggattttagaaagatgtctatatggagaatggattggaagaaatcaaggtttatctgtgcaagatgaataaaacagggcccccacccttaaggagctgaaagtctaaaaggggaaaagataccagcaggcagttagaatgcaggacagtaagtgcggggatagaaataggccaggcaaatccttcaaggagggataaaagtcaatcttcaaacattaacttaagcagaccaaaaattctgatgaccacatctagattattttttataaaaatgattttcactatagctatgttagttatgctaagctactgtccaatctcttgtgatgtgtaacttttacatgtgagtattcaagtagatttctctgtcaaaaaaaaaaaaaagaaaagaaataggccaggatgccatgggaaagcacctgactcaggctggaatgagcctcaggccactgtttacagctggtgtttagtctccacatragtcttagtcacagaggccaccaggccaccactcttctcctggagacttttgggaagcttctgagaaggaatgaatgatgtgtggccccagcacagcagtactcttctaagaattcacagctctttttctaaactgcaaaggttttttaatggctggacaaaagctgactgctaaatttttttcatacagaagacctggattcatgagtttcctgggagagagggagaagggaggctcccaatccttgactttatcttgatcttatcagttcctgatctggtggtcatgcaagtaaattgttgtttcaggttaaagaacaaagaggacattgtttacccctttgttgttaaaaaatgaagtctattttcagattttaatctctggacaaatgaaatgagagttcttgctgtcttacaggtgataaacaaaggactctttttcttgggatcactgatagccatcagcagtacctacctacttatacactacatgtcaccacgatctttcctcygcttgagaagaccatggaactggatagctcacttccggaatacaacatgtttccccgcaaaggccgtggactccctagaacaaatttccaatctcattagcaggygatagaaaggttttgtggtagcaaatgcatgatttctctgtgaccaaaattaagcatgaaaaaaatgtttccattgccatatttgattcactagtggaagatagtgttctgctyataattaaactgaatgtagagtatctctgtatgttaattgcaattactggttggggggtgcattttaaaagatgaaacatgcagcttccctacattacacacactcaggttgagtcattctaactataaaagtgcaatgactaagatccttcacttctctgaaagtaaggccctagatgcctcagggaagacagtaatcatgccttttctttaaaagacacaataggactcgcaacagcattgactcaacacctaggactaaaaatcacaacttaactagcatgttaactgcacttttcattacgtgaatggaacttacctaaccacagggctcagacttactagataaaaccagaartggaaataaggaattcaggggagttccagagacttacaaaatgaactcattttattttcccaccttcaaatataagtattatcatctatctgtttatcgtctatctatctatcatctatctatctatctatcatctatctatctatctatctatctatctatctatctatctatctayatctatctatctatctctatttatttatgtatttagagatcaggtctcactctgttgaccaggctggagtgcagtggtgagatctgggttcactgcaacctctgcctcctgggctcaagcaatcctcccacttcagcctcccaaatagctggggctaccatggtatttttcagtagagaccgggtcttgccatgctgcccaggccagtctcaaactcctggcctcatgtgatctgcccacctcagcctcccaaagtacagggattagagttgtgagccaccgctgccagcccagagttaccctctaaagataagaaaaaggctattaatatcatactaagtgaaggacaggaaagggttttattcataaattaaatgtctacatgtgccagaatggaaaggaaacaaggggagacaacttttatagaaatacaaagccattactttattcaatttcagaccctcagaagcaatttactaatttattcttcgactacatactgcagcagaaccagcaatacacttgatttttaaaagcacatttagtgaaatgttttctttggttcatccttctttaacaggctgctgagtcactcagaaatccttcaaacatgattaattatgaagatgaaacactagagtcatataagaaataaaaattgggcaataaaataaaatgattcagtgtttcttttctatattgtcaatgaaaaccttgagttctaataatccatgttcagtttgtagggaaagaaaaaataatttttccttctacccactttaggttccttggctggggcccctataacaaaagacagattgacaagagaaaaacaaacataaatttattagcgggtatatgtaatatatatgtgggaaatacaggggaatgagcaaatctcaaagagctggcgtcttagaactccctggcttatatagcatcgacaaagaacagtaaatttttagagaaacaacaaaacaaagaaaaagagctttgagtctgtaggggcagcaatttgggggaagcaaatatatgggagtttgccttgtagattcctctggtgctggtctccaggctgacaaggattcaaagttgtytctgaaactcctctttgtcatactgcacatataaaacgtcttttgtttccaacaagaggattttctttttcattctagaattatctccttgataacttgatcagatataggacatgacactgaatagagtccaacagtacaaaaaaaattcagtatgttctagctacttcacacatgtgtacgcgacagttatttttacagtaaggtattttcgagaaaaatgcattacgtgttttggaaaatagagtaatttaaaaaatatatttgaaatgaaaatctccaacacattagaagatgatgatgttagatgcccatcgtgtgccacaagtggttttttcattatgtaaagcacccgttgaattaaaakaatttgtttttgttcaacctcttcctgaggcccaagagcatatgggcaattcggatttcctgctggaccacaaggttctgttgatattacatagaacgggtattccagacacttcttatgatgaaagtccaaaagtggcatccaatttaaggccccatctttcgttgccattcttcattcctacaaaggacgaacttggattacatcaactttggacccattggttttgtcgctgtcgtcaactgacagtgattcaycactggtgatgataaaaatgatggaagaagagttgaaagtcacttttttctttggcctgtccccatctttctgtgacatcacaatgggtctgatctgcatttcacttccagctgctggtaggtctttagcaggcctctggcacctcagcagtcggaggcacagaagctgcaaaagggatcttcgaaactgggcagagaaaaaataaagtggaatattaagtaaaagttgggcactaatctggattaacattcgaggaaatcagttgagctgaatttaagttgttttttgtttgttagcaggtgtggatgtggggttatgtggtcatgctcagatctacctaaatcaccccagagctttatgtcttttattcattctaawtcttattaaccggaatatgtaggaccatttcaataccttgtaatcctccaagcttcaatctgcacacactttctatgagggcaggtacaactattaagagattttgaacattaagtyagtccacaaatattcagtgggcatctactaggtgacagccactgtgctataattagagactttttactataagcatcaaaaacagataaggctcttcctggcagagtttacagcctggtgtacttgctaatgtctctttaattaggtgaagaattttttttttctatcgaaattactaatcagttggggaaaaaaatactatagcagacagcactaatgtcatcaacaaacattgttcttctccgtgtcctgggtacaacatcsaataatatttcttggcctcctttccgcttctcctctctgctgttcctctctacaagaacctgggrggccaacgcctaaagatcataatatcacacaatggaaggaacctagattcctaaatgactgcataggacagatcccatctcctccacccaatacattattagactgaactgtgacctgaaatgagcaataaactctgtattaattcactgaaatgttggggttgcttgttatagtagtcggtccatcatgaccagtaaaacataaatcaaaagttaatgtaattgttatcccattatttagagcgaaataaatgttgaatatrtggactttctcagattaggaaataccaattaaaaatataataaatagctacattgatttctgtcttttttgtttgttttttgttttgttttgttttacagcaaacactgcctgataatgtcttgagctccaatcttatgcaagttagcattcagtttatactcacatttaaaaatatttattttttctatctgattcaaaaatttaaaaaataaaaatatttgtttgagactttattcactaaaccattgtttggttaagtgttaaagatacattactgtaaaggttaaatagagtatgtatgccaaaaaacgtttttccatataaatggtaagctctttgaggacaaggaccgttgtttttatttatttgtttttgtttgtatcttttagacttcctgtttaaagtatgcccttaggaaccagaaacatcaggaccatgtgggagcttgttagacatgcagaatattgggcaaccatacatactgaaggagaatattcatttattacaagatttccaggtgtggtgtatgcacattaaagttctagaagcactaatttatagcccattggctgagagaaagagtgcaacaaataattgttagttaatgtattttaattttgtctgttgagagggtggtccctaaaatatcttaacctctgatagaaaattaaagttataaaccatctcactagaaaaattcatatgtgtgcatactaaaaaattgttataaacaatttccagggtttcagtggctcttctgaggccaactcaaggaatgtttaggtcctatggactccaagtttaaaatctctgggttaaaggaaatagaccaattgaaggcaacaaaacagggaaagaaacactgtcagtgagaggagattaaggcaggtgaaagtgagtttatggagagtgtaagccaataatactcaaagagaaggaaaggcaaaataagaggcagagagatttagcactgaacataataaggttattacaaaagtgccctcttcttccacattcttgagcattagaagtcacagtgattattattgcctgttattattatgacctgttatctttaaaattccaatggagtaattaagcattatctttaacttttaaattctctgaaacgtagaggctcagctttataataatcattttgtgggctctcctagccatgactcatagccatcaagtcaaaacctttcaactacagaaacagatgataaggaagttcctcttctttttgagacagggtctcgctctgtcgcccaggctggaatgcactggtgcgatagtgggtcactgcagccttgacctcctgggctcaagagatcctttcatctcaggcccctgagtagctgcgactaaggcacatgccaccatgcccagctaattttttcttttttttttttgagagagcggggcatctcattatgttgcccaggttggtcttgaactcttagctcaagcaatccttctgcctcagcatgcccaagtgctgggtttactggcttgagccaccacaccaggcccaggaagtttcttgaaccaaattaatttaggctagacatttgctgtggcatgtgaataacaacccaggccaattgctacaagtatctataaccccaagtgaggagttataagcactggatttggggatttgagcaaactaggttcaaatcctggcaccaatacttcctggattgggcaagttatttaacttctctgaacttattcataacccataaataaaacaaggaataatattagtgcctattttgtggagttttgtaaactggcttgtaacttgtttgtgacttgcttgtaacttgcttggtacagtaggaattttaaatgtattattaacattgtagctgttattactaggcataaactattttctgatgaattaaatattagttttactagaattctacctaacaagtgtgaatccctatgggtagttcttagaattgttatgattttctttggaaatattctacatttcttccagatccctttaattcctaaaaaattcttgttttttttttaattgaagcgactctgaatcacctctgtaaaagtattacactgtcatttccaactctatgcccagggtgaaaacaatcagttaattgcaaagcttacctttctgatcatgaagacataaatcactggattgtatacagtgttcgatttagcaaagaggtacgaaacaatagatattgttggagtgaccaggtgaccatgaccattaaccaccaagaagcagatcacgatataaggcatccaacagaccaggaaggtgaatatcattaaaaagcacattttggccagtttcttttcatattttaaaatcttgatcacttgaattgtctgaagatcttccacacaacgaagctgcagaaaggagaaagaaaggaaagggcttaaaaaacaaaagaagggtttcttttgttgtttttataacagatattcagacaccattcttggccccacctaaatggaaagagaactgaatggcaccttggcaggctgacttctgatccaagactcatagctgagtccagctttaaccttgccgggcctcagtctccccacttacaacatagggtggttgagctacagagcctcctacatccttcagtgttttttttgacgttctcttatttacttaataagaataacattattttgcctagatcttcaagtctctaaaagacagcctgagagagtcacgataaaatgcaaagaatttccccgtgatcctggaaactctatagagtgttagtcctccagttctcaaatcagactgcacacccatgtcatgtcaggtgttctgcatgattaagcctgcagctggccttgatgagcacttaattcccaagtgaattcttactgaaaaccagcttttcaattcactgctaatgactgtaaagtagaatttcaggagaaatttgtttgtgattggcttcattaggggatcacttgcagagaacagcacttggtaaaacaactccttcctctaaaaccagcctgtctactcgcagtctgttcccattaaagggatggaggagtaatgatgtacagcctgaaagttctttgagtttcttgaatatgtttctttttgctgtttctcctattattatatatgtgtcataataatacacaggcaaagaatatttctgcacaccaaaaatgtgttcctaaatcaaaatagttctctctaaacattgtaataagttatatgaattatactacaaaaatacaaatactctatatattgattttttaagtagttagcatatagttaatacttagtattgattactttatgcctggaaatttactgcatttcaatgaactctaagtgtaccttttggttctagcattatcataaaaattaagagaaagaatttccaaagaaatcatttagaacatgtgcttagattatttagaaatatattttaattaaaattctcaaattactgatatccaaaattatatttaagaaattatattcttatcaaaatcatgtattcagattagcaaagaatagagagaaataggaaaaatttaaatcattgatttttttagggtagagagactatgtgcagggaaaagtgggtattaaatttctggtattagtttggtgcaaaagtaattgtggtttttgccattaaaggtaaacctttgaaggtcaccttatttaaaggtaaataatattcctttaccactatgccaattactttaaaaaatcaatatataaagtatttgtatttttgtagtaaaattcatataacttattacaatgttcagagataactatttttatttaggaacatatttttggtgtgcagaaaggtaaataatttacctttaaaaaaggttacctttaaaggtttacctttaacggcaaaaaccgcaattacttttgcaccaaccgaatactactattctgtgtgtgcaattctattttaaaagaaactgttttatttaatgggatagaatatttttctattttcaaaacatcattttgggggagcttccctagtttataggaaggctgtggggttttgataaaaggtctagatttggaattagaagatctaagtttatatcccagattaaccacttttgctcgcagtgtgatattgagcaagtcaacaacctcctctaagagtaaacaagaaaggaggtaaagcaaaaaaacctatgagaattaacagaacttgagttccatttccacacgtatgactttgtggggttgtttttgaggttaaatacttatttatatttgaactagatatgagactaacacacttgtatgtatatgtacatttatgatactataggatatctggaatcattattgactcttcagagtttcaattaacaagcaacataaccacatctcagttatctgcctcccaaacctccagtatttaggtccaatcgttttatctgtaccattttctgggcaggtcagtctttatcccctctcgccatttatcaaaggagaacactcatttatccatcttggaattacatgcatgctggggaaattaatttaaataaatgtttgtctatacatccccagttcctctttgggataaggagaagatattgactaatgttttagattatttgggtttatatatgtgaagttttcatgattattttttatttatctttttcaggcctctttctttcattactttctattccttcattctgctcattaaatattttccaaataaaaaactcgatttcatgtcttaccctctttattcaatcatttgaggatagttttcaaaattgctatggatgaagcaattttgaaatgattggcacaggcacaaatttgtcctaaagaatgaaccagctaagacaaattcttcagaattctctatcagattgttctctggctgtataaatggctggtgcctagtgctccttaatccaagacatctgtagattttcaaagaatttcactgtgaatcttcattctcaagtgtgtagctatgtctccatcgttgttatgagtcacctctctctgaataaggaaacggaggcaaattacttgcagtgagctctctgtttagatagcagctaaagtcaaatctcttcacactttcaccccttctcctgtcttcccctttctatgccctctgcttgtaactcattccaaaaatagtcactgattacctactacatgcagacactgttccagtcacaggtgagaaaatacataagacccagtctctgctcttgaggaattcactatttggtgaggatgatgcacactgagcgggtagaagccatgagggaggtaaacagggaggatatggtagtacacaggatgggaaactggttctgagggtgggttagagcaagaaaatcgtgctgttagccttgtgagggaaggaggaattagtcaagtaaggaggagagacagaatgttccagagaaagaaagtgtgctaagacaagaggcaaaataaaaagtcagtttctgaaaacaagaaatattaccattggccgcatcatgaggtggcaagaagacaggagtgtcaagaaatgaggctggacaggtagacaggagatgccatacaggacctgccggccacacccaggggctttattttgagtcacaaagacagtggaacttctgaaggtaatacttgagaacaactactctgatggcagtgtgtaaagaatggaatagaggaaagcaaaaattttaaaaaggagaactaagttttttttttttaactgagtctgtggcagtgggagaggaaaaaatggatataccaaaaaatatagggctaggagcagtggctcacacctgtaatcctagcactttgggaggccaaggcgggcagatcatgaggtcaggagttcgaaaccagcctggccaacatggtgaaaccccatctctactaaaaatattttaaaaattagccaggcatggtggtgggcacctgtaatcccagctactcaggaggctgaggcaggagaattgcttgaacctgtgaggcggagg

SEQ ID NO: 96005 - DNA, 36347 bp, Homo sapiens
tttccttccactagagaataaatttcctgggggaccctctctgtcttgttatctgctgtgctcccaacacctagaacaaagtgtggcagagtaggcactcaatatttgttgggtaaatgaagaaaagtctagtgaagaggcagaagcataaacaattacctatgaaacaatatactaagtgtcaaaggctttgggagctacattctaaattgtaccaaatagaaaattccatactgtatcactcccagacaggacaataaaatctcccacttttctgaaaacctgtaagttgtgagatttttttaggcaaggacgactacacatgaactggtattagatctctctagaccatttctcaggagtgcagagaagtgtttgtattttgttttcatgtgcgaaatcagctttaaagtagaggtttcttggaagtaggaaacttgaatggatggaaaatgcctttaataaccaaagttaccacagtttttaaggtatccccagtgctgatgtatctcaggatcaggatggatccgctagaattacacagagtaaagaggactctcggagcctactctaaggcaggcctctggggagaaaatgtaagttattttttttctccttatcatcaggacaaagcacaccatgagcaagtatgagactccaacaagtgtggatggaaattaatttgacaaatctgaaaccatctttgcaaaattatgactgagacagtgaaagagatctaacttaactgactccatctcgcttctaaccaggttgtccttgttcattcctgggcataggctgaactaactttgggagaaacttagtttatagtttgtggtttgtgacagataacagccctttcccggggctgacttccttgttgcctggagactagattgcctttgtaacactaacattagccataagattggaaattatggtttgggagtcatgcagctggaggctacaagattctgaccctccctagactgctcctaagatcagtgcttgagatatttggtgacccctgcacttgatggatcagctggtaccactcagattgatgaactggctcatctgatcttgcagcgccccccacccaggaactcagggcaagaagacagcttggactccttattatttcttccccgaccatcaggactcgtggctcactggcttccccaaccaagttgtccttaaaaactctgatccccgaatgcttggggagactgatttgagtaataataaaattccgttctcctgcacagctggctgtgtatgaattactctttctccattctaattgcccagtcttgatgaaccagctctgtctaggcagcgggcaaggtgaactccttgggaggttacaaaccctctttctatgactgtaagtcatcactgagtattccaaaagtaggtggagctgataaactgatagctcaggcctggcagctatagattattcttgtttcaaatgggtatcactgccatttgaataaactgtgaacaaggtatatctctttgactgaacatagaaatgagtggaatagctcataagttgttctgtccaatgacagccactagccacaagtggctacttagatttaaataaaagccaaataaaatttccttagtcacactgtaaccaagtatccccatttttctaagagatagtttaatgatttttaaaaaatctctcttcttttcccccttctcctcacttcctccttagctctttagaaatgcaattgtagccttttacctcctctttatcagacactccctatggggcaggttcatctaactatgtgcttagaagctccagagaggaactctcacccaccgggaggttgccttgagagacaacagcctatctacaacccaaagtatgcctgctacaaagctttctcttacctggagagttttggccacttttacaacccagtcctgcccacaaaaggcaccagcagtcactgtccagtagataaggcactgaaggtagtatgcagaccccccaaccactcgcttcctcccctcgtgccattcatgccagcattccatgccccatttcaaaagcaccctctttctgctccaaaagtgaaatggtacccttaaggcagaaaacctgtacttcctcccctaaggtagctttggaataaaatatcattttctttataccagatctcactcttgttaagtggactctgcaagcagcgagagagtgaacctgcatttgggttacaacactaactagtttaagtgctcaatagccacatatgtctagcagttactatactgggcagtgcagagacattatcacagaaaattctattgcacactgttgctcaggcactgatgatttcagccccatgttgtggtgagtgatctgctcttggaaaggacaatatagtggactcactttcgggtgccagcaagggggcaaaactgaggcttttttgagactcccaaacagctaggagggagggaaaccagacaaaggagctgaaaagttgttccacttcatcagaaactgaaaggatgaagggatatgggttcactgaagatatttactgctttactaggacttgatcagaaacttgatactttaaaaatttgactttgtgctgtttgcaacttgattctccttaaatttttatttctgaaaataataacctattttatctgttctattaggaaacaaggagagggggttttggtcacactggggccaaagtttagaaggtagagattatatatgcaatagcagttaacagaagcaaagaggggaatcttaaggcaaacgtgacaatgcaagggaaaggaaatggaaaagacattcttttccatgcggagatttcctttagaagagttattgtctactcaaactttggaggatttgtgtttcttttggtaaataatgtgatttctttttgtagaggatgtatgatgtaaaatcatggactttgcccttaagggaaccctcttgctcctccactcttccattgttttatgtaatgaaacccctaaagtatactctgacttcagtttcagcttataaattagatctgccctttaagagccatttgagttgcagtccctccagtgctatcttttgcatacccaaattattgggggcgctgtagtttggctaacttttaatcattcagagaactaggagaagcagacatggttaattactaggattaatgatagttaataagagcaaacatttactgaacatttactgtctgccaaacactatgctaacagcttaatgcttaacattatctcatttaatcctcacataatttcaatgagccaggtattgttatttctgttttatagaaaaggaaaatgagactgtcagactgagtaacttgttccagattagacaactagtaaacagcagaatcaaggttcaaacctaggactgtctgattctagagcttgcactcttatccactactctggacaagaattttaaactatattaatattctgatttaaactaattgaaatcaacactagtgttagcaatttcctattgacagatcagttaaaaatgtttcaatgattatagaatcataaaccgaatagagaagtaggccttttcttgctgttttaagtagttcagaaaagccctagtgtagtatattggtgtgactagcaggtctcagaaacaaatgcattcaataagtccatttggtgtttttcatctcttcttctctcctgtgagagttcctggggagatcttaatgatgatagttgacatggatcaaaggcagacaaaacataagggagaaaacactggaaggagcctggctgatggaacagaaactccctgaagaatccacacctgaatgattaaaaagcatcagcctagcctgtaaagtttgaagttgaatattcgtgaggaagctaccctcctacttgttgatgaggcagagagaaaggttcaacttgtcagagaaattgatgcttcctgccatattatattgaaataagaaccagcttgttatccactctttttttttctttctcagcaacataggtttaggctgaacttatgttcatatagctgcacaaatctccacgggtatgaatataaatctatctattcaaatagactctaaaggtttcttaggttatttctcttctttctagaacttaagtaaggctttgatcaccactgataatacatccgttagttaatgcgtgtagagtttccagtctaaaggcaaataaaaagtgaaaaggggccggcgcagtggctcactcctataatcccagcactttgggaggctgaagcaggcagatcacctgaggtcaggagttcaagatcagcttggccaacatggcgaaaccccgtttctactaaaaatacaaaaattagccgggcgtggtggcaggtgcctctaatcccagctactcgggaggctgaggcaggagaatggcttgaacccaggaggtggaggttgcagtgagccgagatcgcaccattcactgcactccagcctgggtgacaagagcaaaacttcatctcaaaaaaaaaaaaaaaaaaagtgaaaaggcaggaacgctgttgttcacctgctgttttaggaattttgctcacgtacagttcaaaatattaagaagctgaaaataaagtacctggtcatgtgtggaaaaacttacagctaaaaggtgagatgaactgggtctagaaggtcggattcacgtgaaattaaaagggcaacgaaagccagaacttaatttcttaaaaaaagttaaaacaggccgggtgcagtggctcatgcctgtaatcccagcactttgggaggccgaggctggcggatcacaaggtcaggagttcgggaccagcctggctaacaatggtgaaactccgtctctactgaaaatacaaaaattagccgggcgtggtggcgcgtgcctgtagtcccagctactagggaggcggaggttgcagtgggccgagatcgcgacactgcactccagcctggccgacagagcaaggctccgtctcaaaaaaaaaaaaaaaaaaacagttaaaaccctcaaaataatcccacttgttaaaatacaaaacctgaaaccatttcagtttcttctgcaaaatgagttggagagagtagggttgaaccaggcatgctctttcgggcctttcgacgctgacatcccgggatattacaccaggttcaagataccagcttgcggaaagagagctgctaaacttgaccatatgctttttgcacgacattcgacagctgtccctcccttcaccagctcttttaaggctgcaaatatatctgattcacgtgagagtccctacaagttagtacaacgtcaggccccaargaggcgcccaataaatgttggcattgcagggccagatcccgagttccagttcagaaccctgctgaggtcaggcttcctccctgcctcccgcccctcaccacacccactcactcccccaagtaattaagtctaaactggggcctgtgcagtgattggccgcgccgggtctcactgcggatgaacttgacttgttccaatgatctgtgacagacatctgcagacagcgcccttaacagaattagggtcaggctggtatcaaaccccaggaacgccaggcattgcctcaaagtagatgcaaaccgttaaatcttccaggactcagaaggaccagagagagccggatacctctggttagctacgcggtccccagtaaagcttattcccctcttcctcccagtgtgtcttgttgccagagcaactgtgggcgtcaccgagctgacgggcggaaacagaacagaaagagtacacgtccccagctcattgatagggccattgcgcagacgcattaacttttctgagttgtagttgagtctgttgatgcagtccgcgtctgcgcattagttgttacgcgccctggccggcctcagckcctgcgcaaattggcacaccggggagggcggagttaggtcacgagggtgcgcatgcgcaaacagcacatccggtgtggtcgacgggtcctccaagagtttggggcgcggacyggagtaycttgcgtgcagttatgtcggcgtcggtagtgtctgtcatttcgcggttcttagaagagtacttgagctccactcckcagcgtctgaagttgctggacgcgtacctgctgtatatactgctgaccggggcgctgcagttcggttactgtctcctcgtggggaccttccccttcaactyttttctctcgggcttcatctcttgtgtggggagtttcatcctagcgggtaatggttctataagtgatcataataataatgtgttactttggtgtgctgcttttgttttcatagtactctatatcagaccaccgccccttgaagttatgagaagagcctgcattgcccttttgttgtgaatggggaaattgaggctcagaaagcttagattatatgcctaataccaaacggctscgtaggagttggacttaaaagtctaaagaaaccaccttcgtgccgctactccacttggtgatccacttcacttaatattggtccggggaaaaccctattccaactttaacttaggtttaacacaactctaaaattagtagacttttcaaatgaaaaacccaaccttgaatcatctctgtcatcttggcctaatcattaccaatctccggtgaaacgtttcaatgaaagtgcaaagaatataaatactggtgcttttcttgttgaatcatcctttacttgattttgccttttagctgctactactttttttcttgttgaggaagctgttatttcactgtcctgaacccaatttttgttcacataactctattttagccttatttttccttttgattccaggatttggtaaccttgtagactgctatatttagcgagaacagtctccatcaatttttgttaaaatctgacttttcttgcccaacggggattcagtgaatactgaaaacaggcgtggcctctatcactggtatcacctgctactttgactttgaaaacatgccagcattcatggtttcttttcagtgtgatcatcagtcaggtcatcagttgtattttcagtccaatatgaggcattatggtaaaagctttggcacatgttctttatccgtaaagagtttatggtctagttggggtacagacaaaatacagcattggaattgtctggaggcctggcacagtggctcatgcctgtawtcccagtactttgggaggccgaggtaggcagatcacttgaggtcaggagttcaagaccagcctggccaacatggtgaaaccccatctctactgaaaatacataaattagccaggcatggtggcacacacctgtaatcccagctactcgggaggctgaggcagaatcgcttgaacccgggaggtggaggttgtagtgagccgagatcgtgccattgcacttcagcttgggtgagagtgaggctcagcctcaaaaaaaaaaaaaaaaagtctggtgacagtggtgctgtgcttaaagttacagacctatagaatrcttattgtacatttacattgttctgacacaccagagatatttcttagaatttaaaacaggtctgaggatctaatgayttgtgtactgaagttgcagattagccttttgattggatatttagttaccatctttgacttttgtcctagatgaccaagacctagttgtctgtggtggcgtccttgccttcaggatgtgttaaccatcatccgaccagatacactacccctttgctctaagtattctccaccacccacccaccgccctctgccacggtactatatgtttttattagccagcccggagaaggaaccttgatgagaacttttgatttaattttgtttgatgtttttgtttccaggtctggaagagtaggagcaaggcagggtctgaaagctgattttaaaaaagatgccttctccatgtagaagtcaccctgccttcataagcctctagggtctagaatgatttttcatggatgctttgaagaatgtggtttgctgaagagtgggcatggactagagttatagattatcagtgtaataaagccagaaggtttttttgagcaaatgactttcacttatgccaagacctgtttttgagcccgttgtggctgaaattgaattggcagactggactgcctttctcctctccagtgggaactaggtggcttgtcattgaagaaaaacctagtaaaagggcatattagtaatggggccaataagggggattaggatttccagatctgttagataacagataatagagctatagaaatgaaagcaacttcaagaaaagaagggattcatgataattcttagttgccacagaagggtatgatttacccttcttttgacagcattgactttcctaaatcctgcctcttctgccatttgttagcctagatcatcaactggagactggttttaatgggaaatttggaygcttatcctttgttttgattgttggcaaaggtagccttgttcctttttatggtgctggggtttctaactttcctgtggaatttcctgttgcaagagaatggaggagtccagtgagctgggagagggaaatgtaggcgatactgttgaaggattaggtagtgctgggtgctagatgtttgaatgccaggccaaggaatttggactttttttgagatggagttttgctcttttttctcaggctggagtgcaatggcgatctcggttcactgcaacctctgtctcccaggtttaagcaattctcctgcctcagcctccgaagtagctgggattacaggcatgtgccaccacgcccggcgaattttgtatttttagtggagacggagtttctccatgttggtcaggctggtctcaaactcctgacctcaggtgatccgcctgcctctgcctcccaaagtgctgggattacaggtgtgagtcactgtgcccggccaggaatttggactttatcctgtaggtaatagtaaagcttctgaagatgctttttttttttttttgagacggagtctcgctctgtcccccaggctggagtgcgccatctcggctcactgcaagctccgcctcctgcgttcacgccattctcctgcctcagcctcctgagtagctgggactgcaggcgcctgccaccacgtccagctaagtttttgtatttttagtggagacagggtttcatcgtgttagccaggatggtcttgatctcctgacctcgtgattcgcccgcctcggcctcctaaagtgttgggattacaggcgtgagccaccacacccggcactgagggtgcttttttaaagaaaggaaaagatttaaaattggtgttagcatgtaggatgaattggagggaaatgttctttaatcttctctatttttttttggcagtctattctcttctattccctctgcatgtgttagtttagcatatgctctttggaaattgaccagtacattttaaaccaattcagaacgctaccaaacctttaaaaaacctgttgttattgggcctgatggtatgaaaatagtctgttttcttctattccctcatagctgagagacttaaccatggtttcaagaaggaaccagaggtagaaagttgtcattgagagatctttttttgtgtgtgttttggatcatcagagtataatatattggctttaaaaggacctcagaggtagaatatttttctatttgagacagatttcaaacatccagtagctgactgtttatcttgtagttagatatctctagaagaggacatctgtcccttttttagagttatattccagtgttggcaaccctttagtttccttttttgcccaactgaaagctgtgctcatttaaagtgctatttaggagggataagtagaaaacattaagactgtcctcaaaataagtctttggtcttgaaacaagttttaattcatttcccaactttcatctgttctgttctctaatctatatgaggtaattttgtcttaaaaaatagttttgtttttcctagtttacaaattcaaaaccagtttgaatctgtaaggcaaggaggcctagtccagagttttctgtctcacgggagctattaggctgttgtggactggggtccagcatttcttttggaattatccatcagatctgtggatcctaatattatctctcataactgttatccgagagattagaagtttgccacccatgtgcctgatagtcttgtttctaaatatctttcatatcattgctactttttcatcctctgttttagcctctcaatatctcttatgaagactactgtaatcctccttactggccttccggcctctggtttccagtccatcttctactgtgtttgcaggcttgatttgacttgcaaatctgattgtgtcactcccatgtacaatttgtgtttcccaaagtaaaattaaaactttttttttgacatacaggctctttcatgatctggcttcctcgctgtctgcagcttcatctcttgcctctgcctcctctatactctgctccaacagtattgagctacttgtcattctctgaacactctcatgtgtcaaactatttgcctttgcttgactgccttcaaaattccttcactttttagacttctcagctcaagtgcaatttccttttttttttgttactgtttttaaagagaacaaggtcttgctatgttgcccaggctggcctcaaactccttggctcaagcagtcctgcctcagcctcctgagtagctaggactataggcacacagcactatgcctggcttattgccctttggaacccttccctgactctccagcagattgaggtctttcctctgtattcctttttcaccttgtatgtgtgtgtgtgagagagatatggcattgtgctgtatttgggtgtctgccttctctctggaaggtgagcccttgagggcaggggctgtcttctcatctctccatcctcagtgctgaacactgtatatgttaaatggtgagcaggcctatagtcatgtcaggaatagtgagcaatgatgtgctaggttctctgccaaggtgctgggaattcaactgtgaagcacacagacgtggcttctactctcacagagtttgtaattagtgggaaatacagacaagtaaatatggatatggtgctgatggagaattattggtgagaatgggaacacaatgtgcatccaaccctgcctagtggtcctgcaataatatttctcttatacattcgccttcctamagtaggcttcataaatcactctatttttcctcttttcctttattcttagttggtgatcttgcttttattttttcactaaaaaaaagaagtagataagaattccttcatcttttcaccactgaatcataacagatcacctacttttatacccatactctctgacttctcatggtggatgatgtgtctctttcctgtgaaagctctgcttgtgcagaggatccagtcttcccttgctcactcagggactccgcttctgcaattattcctctgttccgtgtcattaatttctgtttctctcctggatcattcccatcatacaaacatgttctaatattgtctatttaaaaaaaatccgtttgaccacagataatcttctagctaccatcccatttcctttccatcattacagaatttcttgaaagaataattaatgttcctacttcctcccttaactattcattccttaacccactcttggtattggtctgtcctcrctacttcactgaattacttcactgaaactactcttgccatgttgcaacgtttagcatttaatgtaggtattggcttctgtgtaaaaggaaagttttttcttgaatacaacactctcctgcttgttctgtctcacctcactgctttttcctttctgctgttttgtgctgggcgcttctctgactgagagcatggttgtagataccttcactttgtatttttttttaaatagataaacttaaataacacctgtatacctacaactactcctttatatttttagttttgaactgtcccccgaattccaaattagtaaatccagttgccaacttgatgtcttcacttgatgtctgatatgtaccttgaacttaacatgtccaagatcaaacctgctcatccagccatctgcctcttcaccagttagtacgtggtgtcaatgttggttgtggttttttttttttttttttttgagacatartctcactctgtcacccaggctggagtgcagtggcacaatctcggctcactgcaacctccatctcccgggtttaagcaattctcctgcctcagcctcctgagtagctgggattacaggcacgctccccsatgcccggctaatttttgtatttttagtagagacgaggtttcgccatgttggccaggctggtcacgaactcctgacctcaggtgattcacccacctcggcctcccaaagtgctgggattacaggcgtgagccgccaygcccggccggttgtgtttttaaatgaagaaatttaagtttccggggtcccttgatttctcttatctcctgcatctgtttcatcagcaagctctgtcttctccaaaatatagcctgtatgtctttatttctgtccatttttactaccattcccctgagctctttgggtcctaagtaattcttctgcttctttttattttttatatttttgagacggagtctcgctctgttgcccaggctggagtgcagtggcgcgatytcggctcactgcaagctccgcctcccgggttcacgccattctcctgcctcagcctcccgagtagctgggactacaggcrcccgccacaatgaccggctaattttttttttttttttgtattttttagtggagatgggtctcaccatgttagccaggatggtctcgatctcctgaccttgtgatccgcccgcctyggcttcccaaagtgctgggattacaggtgtgagccactgcgcctggcctatttttatttttatttttatttttttgagacgcagtctcactgtgtcgccaggctggagtgcagtggcgcgatctcagctcactgcaacctccgcccttggagttcaagcgattcttctgcctcagcctccctagtagctgggattccaggagcctgccactgcacccggctaattttttgtattttatttttagtagagatggggtttcaccttcttgaccaggctggtcttgaattcctgacctygtgatccacccacctcggcctcccaaagtgctgggattacaggcgtgagccactgcgcccggccttctgcctctttttaaccttgcgaaccattatactgttccaccgctcttataactgaatccatactgttttctgaggcttaccatgcccctcaggatttggcccttgtgtccttccccttgatcactatagtcttgttggtctgtccttgatttttttttttttttttttttttttttgagatggagttttgctcttgttgcccaggctggagtgcaatggcacgatctcggcttactgcaacttccgcctcccgggttcaagcggttcttctgcctcagcctcctgagtagctgggattrcaggcatgcaccaccaagcctggctaattttttgtatttttagtagagacggggtttctccatgttggtcaggctggtctcgaactcccgacctcaggttatccacccgcctcgacctcccaaagtgctgggattacgggtgtgagccaccatgcctggcgtctgtccttgtgtttataacatgtcaagattgttcttactgtctagaatgctctgcccccagatttttacatggttggttccttatctttcaaatattggtcttaaatagcaagctcttaaagagaccttctgttatgattgaatttaagaaaagcttcccagtcactctttattatcctgttttattttcttcatagtacatatctctacctagtagttcctggtttatttgttaacttattgattatatgtttctctccataggagtgtaagttccttgagagccagactgttttgttctgtgccatattcctagcacctgaaatgatgcttgtcatgtagtagatgtttagtaaatattttatggaataaatggacatttaaggggatagagtaaatcagaattgctaaaatggaacagactgcttgaagaggtagtaaatttccatctttggaagtgcccagggagagactgaaggatcattggtagtggagcattttgaacaggcttttttttttgccttttttgtttccaatgcatctgagagatgtgatatccttatcagtaacacaggctctggaaagttgataattctccatctggaggtggcttaccagattctgtaagtggtgagtatactttggaaagcttcccacgtgattagtacgcctccccaagcatggccaccccctaccacctcttgggcattgtatacatcaaatggggtgttggtgtttatgacctctgaggtcctttccaactttgtgggactctgattcatatgttttcattgaaataatctggttaccatgatcacaataataataacatcaatttattaccttatccaccttcatggataatttttctttttttccctcatatttcctcaaaactcaacaccgtgttctttactccaatgaccactattaatagttttctatttcttcagatttttttctagattctaactgaaatgacaagataattatgtatatcattatatgtaaataaaatattttactttttttttgagacggtcttgatttgtctcccaggccagagtgcggtggcatgactgtggytcactgcagcctgcaacctctacctcctgggctcaagcaatcttcccatctcagcctcccgagtagctggggccataggtgtgtgctaccacacctggctaattaaaacattttttttgtagagacagggtctccctatctttcccaggctggtctcaagctcttgggctcaagcgatcctcccaccttggtttcacaacatgctggggttacagttgtgagccaccatgccctggccaagtgaaattaggaatgggctgggtgtgggggctcatgtctgtaatccctacccttaggcaagcagaggcgggaggattgctgggcaacatagggagaccttgtctttaccaaaaacaaacaaaaaaattagctaggcatggtggtkcatgactgttgtctcagctactcagggggctgaggtgggaggattgtttgagcccaggaggtcgaggctgcagggagccatgattgcaccactgcactccagcctgggygatggagtgagaccctgtctcaaaaaaaaaaaaaaaaaaaggattggctttttttcacttaataagtcttagatatgtttgctgtcaatgtacagagaatttaccttattcttttgaataattgcatgggatttcattgcatgtcagttgtatagtttaatccccttgatgtttagactgttttaatttttttttcaactttacaaacatactttcagaatgtctttgttctgtaagataaattcctttgtcaaaaggtaaaatcattttaaatattaatggatattgctagttgctctcccaagtggatgaatgaatctgtactttctacagcaggggtttacactggttacccttgcttcagtcattgtctttaatatttttaagggtctggatacctgaaaggatcaatggtgcttccatggtgtttacatgtttaagcataatgaaaactgttgccatggtgacaggctctggagaactagtctgatagttttctggcctttggattagatttgtttgttgctttttcttagttaatgatgggatgatgctagcctgaagcgagtttaggttttcttaagcaatgtaataatttatcacaggcataaagatacttcggaagagtgtattcctggaactgcctgtttttttttttttgtcaatggtgactgtwagaatcttcaaggggatrgagtgtggcagtggagagttctcatgaattatctctcttaggtcttctgccttttttgagacaaataagcagctgctagaacttcgagatcaaagatagtttatcgagaactgtgaggttctcaagaatgagcgtgctatctttataaactctgctacccattaaatgaatattctattagaaaataattcacatttttataactttttatcattcagccyggaccctttgttgttgcctcaagtgcatccccatctaggtataattagaaacctttaaatcagcagrtaagagagctttgtgggttttttggttatatatttttttctytgagaaagcctctaggtttcagtgtaactctgagaagtaatattttttttcctttaacagagtgcgaaatttaattgtacaacttgataaatttttaaatgtacctgtctaaccactatccagatcaagatgcaggacattaccagcaccatagatgcctccttgcatcttcccagttatcctctccctgtgaaagataaaaaccactatcttgccatagattggttttaccaagttttaagctttttgtacatggaatcatatagcatatactttyttgttttgttttgttttgagacggagtctctcttgcccaggctggagtgcagtggcgcaatctcggctcactgcaacctccacctcctgagtttaagcaaattctcctgcctcagcctcctgagtagctgggattacaggtgcgtgccaccatgcccagctaatttctgtagtttttattagagatggggtttcmccatgttggccaggctggtcttgaactcctgaccttaggtgatccacccaccttggcctcccaaagtgcggggattacaggagtgagccaccgtgcctggcccttgttttattttttaatttttttttttttagatggagtttcgctcttgttgcccatgctagagtgcaatggcacgatcttggctcacctccacctccacctccaccaattctcctgcctcattgcctcagccygccaagcaactgggatcacaggcatgcgccaccatgyccggctaattttgtatttttagtagacaaggggtttctccatgttggtcaggctggtcttgaactcccgacctcaggtgatccgcctgcctcggcctcccaaagtgctgggattacaggcgtgagccaccgtgcccggccttttttttgtttgtttttggtcaagataaaacatgacaaaatttaccattttaaccatttttaagtgtatagttctgtggcattaagtacatgtacattgttgtaaaatcatcatcactatccatatccagaacttttttgtcttccgcaactgaaattcagttcccattaaacagtaactcctcatcctcctctctgtcagtccctggcatctaccattccactttctgtttctaggagtttgactactcttgatgtcatataagtgaaaccacatggtatttgtccctttgtcatggcttatgtcacttaaaataatgtcctcaagattcagccatgttgtagcaggtatcagaatttccttccttttaaggctgagtattccattgtatgtatacatcacactttgcttatccgttcttctgctgacacttgggctgctctcaccttttggctattgtgactaatgctgctatgaacatgggtatgcaaatattgcttgagagcctggttccatcccccaccctcccaacctcccagatggagtttctctcttgtcacctaggctggagtgggacggagtgatgtcggctcactgcagcctccacctcctgggttcaagcgattcttctgcctcagcttccctagtagctgggattacaggcgcctaccaccacgcccagctaatttttgtatttttagtagagacggggtttcaccatgttggccaggctggtctcgaactcctgacctcgggtgatccgcctggttcagcctcccaaagtgctgggattgcaggtgtgaaccactgtgcctggccgagatcctgctttcacttcttttggatatgtacccagaagtggaattgctggattatatgatatggcaattctgtttttaatttttttgaggaaacgcartactgtttttcacactggctaccctatttgattttcccacttgttagtgcacaagggtttcagtttctctgcattcttgccaactcttgtttttttgatactagacatcctaatagaygtgaggtgatatctcgttgtaattttgatttgtattgccctagtgattaatgatgttgagcatcttttcatatgcttgttggccattcctatatcttctttggggaaatgtctattcaagtcctttgcccattttaaaatctggttattattttgttgttaattgcattgtaggggtactttaatatattctgatattaaccctttatcagatawgtgatttgcaaatatttttccccattccgtaggtgccttttcactgttgtgccctttattgtacctttatcacagaagttttaaactttgatatagtccaatttatctatttttactttgttgactgtacttttggtgtcatatccaataaatcattgctaaatccaatgccataaaacttttgctctgttttcttctaagagttttttagtttttggtctttatccatttcggatttaggtctttgatccgtttcgagttaatttttgtagtatatggtataaggtaagggtccagcttcattcttttgcctatggatatccagttttcccagcatcgttggttgagaagactgtttccccattgagtggttttgtcagtttggttgaaaatcatttgattttgtataygagggtttttgtgtgtttcttaaaaaacaaagcaattaaattgattcattttttaactgtagtaaatgtatttttaaaataaacttataatggaaaacctgaatcattatccctaaatagaaggtcacactaaaaataccatggagctaggcagatgtrttcacccgtgcctgtggtcccagctgctcaggaggctgaggtgggaggatcgcttgggttccagtccrgcctgggcagcaccaccagaccctgtctcctgccgagttctcagtggctctgtgtggytgcatccyagaatattcctcatctaattgagggggtacatttgttcccccagcatatacacttaggctctgccctgtggtctctgtgtgggagctgggcttttttgtctttggcttcctctgggtacctgccaggttccagctggtttggccagccagtgtgtattttttaagttttgtccgggcacggtggctcatgcctgtaatcccagcactttgggaagccgaggcaggtggatcacaaggtcaggagttcgagaccagcctggtcagcatggtgaaaccccgtctctactaaaaatacaaaaaattagccgggcatggtggcgcatgcctgtagtcccggctacttgggaggctgaggcaggagaattgcttgaacccagcaggtggagattgcagtgagccgagatcatgccactgcattccagcctgggtgacggagcgagactctgtccccgactccccaaaaaataaagtttttgattgtgttgcccaacttacttgtgcaattcatccatttttgtgtatagcagaagttctttttcattgcagtataatattctattgtttgtatatgctataatttatccattttactgttgatagacattagattgtttccagtttggggctatctgggtatcatttctgtgtatgccctttgatgtatatatgcattcatttctgttagagtagaattgttgggtcctcgggtatgtctgtgttcattagcatatttattttatacttctatataatcatttttttgtgttttgcttcttgtgcagtttgcctgagaatacagatcaacccacagaacaaagcggatttccaaggcatctccccagagcgagcctttgctgattttctctttgccagcaccatcctgcaccttgttgtcatgaactttgttggctramtcattctcatttacttaattgaggagtaggagactaaaagaatgtaagtgatgatcatagtccttgtcctataatgttgattttaggaagagaaattggatgggactggttttgwtcatggttggccaggctcccatactgctattgacatttgcagaattttccattggtctgcaaagtatgcattaatatcatcataattcatcagtgctacygctcttggtcattgccttgtctttctgttcttcaaatcattaaggtaatagaaaattaatgtttgtagctagtacaataatttctgtaccaatractccacgaaaataactcrgagattttggaagagacataaatggtaggttttgcctttagatttgttagttaatttttttctgattttgatctcagatgacttttaatgctggaccattgttttcatagcacttaaatttgatagcatccagtgtatgttgratgaatgactgtgggcatttgctaatatgtgccttaaagtagaaataaatggggaaattgggttaacttgggagaagactttaaaatataagatgggatgctgcttggttcatttgccattttcacttttttagcagtagagttctttctcccttctcccaaacaaactcttacaaaaagaatcttggtatataaagcagaagtagaattggagttttttttgatggacagaaattgaaaagccctctctgcttggccttcatcacatatggtacgccctcccctaaatcgctccctcccaagcagagttctaaagctttaataaatatatggctgttttccataccgtatgtcaacactgttactttatatatgagacaacagaggcctagaacaatccattggccttccctggccacatagttaagtgtttgcagtgaagtgccctagtctagcggtgttcttggccccgtactccttccggtatcccatgtagcttactgatgaatgcatgcaatctttgcctttgcattgcaaaatgtaatgttctgggtggtagagaaaagagaaccttaggagatctcatcctatttgggggaaggatatcctaggaccaacctcttcctgtcaccacttggaaagctgtcatttttatactaaccagcagaaatctagtataagagttagagcatctatgtgcaaagtggatgcaataatgtgrmagtgactatacttccttttctgacatgaattagtcatttacttataatatgttacctaaatcctttcctttgatactgcctcaaaaacagttctgttagttcaggtaaggtatcattttggtagtggtaagttgacagtgaggtttatttcagtgaaaaactttttttttttcttttctgtttttttttttttttttttgagatggagtctcgctctgttacccaggctggagtgcagtggtgcgatctcggctcactgcagactccgcctcccgagttcatgccattctcctgcctcagcctcccgagtagctgggactacaggcgcccgccaccacgcccggctaattttttgtatttttagtagagacggagtttcaccgtgttaggatgatctcgatctcctgacctggtgatccgcccgccttggcctcccaacagtgaaaaacttttaagaaccactttgttctgttattttaatacaatttaactcattagacacctgattaagacttgagttatcctcttcctcccttcctccctccccttctatgtgccagccaatgtcttgttgttgggaatataaacaatattgttggctgggcgtggtggttcatgcctataatcccagcactttcggaaggcgaggtgggcgattgcttgagctcaagaatttgagaccagcatgggcaacatrgcaagaccctatctcaattaaaaaaaaaaaccyaaaagtgtggcttctgccttcaagacatgtacagtctagtaggggagaatacgtaaacataacagttaaaatacagcccatttagggcctcgctataggtttgaacaaagtgctgcaaaaatccagagaagagagcagctgtaccatctgggagcagggacagcagatgagttatctgagcaatggataacagctattgctagttaaaatgaactgttaccagtggataaccttgaatgcaggtagaaaactgacccaccaacattgaccttctcacgcttgcaaatatgagtaacccttgggcttcctgatagagccttctggaaaggtcatgtcttctgattgcttactctagatttctgaagttctttttttctagatgagtcatggtgtgtacttaggaaggggacacagcaaacattycaaggatgttttctaggctcagggagataccaaatcatggaaaattatttcttagggctgtcatgattggaggasgactctactgcagagagcttagtatttcaaaattatgacaaaagcaaagacaaaaaagcagtytcagcagaaactgtgtactgcagaccatrttaacaacctaggaccacctgctcagctgggaattatgggcccaaagcatagcaaaatcctcaatcccagattgcagtgttaartctttctatggagagtatgttcatagaaaaatctttctctctgggggattgcccagattgtttttcatagagatccttcatttgaattatactatactgtcctgctctcagtttttaaaaatatacatttatttgctccttttatgtgcttctaactcagctatatgtgcactgtgccacagcactttaaaaatarttccaagtaaattctcaatatttataccagctcagaaggtagaacaaaacagattgaatgtctttatattttccaactaagttgagagtttgatattaaaaaaaaaattctgtaatatagctgatcttacatgaatttgggggtgacaaactctaacctactctgaaagaggcaggtcaaaagaaaatggcattgggttaaaaaaataaacaattcaaggggaagtaaggaagttaacagataatgagtgctcagtgtgtgctatgctttaagtacttcttgttctatatcattttattttcagaataatttcacgaggataggcttgctgttctcatttacagatgaggaactgaagttgagagagcctggctaggatggctgagcacggtggctgatgcctgtaatcccagcattttgggaggccgaggtgggtggatcmcctgaggtcaggagttcgagaccagcctggccaacatggtgaaacctcgtctctactaaaaagacaaaaattagctgggcgtggtggccggkgcctgtaatcccagctactcgggaggstraggcaggagaatygtttgaacccatgaggcggaggttgcagtgagcccgaattgcaccattgcactccagcctggcaagagtaagactytgttttytaaaaawaaaaaaaaaaaaaaaaagagccccttgctagaaatcttacaactaatgtatctatccaggtgatcaagaaagactcaatattttttattttttagactatacaaatgaaaatacaaaagcaaaaattctcccagtgagcttctgacccccagaaatccatgcacacctgaaatgatcagtttttggtgtgtaggtggcggcatatttttgaatgaatccatgacagaaagaagctcagtggatttcagtatttaaaaatgtatatactttagttttttccatgtttgttcttctgtgtttctttgtgaaattctttttttttttttttttgagacagagtcttactgtcttacccaggctagagtgcagtggtgcagtcttggctcactgcaaccctgcctcccgggttcaagcaattcctgccgcagcctccccgagtagctgggactacaggcacttgcccggctagtttttgtatttttagtagagatggggtttcactctgttggctaggctggtgttgaactcctgtcctcgtgatccactcgccttggcctcccaaagtgctgggattacaggcgtgagccactgcacctggcctgtgaaactcttttttwwaaaaaaaaaaaaaaatctcagtccatctcaggtgttctgaagggtaatgaggaaaagaaggacagaactgtattggatcacagtttgagaattaaagttcctgatgaattgggccctgggtcagaaggaagggtgaactgggcccaaagggacaaaaccttgcttgaaaatgtgctcagctcccagggagatagttgccaaatgcctgtgccttgttagcattgttttgtttttataatggagaccattctctcacaagtcttaaaaaattcagtgtttgatcctagctggaacaagggggctacaggsttgggcagaacattttaaactctgactggcagcactgtttacaaacatgaaattrtgttggcttttcgaattcagttaaagtatagtaatctagaaaattacctcgggaaggggaacttgatgttattctgtgggctttgctgccacctagtggatggtatgtttcatgtgttgagmggctrctacaaaacatgaggagttgagtttgggggaagaagctactgatacctgtgttaaaaaacctagtttctttccagtcattggggggcagcagaggtccaggwgggtttagatgctgggttgggggttgctttacattctggccagaagtgggcaatgtcgagttaggaacaaaagggcatagaaccctaaagtggccctagattttgttgtgtgggggaagaccaagactgtgcacatagacccgcaggtttcccgtttgatttctttttttcacctccttagtttgagagcttctttttttggtttgttctacktcttttattctcaatggtgacctcccackcaataatctttaattttttgttggtggaggggcccatttagtttttatttcattttctctttgatatttccaccttatattgaattaggtcctgccgccaaataagctctctcagagggaactgtcctacatttgtaggaaatctgaggtagtcacatcataacttttttcaactcatttttctctgtttagaaggtgagattaattatatatttttttatgtgctggggtctcgctatgttgcccaagctaggaactccctggggtcaagtgatcctcctgcctgaggcttctgtgtagctggacctacaggtgtgtcacagtgcctggctctgagattagttctttacctttcattcttaaaactttgaatctacttattttatttgctaaaaagtgctaattgatgactttacttgtttattgaactctattttatatttggtgtatttaaggctaccaaagaaaaaagaatatcgaaatagatttatatttatgaatttcattgctgccctaacttactgccttattttctccatcctcccagcttggatgactcctattccaagtcattcccacccctcaggttgcataggagcccttagtctactgcattcctccagtgctgcacttatcacattgttatgaaactattcattcactttcttctctctcccactggactcaattgtgaacagtaacagtgtgtgtttgttgaatgagtgtatgaatgaataaaccttttttttttttttgagacggagtctcgctttgttgtccaggctgtagtgcagtggcatgatcttggctcactataacctccgcctcctgggtttaagcagttctcctgcctcrgcctcttgagtagctgggactacaagtgtgtgctcccacgcctggctaatwtttgtatttttaggagagacatggtttcaccatgttggccagtatggtctctatcttttgactttgtgatctgcctaccttagcctcccaaagtgctggaattacaggcatgagccactgtgcccggccaaataaacamtttttaactgcaagaaaaagttatgttattaagttacttggatgctaaaacatggaaagtggtacgaaagaaaaaaagccaaggcaaagattcataggagaggctgtggggtggggaagagcatgagacaagaagtcagaggaggggctggtgcggtggcttaggcctgtaatcccagcacttggggaggccaaggtgggaggatcgcttgagcccaggagtttgagaccagcatgggygatatagcaagaccttgtctctaccaaaaatcaaaagaattagaggggcgtggtggcgtgtgcctgtggtcccagctactcagaaggctgaggtggaaggattgcttgagcgtgggaggtcacggctgcagtgaactgtgatcatgccacttgcactccagcctgagtgacagagtgagaacctgtctcaaaaaaaaaaaaaaaaaaatcagaagacttgtattgtaggctttgctctgttaactagttgaatggacaaataaacttacctctgagcctcagtttctctgtctgtgttgtgagaggattggtctggrtgttcatcaaagtctcttgccactgttaatgcctctcagcatgattcttgatggttcttttgtgtttgaggaggattgtactgtttttgtggatcctcatttgggctttgctttctgttttctccttaatcgttgctttttattcatattttcagattcccattatccatttataggaggcagaamgttaaatgattataacaagatgcacatatttgtatgaagccttttacaaaaagtaaacatttgtaaaatgtcttctagttcccacgttaacaggcttgtaggattcacatacattccacatatacttttacatacatcagctcatgtgatccttccttcctacccagtgatgtggagacagacaaatagtagtattcctattttacacttgaggtaattacaccttggtgaaactttagttgatgtatccaggccctggaactaataagtgactgagggggaactggataacagacatttggactctaaacctttatattccttcctgttatgtttaggactctcagatgatggctttatatatatgtcatgttagagggttttcattaaaaatattaaacttttctttttaagaaatttttatttattttaaattttcatcagagccatcagactggattcttttcttttttaaatgggaaaaatttggcagagattgataggaaaggatgaaggccggctatctcaaatgtttctgcatagttggccatacttaatatggtccaggagaaatggaggagaatgcaggtcaggagacctgactttggctagggagggtgatcctggaccagcacygtccaacagagctttytgcagtggggaaacattcagggtctgcaccgcccattatggtaaccastagccacatgtggttattgaacatttgaaatgtggctaacagactgaagaactgaatttttaatttaactttgactaagtttaaatagtcacctgtgwctagtggctgtggtgttggacagcacagctctggacagatttgtcaacactatcaggttacagttttctcatctctgtaatgaaaggattaaagaagctgatctctaaagctcctttcattttttagaaatacacagtctgtgccttctaaaactggtgattcaaattgagctgtaaacctagaatttctgcagaatggtctttgattcacattatttctaatttcagttttaattgggtgactagaatccaggatgagatgaatttgaaggaaaatcagtatttgaacatatctgcccagtgctagtgtctgaatagagatattgctggagaagaatacagattccaaatagaaatgaccctggctggcattatcttttctatctctacagcgtcatttttaacagttctttgtgttatgccttgctttctttttagatgattagaacaaactgattaaatggcactgtcttctgcccaggtgaaatagactgaagtcacgctaacttttctcagtaggtgtcttcattttgcatgtcttgatatcaggggaggagattttattagtcagtttcctgaaacctttatgccctggttaatagttgaaaccattcttcttagctgttgagtagtcaattgtgtgagctaatatttcaaagaatcctagaacctctgcttttagaatagtgtctggtaaatagatctgctttaaaagaggggaagcagatctttgtaaacagaattttctgaaaaccactatcaaagagacttactctcatgagtcaatttttgcctttcacgtggactggcctcagcatcttagatttaaatgttttaatataataaaatctttaaactttgattttgtactaaactaggatttcttttatatttctaaaagtgtcaaggctttgttcactgaaaatggcattatgatctagtcctctctcaccttggccattagaamtgtaatgtagccaggcatggtggcctgtgatcccagcactttgggaggctggggcgggtggatcacctgaggtcaggagttygagaccagcctgaccaacatggtgraaccccatctctactaaaaatgcaaaaattagctgggtgtggtggcacacgcctgtaatcccagctactcagcaggttgaagcagagaatygcctgaacccgggaggcggaggttgcggtgacccgagatcacgccattgcactccagcctggacaacaagcacaaaactctgtcttgaaaaaaaaaaaagctgtaatgttatattggctgatagtctattgccagagagtttgctttaagaaatttgatggaatgaataggtgagtttgaataggtctgtttggttttgtttggcactgtgaacaccttttgcttcctgttattgctctttcttttatacatttcttataataccactgattcaggaatgttctgcaattatgtagcatttctgtaaataccaktgttagtgaaataaaagcattctggctgaaagtccaaaatctctcctttaagttctgatgccagaatctccaggttacttacttgacccaatataccaaataaggtagtgccctttttcctcctggggcagcccggttcttctgaaaggtagtatttcccagcctcttttgagtcayggtacacgtaggagattgcagtatttttatggcacactgggaaaatcagttgcttatagctggagacattggagcccctaaggctggaggtcactttccaaccagagctgtgctggagtccagtaggtgggaggctgtgctttgagggactaaaggaagcctgtatcttgtggtgagggttccacctcacaagttacagatctcagttccatttggctctagcagcaatgtggccacttctgttgcggttactctttcttcacctttttcttgccaaaaataaacttatctttaaatgaaaactaaattatttcttatattttggtcctttgttatagctgagattgggaatttttctttctttcttgaatccttacttccctaccctgcctccccaccaatggaaatctgtgcttcataagcattttagattccagaaagctctttaggttaaactacaaccctctcacctcaaagaatttgtgggccagggaagtcrgtgacttatgtgaagtcttgcggctaattaatggtagagctggagttaggacacatgtctcacagttcctagttsgttttgctttgatgtgcttgaaattcagttttgacattaatttttctggatactactcccataaaatgttctttgaaaaatacttgcttctttctagtttttctcgcctggtttaaatattgtcctgagtgtgggaaccccataactgtcttgtgggttagaatttagatggaaggatttggggccctgtctctagtatcataagacatttaaccttgctgcttttttcttctaggttcactctttsaatttcctggataagagttctggagatggcagcttrttggacacatggattttcttcagatttgcacttactgctagctctgctttttatgcaggagaaaagcccagagttcactgtgtgtcagaacaactttctaacaaacatttattaatccagcctctgcctttcattaaatgtaaccttttgcyttccaaattaaagaactccatgccactcctccatatgcctctggctctgtttttattctttgctggtatcagaatcctttttttctcttcagtcctctgtgctgaactctttatgagttggtaacttacagctgtgaacctgcctccttgttttcattaagtatatttgaagttaatggcaaaaggcagtgctgacaaccctgggaaatggcagtcctttgtcttcttcctggagcaggtaatcctttactaatccttcgattgttacaggtgcttccactcttatgacagtgcattcctggaactgcatcattatgcactctgctagaaattgaactaagtatgtgctaccacatttacatctgtttcaacatgttttagtggtaaaagtgaaatatatttctcttaggcaatgtagacagagtgaaaaatgggggttatgtatgtgttgacttataagatacaatattttccaaagcaccttcacaaatattctctcattttattcttgcaattatcttaggggttcctgtcctcattagttaggtgaagaaattgaaactcagatttgtgacttgcttaagatcagagttcatgacaaagcttgggtggaatgtaggtctgctggctgaagtctgtcatgttcgcagccctgttttcatcttgggtgctgttgggttgctatatatggggcggaagctatgttgagaatgccactacttaaatttagccaactaccgagaatgatgagtttcaagcttctccaacttggctgcacgttagcatgacttgggtaatgtaaaaagaaaatcccaacgtccaggccacaacccacaccaattaagtaaaaatcgcttggggtggcttctgtagtttgtaaagctacccaggtgattccagagcacagcaaattggagaaacactgctctggattcttgctactcaaaatgtagtcattgactaccagtattggcatcgcctgggagcacaggcctcaccccaaacctacagaagcaacatcttcattttaacaaggtcctcaggtgatttatgtgcacaataagatttgagaatctctcatctacagcagtggttctcaaagtttggcatgtctcaagattacctaggaacttggtgaaaagcttgggcctgtatgtttcttattagctctctgcctaactgrtaacacactgagtcaggagtccgcaagcttttccttaaacaaatgggcatggctatattccactatcactttatttataaaaattggttgtggctatgtgggtcatggtttgccattcttaagtgatactagttcattgagattatgactgagcagtttaatctgcacttttttttttcttttttgtttttgtgagatggagttttgctctcgttacccaggctggagtgcaatggtgtgatctcggctcactgcaacctccgcctcctgggttcaagcaattctcccaccccagcctcccgagtagctgggattataggtgcacaccaacatgcccggctaatttttgtatttttagtagagacagggtttctccatgttggtcaggctggtctcaaactcctgacctcaggtgatctgcccgcctcagcctcccaaagtgctgggattataggcgtgagccactgtgcctggcctaatctgttttaaaacttatatacagatgtcacagaccctatcaggaggcttcyggataatttttagtctagagaaattggaattttgaataagaaaagcatctggactttgagacacgggttgaaaactgggaataatagtaattttatgaaggaagacattgtaattgcagtctttaatacataggttttgtttaatttttcataatgatcttgagatacatgggacaggtattaaattcccatttaccaggtcagctattgtctcagaggttgtgatttacccaagccagttaccatcaacaggaaacattcttctttggtgtgtcttttcaatatttgcttcggggctaaaacctacagactgcttttggagtgttgggattagatttagttaaaggctcattataggtaactcttgtttttatgcttctgttgatttgctttatggttctcaatttgacatgtactgaagaattagctgtggacctgtgagtagccgctgcactccagcctgggcaacaatgtaagaccctgttcttaaaagaggccaggcatggtggttcatgcctgtaaatcccagcactttgggaggccgaggtgggtggatcacctgaggtcaggagaccagcctgaccaatatgatgaaaccctgtctctactaaaaatacaaaaattagccaggcgtggtggcatgagcctgtaatcccagctactcaggagtctgagacaggagaattgctagaacctggtaggcggaggttgcagtgagccgagattgtgccattgcactccaccctgggcaacagaagcgaaacttcatcacaaaaagaaaaaaaaaaaagacaacactgaaaaagcgccaggtgctcagtggcttacacctgtaatcccagaactttgggaggccaaggtggaagaatggcttgaacccaggagttcaagaccagcctgggcaacacagtgagtccctgtctctacaaaaattaaaaaaattagctgggcgtggcagtgcacctctgtagtcccagctactcgggaggctgagtttggagagtcacttgatcccaggaggtagagactgcatgattgcaccactgcgcttcagtctgggcaacagaacaagaccctgtcttgaacttaaagacacacccccaagccccattgcgtttctgattcttaggtgttttttcagctgaagtatgttgaaggagttgattttgagtactactgcatggagagtgaggtagaccctagcatttcctgctcccccttgctcaacacctctatggggtggtttatttttattttctgtgctcttttatggggccggaagccattcaccacaaacactgtggaaagtctattccctgccattctttgcagtggtgggaagcccagccctgagcacctcctgcccacacatttcctggcccctatcacatggaaaccatctctcttgttttcttctcttagcagcctataccttcggcctcttgtgatcacatcatttcatcttgggcttcaaaacacttttgttgtgatggctagaaaatacttggggaggtcacagaggcgtgctccctggtgttggaggttatagaggccagggagcttgtttgcaaacttagcgggagactctgctgctctcctatcttgttgggttgcagctcagctctgggcgtctgtaataaaagtttgtgtgtgaaatgacttaataactacggttaatttaaaagtttttaacaaatataaaaaatagatttctcctgtgggagaaaacactttctagaacaaggatcttagaggagagagtaggaaaaaagtgggaggaagcttatgaagaaggactaaacaaagtattttatttgcttacattgattttataggtaggtccaagttctgtcaatgggatttttaaaaagtattttcaaaccaccagagaggcagcctggtgttgcggaaaacactttgatctgaaagtgttgattcaaggacttgttctgccacttactgtctgttgaccttttgtcgctaaaatttagcaaataattacacacttaggctctgtgctaggtagtgcatggcattagaaaagataagacacagccctatcctgtccaggagtgagcgagcgtgggccacatgtctggcaaactgttaagcgccctcctgttacttgcgtttccctatcattgcatgaaggaggtgggtggcattcttatcttcctgatgaggaaatggagactcagcaagtgttaggcttgaatcttatttctgtctagctgaaagcgtttgggttacgctttgaatgagataagtcataaactcagcatggggataataatacttcatactgtggttatcccaacaaaacgttaagtgaaaatatctgaatgtaattgctctacaaatgtatcattcctttcagtgctcaccagaagctctgagggttccatgacatactgcttttctccctcagctgcacatccgtttcactgactttcagctaaagcactgtggtgaccaatggcaggcctggctcttcctgggagaagcggagagacctccctaggagccccgtttgagacctgctattcaggcctgttaaatcccagggataaacaactttgtttttaacttttaattgaaattttccctcatgcctgcgtatacatgcacgtcaagaggccagcaagctcccatatgtctaacagcttcaatgattgtcaacatttaaccccaatctagtgtcagggtataaataagagacatctgatggcagagctcattctttctgttattactccttcctttaaatttttgcttaccatgaattaagtgctacagaaatgatcagaacggacaaggcgcctcactttctgagccttaaattccattagggaagagagccaaattattacataaatgaaataattttgttgtgagtggagtgaaggaaagaaacagtaaacaatataatgtgacagtaaatggggctggggagggagctgcttagggtggttaggaaggacctctctgaccaggtgacctttaggctgagatctgacagctaagaaagagtcagcgaagggaccagccatggggagtgtgtctggatattagttatccccattggcatatgcttgagtagtggataagtattgccttgaggccacaaacatcaatttttttttttttagatggagtgttgctctgttgcccaggctggagtgcaatggcgcgatctcggctcactgcaatctccacttcctgggttcaagcaattctcctgcctcagcctccctagtagctgggattacaggcgcccgccaccatgcccggctaattttttgtatttttactagagatggggtttcaccatgtttgccaggctagtcttgaactcctgacctcaagtgatctgcccgccttggcttcccaaagtgctgggattacaggcgtgagccaccgtgcccgacaacatcaaatatttattgagggagtgcctcctaaaggtacagagctctgccttgccattctgatctcatcctgaagggggatcaaatccatgcaggcagagtcaggaagagggaagggccacggaggcaggaaacaagacacttagtcttagggggcctgggaatgccagtcaattcatgctccttcctctgatggctgaatctggaaccacttggtatttctgagtccacagagcttggtggaaagcctgggatccgagtctggtggggatcagggcctagttcaccgtgatcctgtgcaagccgctccatgtgccttctgatttgtaaaaggggagagaatactctgtctaccactggggtttatcattttgatcaaaagagttgatgtttgctttggtgttgtacagatgtaggatattgttaataaggagtccagataaggatgtcgttccacccatttcccttggtaaatcactggaataacttgggtcagcaaggataaggtggacaccttagaggttggtaaaaatagaatcttgcagcctccactggaaagaagtcccttttaaggtttacctactttcctcccatcaaggctggaagcatgaaatggagaccaggtgctccccattatgtaaaccatattccttcatctacctagactctcttaggtcctgccagccttgtcttcttacacttatatgatcttcctctaatattttccttttttgttgttgttgttgctaaatttcatgtgggtggttcggggaaagggtagacttgcactcctccccactaatcagtgggattttaggaaggctttgaaaatgggaaggatcctcccctcagatcctatcacctttggaatgggaacatgcccacatttccagagcgaacagaca

SEQ ID NO: 96006 - DNA, 47296 bp, Homo sapiens
  misc_feature (1)...(47296): n = A,T,C or G
aaaaattactgagactaacttacatcagggaagactttacgtaggatgtgagtctaagctgagcttttacagatggacagatggacaggatttggatctgcagagaaatgtcaaagggcaatttttttttttttttaagatggagtctcgctctgtagcccaggctggagtgcagtgatgcaatgtcggctcactgcaacttctgcctgccaggtccaagagagtctcctacctcagcctcctgagtactatttttagtactatttttagtagagacagggtttcaccatgttggtcaggctggtctccaactcctcacctcgtgatccgcccaccttggcctctcaaagtgctgggattataggtgtgagccactgtgcctggcccaaaggacaatttatagtgaggatccagtgtatttacttgcttcattcaggattcagatctttaatctctatgcattcattcatttattcatcaaacttttactgagtgaccacctatgcaggtactagacattgtgtgtgtaaagggtacaaatatgaaaaagagtgcttaatatgaggtgtctttaaatgaataggcattatacattccctcattttcatctaggatgctaggacacatatatttagccaagcaaattaagtaatcacactgactttaaaagcaccttccatggcatcgctatttaacagatatgttaaaaatccaccatatcatgggcacaaaagatacagtggaaaaatcagacacagatcttgtattttcggggcttacagtctagttgagagacagtcgtttaaacaagtaattacaatcacatgtgcttgaacacacattaggagaggtagagagaaacctccttgagtgcacatggcaggaataattaatctcactggtaagtcagggaagaagactggagctgctgaggtgtggcaggtggaattctaagatgatccctgatgatccttgcctttgtgtaatcccctccccttgagtgggagagacctgtaacttgcttttaatcaatagaacatggcaaaggtgaagggatttttgcagagatgattaacatccctaagcagttggctttaaattaatcaaaagggagaatattctgggtgggcctggcctaatcaggtgactcctttaagagaaggtctagaggtaagagacttaatgaagcagagattctctctgcctccattgctggccttgaagaaggaagctttcatgaattctatagctacagatgaattccaccaacaaaccaagggagcttggcagcagatgccgtcaagtctccagatgagaaagcagcctagataacacctcgatctcagccttgtgagaccctgagcacagggcccaactaagccgtgcccagactcctgacccatgaaaactgtgacatagtacatgtgtgttattttaagccattaagtttgtggtaatttgtcatgcagcaacggaaaaccaacccaacgacagattagacaggactaacttgccttcctggagaaagacgatttcaagccctgaggctttcaatagcattgctgaacaacaggacccctgttgacttttctgtatccttcatgtgagatccaggccaagtttatatctaataaatgaggtctcctccctgcctccttcagggtttcctgtcttgtactcaatgaaactatctactcaatgttagagttgacggcaaaaaagtgcgttcttttccctactagtctaaatgtacctcactttatgcaactaacatgatactgacaaactttacaaaattatatttttccaagtaggattcagttttctcatttttcagttcatttaattaattagccaatgatcacggagcagctactacgtgctaaacatggcgaaagactgaaggacagtggagagttggctctatcctttgaggagcttaagaaagaagtctcatgtaccagaaaaagttaaagagcgatagaacactaaaatctaaatgtaggaatgaaaaagtatttcctgagtgcccaggaataatgagttttattttgattttacaggcttcttcctcagaaaaaaaaaggagggtcttgggagtgttcttggcttccagctgaataaatacatgcaacagtagtttgtagtgttaaccaatcatatgcaaatcttrcttatttggaattttggaataattttgaaaatatcgagatgaaactgagttacccaaccaatgcctcaacaaattttatttaacaagtaatgtttattgaacacctgctatatgccaagccctgtactaggtaccgagaatccagtggtgtgtgtgtcagaacattttaaaccataactaatagaaaacttgatatgaatgacttaaacaataaacaaacttattatctaaccaaacaagaaattccaaggtagatcagtttcagacttgtagaaaacgttatttttatcttttaagagatggagtcttgctcagtcacctaggctggaatgcagtggcgtgatcatcactcactgcagcctttgaagtcctgagctcaaatgatcctcccaccttagcctcctgagaagctggggctacaggcatgtgccaccatgcctggctaatttttagtgtttttctgtagagatggggtctggcttcattgcccaggctggtctctaactcctgacctcaagggatcttcccacctaagtgttgggattacagatgtgagccattgtgcccagccagatttgcagaaaacagataatgcaacacatctcatcagcataactaagcatctgagctctttgtaattttccattctcttttctttcagacaatggcttgttcttagttgtctcccctcatgattataagacagctgccatattccagacacatctcacaatgctgtctagtagagaaacaagtgctgtttcttctcatgtgttttattttttatcactggggaagaaatctttcccagaaattcttagcagactttccctcctgaagcgcatggcttcaggaaactggaggcttgaacagaactggggttctaccaaaaggaggaaggcgaatggacagtggctgaacagaccgtctactaacagcaccaagtaatgattaaatagactgcccctgcattgagggacagaaacaatgtcacagatgacatacagttacaaactgtaacaaatacatgatcagagagaaccgtgcacatagcaaggtcatggatctagaaaggccactcattgaggaagtgaaagatgagtaggaactagccaggcaggcttgggggaagagtgttacacgggcggaggaagaggctggctcatatgaaaccatgaaaggaggcctgtgtagctggagttcttgggagaggaggaggggaaatgacctggaatgagcacagggcagcaggcagggggcttcctgcagcatgggaaggagttcgggttatatcctgagagcagtgcaaagccatggaaggtttaaaaacaggggccatgaagtgatctgacttgtgtttttaaaagctcaatctggatggagaggcaaagaaatgttaaaagactatcatgttcacctgggagttgatagtggcttggcctgagtggtgacaggagaaggggagggaaagtggatgaaatggagcatgaatggctttgctagtgccctgggggatacaaacatgggttagcccaggacttcctcctgaggcacactatttgaggtgctaagacttgcatgcacatacattggtgaagagtgattaagggccacatgggaggtgcggagaaggagatgcaggagttcagaaggcgagatcatgggtttgagcgctttcaggcaggactgatttcagggcagtgtgttaaggagagtgctattttagcaggccttcgaaggctatgcaaggtgggtttgaaggtgcagacatgggagagggcagcctagaaagaggaactagcacgagtcgcacagatgcaggaatgaaggcatagcgggagaagagtaagcagcagagtttgtatgggattgtgaaggaaagttctggggataaggctagaaaagtcttggcagtcagattaaggagagttctgagtgtcagggtgggataataggagggcaaaaacattttttaaaaatgaagtctaatttagctacaaatccatttggttttctcaggaataattaatgtgctattcaagtcctgattatttattcactagatggaatagcaatacctctttctgccatcactgctacctgcaggtcatttaccaatgatttctaatttcttttagaatgtatcccttcatcatgtattgagtatctgtgctagagatcctagaatgaaaaggcatggtcccaacttccaaggagcccatgaattgagcagataaagagataaattgcagtaagtatgatgcaagtttttgggtaaaggtggtacaaaggagaggaaaattctcctactacccagagttcagggctagatttagcacagttggtgacatttaaactgggctttgaaagatgagtaggagtttgccaggcaaagaagagagctgggaaggccttgtaaacacaggaaaacaatctggacaaagacacacatgtcttcttaattctcacaccttcaatcctacaagcactgtggagtatacatttttaagttttattttcaggcttttaggggaagcttggtgataatgagtgaattctttcagttgctacaaaacaagagtttgcatctaagtatttgacccccataaacatgcattttacctaaaaagaagcctggattttagcaagccaaattggctataccctttacccccagttattcctctgggaggttttactgatttttacttttctggaaaagcaaggaaagaactcttaaatctgttttttcagagactagtaaatccattagtcatcagtgcaggactttcatctcttcaatttttcactggaagatgggagaagtcataattcactgtcatgtggctcccaattttgacatttgcaggaaattggtcccctctgaacttcatgaatgttcataaaagttatttcggctgggcacggtggctcactcctgtaatcccagcactttgaggggaggccgaggaggccgaatcacctgaggtcaggagttcgagaccatcagcctggccaacatggtgaaaccccatctctactaaaaatacaaaaattagcagggcgtggtggcaggcttctgtaatcccagctactcaggaggctgaggcaggagaattgcttgaacccaggaggcagaggttgcaatgagctgagatcgtgtcactgcattccagcctgggcaacaagagtgaaactccgtctcaaaaaaaaaaaaaaaaaagttatttcaggcccagatcagatggatctccaaagattatcctgtctcaaaaatttgttaatgataatttcagctcaagataaacactaacatattaatacagcctatgggattacaaaaaagtgagcaaggaattcattcaagactggaaagaattatcctctcatctgacactcccatttaacaagggtgtggaaatcaaggcccagtgacacaggattttttctccatcactttgtaagccaggaacctctggctggtgacaccctgcccaggcctcagtgggccacactacctgctgcaggagatggcctgcccactcggcctgggtggggagttttattgagtgatgaaaacagctttcagtggagaggggatgcaggggtggttcccctacccaaaggcaggaaagtccccccagtgcgggtgagtctggggcttttatgggctcagaataggggaggggcaggacataggtagtactggaaaaggcaacattcaattggttaaaaggcattagtcagaaataattaattgggaaagagcagacaaacaggaacagaagttctcactctaggtcacgggtttcatttgggaccagtagcctagtctttcagccttcaggctgtttttggcttgaaggtggggtttcaccagggacctgcccctatctgcctaggcatttggctgcctcctgtcattatcaccagggaggtgcctctacctgccaaggttaccctggctctagaagcagarctttggccagaagctgccacagaacaggggtgggagagagaagaggagctgggtgacagagcagaagcattttggggaactgatccttcaggcagcagctgatgtacttcctctctcctccacactccacccctactcgccctctctctctctgctkctttccttttctctctcatggtagggttatgagtcagttgccaaaaggtggggacatttcctgatgcatttgcaacactgagaagttatcttaagggaggctgggccccattctactcatctggcccagaaagtgaacaccttgggggccactaaggcagccctgctaggggagacgctccaacctgtcttctctctgtctcctggcagctctcttggcctcctagtttctacctaatcatgtccctggtggaggccatcagcctctggaatgaaggggtgctggcagcggacaagaaggactggaagggagccctggatgccttcagtgccgtccaggacccccactcccggatttgcttcaacattggctgcatgtacactatcctgaagaacatgactgaagcagagaaggtgagtgsaggtgcctctttccgggcctcctctgtgcatttgttattatgattctcaaccccattgcatttcggaaacctaacctctggggagattgaaaagaacaaaagttgcccaagctccacccctagacagcctgatttaactggtctgggaggggccccaggcagccagttttaaaagctytccaggtggagagcaggtgaggggcagccagggttgcctctttctccatcttctaaattaaaatcattctacaagtgtctttaacacctttgtgaaggctgtcctagtcgtactttcttctacacagaactccttctgggcacagaatctctatctatcccagcgctttacacctgattattgattctaaggcacctcttttggctttccaagactttcatgtgtgtcgactttgcctgctcaagagatttaagggaggcacttacaaaaaatagcttttatcccaagtgacaattctgatcaattataaaggagactcttttaaagatgctgaggctggcaagaggaaattgtactgtgattgactagtgatgtctgctgggggcatggtgtgggatgtctcgcatctttttcgttatgttttctcactcaaataccatagtatggagttaagcattctcgataattatttttttgattggttgtggtaaggtggaaagggtatggagtttggaaggagaagatctaggatcgaatcctagcctctgtctctctctggacttttagtcttaagcaagctatgtagcctatgtagacatctggctttcagcttcctgagtttctaaatatcatgaaaattaagtgagatgccaaactattaatgtctcgtggaacttcacaccactgtataagagttagttattatttttaccgattactgccagtctttgcaaggtgtggcagtggttgactccccaggtcccttaaagaatcagtcccttccacactccaacagtaggtaaacaagcctcagccacaccctcctgacaggaagacagagaagtgactgaaatgttctcacatagcttgacaagtcaatctcaggctctaaggcagagcatggcaggaccccccacctctggctggaggaaggacatggccccacctcctctcaggggcctgctgaggggctgagtgaacagcaccacacattctgagggctgatggacacaaagtgcacattgtccaggagaagagattggcagctagtctgggcacagctatgccagcagggactgtagcctcctgccttggcctggatatgggatccttggcaaggttgtgtgggccaccactcacttctcagctcccaggccttcaggcccacatgtctctgtttctcctggcattcctctgcttctagccttctcattccttctgcctttctttgttttcctgcttgagcccttcctactagcatttatatgcattcttattcattatcattttaattgtatactattcatgtataagtttgtatagtaaacaaatataacaatttatataatattttaattattttcatttgcaataaattttattatttatttaaactgaatgttcaatacattcataggaatacaagaaatgcaacaagggttaaaatttcattattacattagatatcattttttctttctttttttttttttttgagatggagtctcactctgtcacccaggctggagtgcagtggtgcaatctcggctcactgcaacctctgcctcctgggttcaagtgattctcctgcctcagcctcccaagtagctgggattacaggcatgcaccaccaagcccgtctaatgatgtttcatttttcaaagaagcttctcctatttccctatcttttttatcttccacagagcaataaatagtaattactactctcctggacaaggtgctctgttgtgttggataggaattgtatctttaagtttgacatcattatcacctccaaaaactctaccttcacttcatagcacagtctcgctgcattgtttcacagtaaaattgtactctactcaaactaggagaactcaaagaaattagagcaaacagcagttaaattcatatgaatgaaagacagaagaccaaagattttaaagtactgatttagtaacatagtgtctactggctcaaagcttctatctaatcatattaaatcatattattaaaacagcgataatagaaatgaaagctacactaatgaaaaaggaacttgggaatgaggtcattaaatataactaactatattttaaatatagatatgtattttttattagtatcaggtaaatgtctaaattatctattctgaattctagtctcagagaaggtcagagacagttacaaagaaggcgcttcatattgtcaagtccatttttaaaatgatgagctcctttgggaaaatgctttagtgtttcttttcttctaagatttctgttggtgataatccattagtgtctgcacccttatagtccactttgtctttatttgtatcattggatttttttttttttttttttttttttttttgagacagggtgccttactttgttgcccaggctggagtgcagtggtgccgtcacagctcacggcagtctccacctcctgggcttgagcgattgacctacctcagtcccccargtagctgggaccacaggcatgtgccaccacatctgactaatttttaaatttttcgtagagatggagtctcactattttgcccaggttggtcttgaactcctgggctcaagtgatccacctgccttggcctcccaaagtgctgggattacaggtgtgagcaaccgcacctgggaattattggattcttgtgtagcttttctaggccatatatgactaacaaaagcagaaatcagatggtatatgtatggctccaggaatgttttgtagatccacagcagaactggaatgacaatacaaggaatgcacaccattgtcccagacttcagctyctaaatgtgagagcgaagtggggtgcaccgtgagagcacagggtgggcctsgaggtgccgacgagggcagacagcagagctgggcaccacagggagctagggctctgtgagccgtggctcatctcacacctcctcactgccttgcatcatggccatgtctggacccttctctcctcaggcctttaccagaagcattaacygagacaagcacttggcagtggcttacttccaacgagggatgctctactaccagacagagaagtaagtggttcaatgttgcaccaactggaggatttcagagagaaacccaaggggtctcagtgttgcrggcttggtgtttgagcagtaccttcccaacctctgttgggaaatgtgactggcccttctggggacagttatgcaataaatcagyaggtgaggcagaagctctcactggggaggcaaggcaggtctgccaccagattataaatcagctgtgtcataggcacaatgagcctaggtaaccaccatgggcctgatactcagctggtgtgrcaccccaccagtgtccctgatggggtcacccatgtaggtctcctatgaggtactgagctgtcacagaatggggatgatcatgaaactgcatcaaaacctggcttcatcccagcaaaatgcatttccaaaacctggtttaatccatttgaggaaatatacttcagctgcaaaaatgataatacaaattaacattatatgtataagaataaattactacagataagtaagtagcgtatgcacttatacagaaaaagtttgcagtagatgttaattttttttctttttccgagacagagtttcactcttgttgcccaggctggagtgcaagggctcgatctcagctcaccgcarcctccgcctcccaggctcaagcgattctcctggcttaccctcccgagtagctgggactacaggcatgcgccaccacacccagctaattttgtatttttagtagagatggggtttctccatgttggtcaggctggtcttgaactcccgacctcaggtgatctgcccacctcagccccmcaaagtgctgggattacaggcatgtgccaccacgcccagccagatgttaaatttaaaamcagatttcaaaacagttcatatagcatagtcccatttctgtatcacagaataaagtctggaaggccatagatcaaaatgttatcaataattctctctggatggtgggattataggaaaatccattttcttctatcaccctgtctgcatttttaggtttgtttatagtcaacatggaataattagtacaaagattaataaattcaaaatgaaagttaatctcaattcctcctccctctcatcctgcacaaatacctcataacaaataacaaaggaaaaaaattctaagtgataatttcaaatgttttggggcatgggaaactgaccctttgtagaaactgttccaccagtgtgcatcagttctagggaagaggaatttggctcaggctaatgaagaattttttttttttttgagacggagtttcgccctgtcacccaggctggagtgcagtggcgcgatctcggctcactgcaacctctgccttccacgttcaaacaattctcttgcctcagcctcccaagtagctgggattacaggtgcccgccactacgtccagctaatttgtgtatttttcagtagagacagggtttcaccatgttggccacgctggtctcgaactcctgaccttgtgatccacycgcctcggcctcccaaagtactgggattacaggcatgagtcactgagcccagcctaataaagaactttctgacagtgaaaatgrtctgtgcatggtgtgggtggggtgagggtgaggccgggcgtggatggagcagcagggaggttgtagacaatgtccagacatcagagagagggctgggctctgatcctgtgccaccctgaaaggctttgatcctatggtttggtcagaaacagagcctgtaaaacccaygtatgcagctgttgctaagggcaaccacaagatgctcaaaggaccttaaagatgtagatgcagttagttacctgaagaagtgaaagtagaagtgaagtcttttctaaaagaaaaaccacagacacaatggcaatctggggagaaagagagcctgggattgggagaagatatccaggcatttagctctctcttccccccatatttagtgtgacatatttattgtgactttataaattctttttttaattttaattttttattttaatgtttgtgggtatgcagtaggtgtatatatttatgggacacatgagatattttggtacagcaggtgtttatcttgaccgacgtcttgcctctaactgcctgtccccgctcttaacatccttctctttctcactcccccttaccccrtctccagactatagaatatgcagggaggcctaacaacaaatccttcagccgatcttaaatctcaaaacgcaaactctaaggtcattccttagtgacctctaatagtctataaagaagagatacaactggcaaaagagtgaaggctcccagaaagaatttcctccaaaaaatgcccgtgagtcccaggatctggaaggccacggttttgagtgattagaaagatcttggaaacttctaaaagtaagacccaggattcaattaatctgtgattggtaatattaatagttacacctgagagaaaaatctaccragttttatctgtaattcaacaatgaggaaattatacaaatgaggcactaatctcaacctcaagcaggccctcttgcgcaattccctaggtgttggtattccctttgaagttctgttcttgacccttttcccttttacaactgcagcagtggttgttaaatggcaaaatgtgtttccagaaatacactttcaagcacacacattcgtttatgtacaattcaggggctatagatatgaagtccgtatgtgaaccttgaggatccattcctgggcaaggccaccctctcccatatggctggcctccatttctcacagaatctgtacctgagatccatccagggaatgtctctttccctaaacctcatcaggttgacctcttaaatatttcttaaatccacctatttctctccatccccactagcactgccttggttgagaccctcatttttcaccaggactactgcagtcacttccaaactgattttccagccactgctcttgtcccctccattcatattccagagtgatcttgtaaaataaaaaaaaatttaaaaaaagcaatctctgtgagaacttccagtggcttccatgactgcaagataaaggccaaattcccttgcctgttcctatgtggtccagctgctgccacccactcatgcatcctccgtgcctttgccccagccatgcccaaccactaaggcagcgtctgctccctcttttgagcctccttttgtaatatgtctggcccgtgacagatatttgcttcctgtatatatttgtcttctccactactctacgaatttcgtaagaaatctttacttactcatgcttgtatttcagtatctagcatagtagttactcaataaatgagtgttggattaaataaaagtgagcaaaatatagtctccgtttcaaggaacttataaattaaaaaggggaaacaagtcaagaacaccagtaactgtaatgcaaggcagaagtgggtaactgctgtaagaggtagttttaagtaagcgggatgggggctagagaaattacttcttaatgtgtgggacagaaattccctcagattggctgggcacagtggctcacacctgtaatcccagcactttaggaggccaaggtaggcggatcacctgaggtcaagagtttgaaaccagcctggccaacatggcgaaaccttgtctctactaaaaatacaaaaaattagcagcacatggtggtgggtgcctgtaatcccagctacttgggacgctgaggcaggagaatagcttggacctgggaggcagatgttgcagtgaaccgagataacaccactgcactccaacctgggcaacagagcaagattctgtctgaataaaaaaaaaaggaattccctcagattacaaaagggaattgtttaaggctgataatgttatggatggaggtttttccccctctatttccctctattttccccactttcgtatgtttttgtgttgctcttccgtcattataaagttccaacagaacaaagttagagcacatttctgaaaaggcaagcagagtctcagggataacagccaagctgtctcgcctctctagccccagcgttgtcatctgaaaggcacaggggctcgaagctgtctttcagatcctgtgccttatgaatcttagggcatgacaataagggtgagacccattccatggagctggcttaaagaggctccatagcaaagccttcttcctgctgacttggaaacaggaaagggagtgggcccaaacctctgtcacagcagccactgcagcatcccaaagatgyctgaagttttgacttctttcagcttgctgagattccattgtcctgggtgcaggtgtatgagctgtggactctggacgcatggggcactggcagcatgggaacaagcaggttactaagaaacctcccaggagtattacagaaatggggattataaactctctcaagcctggagcttgtgaaaagctatggcaaggttgctgcttcagctggtggatcccctgcctgggaggggaggggctttgggtccagtgcagccaaggcgccccaaggggtgtcactgaagtgtgggtgtgaagaaagcacccatgcccagcccagcagagccctgcaggaagctgccagcaccttggctgcctcctgggggatgcttccaaatggccacgaagagaaccgctgaagaagggctagagggaggcgggggctgccgcagcacggcccactggcacacagcgctgaatgctattttgggattctcatactgagattattgcgaacctgtgtaatgggaaaagagctgtgtgtcaaagcggaacccccttcagggctgcagctctgggtaaacaagtggagaggccgaaaagaggcctgcagcagggarcgagggggctgggaagcaggccggtgctttcagagacatgtttaaaaacgacacttagttggcgaggcgaggtggctcacgcctgtaatcccagcactttgggaggccgaggcgggcggatcacgaggtaaggagatcgagaccatcctggctaacacggtgaaaccctggctctactaaaaacacaaaaaattagccgggcgcggtggcggacgcctgtagtcccagctactcgggaggctgaggcaggagaatggcgtgaaccgggaggcggagcttccagtgagccgagatcgcgccactgcactccagccagggcaacagagcgagactctgtctcaaaaaaaaaaacacttagcaaggatgccccttccccgttttaaaaattaattaattaggccctgtgcagtggctcacagttgcagtctttgtactttgggaggctgaggtgggaggattgcttgaacccaggagttcgagaccagcctgagcaacatagtgagacccccgtctctataacaaaattaataaataaaataagtaatctttttttttttagagaaggggtctcactatattgtccaggctggcctcaaactcctgggctcaagtgatcctcctgccccagcctctggcggagtagctggaactgcaggctcaaacctcagcccctggccccaccctgtttttttggttgttggactttcttttctttctttctttcttttttttttttttttttttgagtcaggatttcattctgtcgtccaggctggagtggagtggtgcaatcatgtctcactgcagtcttgacttcctgggctcaggtgattctccaacctcagcttcccgggtagctgggactacaggcacgtaccactatgcctggctaattttttgtacttttagtagaggtggggtttctccatattgcctaggcgggtccaccctgtctttaaaacaaagcaaaccctctgaataatttgtcagttctttctctctctctcctaccaggcccaaatctgtagacaccttttttttttttttgagttggagtctcgctctgtcaaccaggctggagtgcagtggcatggttttggctcatttcaacctccacctcctgggttcaagtgattctcctgcctcaccctcctgagtagctggaactataggcacgcaccaccacgcccggctaatttttaaatatttttagtagagacggggtttcaccatgttggccaggctggtctcgaacccctgacctcaagtgatccgcctgccttggcctcccaaaatgctgggattaccggcacgagccactgcaccgggcctctgtagacatcttgatgggctagggaattattaggaggattttgctgggctcatgcaatgccagatagaccmaggtggtgtcacttcccagctgaaatccatctgcttagccaactcagcagggaggaaggcacgttggtaggttgatgctgacggcagttaaagtgtgtgccctctgagaccttcagcgagctcccaaacaggcaatagaacacagtggaaattgcagctgccaggaaacaggaaacctctgcttctgcctgtcctcttcgcgatggaagaggctcagtgaattgaagctagttaccccaccttctggcttagaaagcggaacctgatttctggcgtacttctgggtaccttcttcctctttccaggaacccagaaagatgcgtggaaaagacatgaaaggccccattgctacttaaagaatggcctgcatgcatttagtaggttttacaaccatctttattaacagggatactagagaaagccatcctcctatttcaaacccaagctctcttcttttatttcccgcatagccactgctaccatgtgtgacttacctcaaccctaatggtgatggcttctcccccagccacactggcacccgttccttatgactctcttggccaaccagcccttgtgctcagctctaaacttccatgagatcagagttccagcttctatgccatgtatttttaaaatatcctgataatagcttatatggcacggagctttaagtaaacacgtaataagtggctgatgtatggattaattggtagagtgttagagctaaagaaaataaaacaacaaaaacaatagtaaaaaaattatggtgtgtgccaggcactgtctgaagtacccaaatgcttcatctcctttagttctcacaatgaacctgtgaggtatatgctgttattattctcttttttttttttttttttttttttttgagacagagtctcactctgtcacccaggctggagtgcagtggtgtgatctctgctcactgcaagctctgcctcctgggttcatgccattctcctgcctcagcctcctgagtagctgggactacaggcgcccaccaccatgcccagctaatttttatttttttatttttttatttttagtagagatggggtttcaccattttagccaggatggtctcgatctcctgacctcrtgatccacccgcctcggtctcccaaagtgctgggatttcaggcgtgagccactgcgcccggccttattattctcttattctaaagatggggaaacagacttagggaagctaggtaacttgccgtttctcaccagatagtaagtgacggagccaagactcaaaccaggtggttttgactccagaagtgggatccatatgctggcaagctccctatatgatacattctttgcatataatatgtccctgtatacaatatgctgccataatattggtgtggaacttcaggccaggaaagtgacttgctagggtcccccagttagtggcagagctgttggatctggactctggctcctggcccctttactacatcacactgcctcttgaggattcctgccagcctgtgtccacattccaggcttatctccaagagaagccgggttggtagctctgggtcagatggtggcctagggacttacagacttacagtccagttgcccaggtgtgagccacaaccaggcagccaaatttgttcctgccaggtcaggggactgagtggagtgaggctggcgtagcttatgcctgctgctcccaccccctatagcccagcaatggctccctcccaccagggcctctgtggagcccatggtcaaggcctgggccagcatcctcagaagtgtgtgtccaggtcccacctacatgcctgtgggccctattgatgtggtcagctcccattctctgctacaagtcccaggacagcagccctggtatacatcgagccagtcagctccacgccaatccagcagcacaaggcagtgggagcagcattagaaaaactatctggggctgggcatggtggctcatgcctgtaattccagaacttttgggaggccaaggcgggcagatcagtcgaggtcaggagtttgagaccagcctggccaacatggtgaaacctggtctctacttaaaatataaaaaattagccgggcgtggtggcgctcgcccgtagtcccagctcagtcccactcaggtggctgaggcaggagaatcacttgaacctgggaggtggagcttgcagcgagctgaaatcccaccactgcactccagcctgggcaatacagtgagaccctgtctcaaaaaaaaagaaaaaaaaaaggaggaaatactatatagcataagtggttgtttttttttcttttccaaagtgtagggaggaggcagaagtggcgggcggtgaggaaacaaagaagaccacaaaaccaagctctaagttgaactcaaaagaagccatgggcgaaggcagtgggcaggagggtgatggtggcagctataagaaggggcccctccaagctgtgccaggctggcctggcctgatggtgggagccaggagtgagcagtattccaaatcagctctgaacactctgcagggacacaggcagggggcaggtgctggctctgcttggagctctcaagagagaatgagagctgcatcggaaagcgacaagtcaggttgtcagaaaggtgacagttgtatgcagtcaatagagaagaaactccctgtgactgtccaagacgaggcactcagggttgctttgaggcacagccctggggggracaccattcccaaggagttgtatagaatacttggactcagggttgctgaaaactagaacaggtcaaaaggaactgaaaggcttcttgtcccagtgaaatagatggggaagggagaagcagactcacattttatgctgcatttatttctccatccactagactgctgtattttctccctctgtcctgcagatatgatttggctatcaaagaccttaaagaagccttgattyagcttygagggaaccagctgatagactataagatcctggggctccagttcaagctgtttgcctgtgaggtaaggagaacagggcctggcctgggcaggaggggatcatggctggatggatggctgacagttcagatgcacagtgatctgttgacacctccaggagcttggaaaagccattttgcctcctctgccttgagactcagattttccttgaagaaaagactgagatggattatttcaggctcatcaaggcattgtcatcagttacctgggggcatacattttattaatgtgaagygcaaaggaccatgcaaaaatgagcccccygggctctctgaagggaggctggacacgagtgtgttggcttgtggaaatattcatgataatttgcatgttttgattggcacttcagattgacaagctatttgttcagcattttgctagcaaatccaaaatcatgagttcattgtccgtgcaggacctgccagaagcttgctcagttcccaagtttatagaccacactctttactatccatggttcttaccccatgtacttgattgatacctaaagagagactgaggataatttggcataaatctgtcccctcttgctcaaagaacagctcaaggcacatatttaggtaaaggtttctgcaaaacaacttcttttctctattatcaaaagggagagacatgactggctttgactttgcaggttcatttactttttccggttggyccttcccacccctcccacttccaaatatatactagcagttttgaaaaccaaaattcctgtaaatgtcaaagacctttctttagaaaaatcactgacaaaagtccccttgctttagtttctcaggcacaagaagtcaagtgttcccagggtcgctcagggctaataatagagtctgtagccgccctcggcccctggggacatatggccccatcccaaccctgcagcaggctagcaactaacttcacgtctcacagtctgagaagatggggctttgcagttggaattggctgccattcgaccaacttctcgagtaaggtttctcagctgtagctctgttaatatgttggaccagacaatcttgtattgtagcagaggcgagagaggggttgtggtgcatcctgcgcatcgtgggaactttgacggcatctctagcttttagatgctactagcactgccaccaccactccccacccaatgtgacaacctaaaatccctccagacattgctaataagccaatgacagccacttatacagattagaaagttgggggacaagtggctctagaaaaaggattatgtcacagcagcatcaaagtacagttccatgggaggaatgtttcccctggagttggggttaaaatggccctgagaggacagaaaatactggctgagtggccctctctgcaagtaaagctgaacttttcagggtctaaggccctctttgtcacatgggaccttccagtcatttccctacttataatccttctcttcctgatgtggtatgaccctggcttctgagaatcacatcattatttttgaagagtgtcaaggtttttctcatcattagttcataaaaactgattgtagagaaatgtcttaagagaaggtggctgagaaccaaataggaaattttaaacgatctgagttctttctttctgcacacaaggtcaggagtgggctggagaagccaacgaattcagaaggcagtagctcattgaatctcagaaataggactgaaaggagtccagatttccacttccggggttgatcctggcccccaccattcagcaccagccactaatgccacagaaacatcaatccttccacctgtctgagtttggcaagttcacgtcattgttggcaggaggcctcagttcttcgctacatgaacttctctctagggctgcctaagtcttgtcatgacatggcagctggcgtctctgagagcaagtgacccaagagcaagacagtgtcaatgtcttttataatctagcctcaaatgtcacaccccctaatttccataatatcctatttaaaaaatttatttcagtcgggccattttttagatcttggtaatgcatccaaacgattatttgattctgtgtgtaaattgtgaagcacaatagtaaaatagacactcaagaaccacagcccaactcaagacctggaaaagtatgacactgttgcatttaccattccccccccacctgaggtgaaggtgcccctggcttctgtgctaacctctgtcttctgggttcaagcaattctcctgcttcagcctccaagtagctgagattacaggtgcctgccaccatgcccagctaatttttgtatttttagtagagacagggtttctccatgttggccaggctgatctcaaactcctgacctcaagtgattcacccgccttggcctcccaaagtgctgggattacaggcatgagccactgcgcctggcctgtgttgctacattagtcttgttactcacatggtctgggccaggttctgctggtgctggtacaggaggttgcatcttgatccatcttccggctctgtacctgtccagtgtttcagcctaggtacagtggcaggaggtggactggaagaccacacacctgtattttattcccaaccctgtgtctgcctctagaaggggccttgagcaagtcactcttttactaaagcaactcatactaaaacaacacaacaattcttcttcttttttttaacctggtttgaacacactgtatacaataattcttgtcccttcctgacctatttcgttgttggaagagtacaaatgatgttgcatttacgcattccatggtgttttcttaacaccatgtttgtgtttgacataactcaatagcaagactaattgcactatattttagatattcccaggagagctgagaaagggagaaaggctaccaggcaacattctcagagtatacgtgtgagcctttccctggcaccttgatttggagtagtctcaagttttatgttgcggtctgtacttttctaggtgttatataacattgytttcatgtatgccaagaaggaggaatggaaaaaagctgaagaacagttagcattggccacgagcatgaagtctgagcccagacattccaaaatcgacaaggcgatggagtgtgtctgggtaagcgtattggtgatgcaggtgttgagaggatgtcactggattctcatttgtctcagaggacatgccattgagaagccataaaagtggtgcttttactttctgtgagtctgggtaacactgatcttagggtatagttccacttaagatcttgaatctgtgctgagaagctgaggcctagagtatgggatggcagagccctggcatcacaccacccttggagtggggctccttggcaatgcaggagaacaggatattggatgctggagcagtgctgcacagactctaagcactgagagggcagagtccatgtctgcttgatcaccactgagtcctcacagcctggcacagtgctaggcacataacagctctcagcaaaaatgttttgttttgttttgagatggagtctcgctctgttgcccagcctggagtgcagtggtgtgatctcagctcactgcagcctctgcctcctgggttcaagcaattctgctgcctcagccgcccaagtagctgggattacaggtgcatgccaccatgcctggctaatttttgtatttttaatagagacagggttttgccatgttggccaggcaggtctcgaactgctgacctcaggtgatctgccctccttggcctcccaaagtgcagggattacaggcatgagccaccgcacctgcctaaaatatgttttgattttgtgaatgagtgataaaaactatttatcgttcaagcatatttgtgaataaggctagctttaaatctgatttttaaaacacagagaagaggactcaagccagtctttatatgtctatcctcatcagcaaacacccatccaagggagcactgtcatgagccttgcttgatcccgggccagmcttgtcgtggtggtgccctctacaccatgagagaaccccacggacagcacacagagtgggagaggagcagttcctctgggaaaagagggtgctgaatagcaacaaatagcagcaatgtccatgtggcctcgcagcagaaggtggtattgaaaccaagggttcctaccttaacaccctagaggaatgacaacactcatttggaaaagggcttctatgtggttatctcaatgaattcttgcatctattcactgagggaggcaggacaagcatcgtcacccccattttcacataagggaatgctacgttttctgtgttacagaagcagaagctatatgagccagtggtgatccctgtgggcargctgtttcgaccaaatgagagacaagtggctcagctggccaagaaggattacctaggcaaggcgacggtaggtgggattgctcagcttcccctgagtctcctgtggcccgggccatgtggagcaaggtgggagggactcttgagaagagggtagcctccttgtggctctgtccctgggatggcaatgagagacttgtttataggacagaggtttggctgaaagataggcaaccatgtctagtttattttctccaagctgctcccatttctcccttccagctcgaccctgggtgagagccacagggttactcacaggatgctgagtcttagggactgagccaatggagggaaaacacagccatgaggagctcactaaatgtgaagagagggccaggcagggtagctcatgcctgtaatcccagtgctttggaaggctgaagtgggaggatcacttgaggccaggagtttgagaccagcctagctagtggagaggctgaggtgagaggatcacttgagcccaagagttcaaggctacagtgagctaggattgcaccactgtactctagcttgggcaacagattgagactctgtttctaaaaaataaaaataaatatgaagagaacatgttagggaaagagatcagcatgggatcctcttggattaatgctccttgtagttcacgttttagtgggctgaggagtctttccccacttccacagccctatgtttagactatgtcttaaattggacttcttctaaatccaggtcttggctgtgcatggtgactcatgcctgtaatcccagcactttgggaggctgaggcaggtggatcacgaggtcaggagttcaagaccaggctggccaacatggtgaaaccccatctctactaaaaatacaaaattagctgggtgctgcggtgcatgcctgtaatcccagctacctgggaggctgaggcaggagaatcgcttgaatccgggtggtggaggttgcagtgagctgagatcatgccattgcactccagcctgggcaacaagaatgaaactccatctcaaaatagtaataataataataaatccaagtcttaaattctttcagacatggtctgaagtgagtcagcagtgcccttccaaaaccacatttgacttgacacattcatagggctaaagttgcccagtggtcgggtagctgggtctagcatagcagcagaggtcaagaaagcctgggtgagtggaagccctccaaatatctatcaactgatgagtgagtaatcaaaatgtgatatatccatacaacagaatactacgtagccataaaaaggaatggagtatgattcatgatacaacatggatggaccttgaaaacattatgctatgtgaaggaagccagatacgaaaggccacatgttgtacaattccgtttataggaaatatctggtgcagcctctaagcactgagagagcagagaccatgtctgcttgatctccactgagtcctcacagcctggcacagtgctagacacataacagctctcagcaaaaatgttttgattatatgaatgaatgatgaaaattatctatagtttaagcatatttgtgaataaagctagctttaaatctgatttttaaaactcagagaagagggctcaagtcagtcacagaaagcaaaccggttgttgccagtttaggggaaaggggagtgtggacacactgcttaatgggtacagcattttcttctgaggtgatgaaaatattttggaattagagagaggcagtagttgcacagcattgtgaatgtgataaatgccactgaatcattcactttaaaatgattaatttgggctgggcgtggtggctcatgcctataatcccagcactttgggaggctggatgggtagatcacctgaggtcagaagtttgagaccagcctggccaacatggtgaaaacctgtctctactgaaaatacaaaaattagccgggcacagtggcgggtgcctgtaatatcagctactcgggaggctgaggcaggagaatcacttgaacctggaaggcagaggttgcagtgagctgagatcacgccactgcactccagtctgggtaacagagcgtgactccgtctcamaaaaaaaaaaaaaaaaaaaagataatttgatgttatacaaattgcacctcaataaaaacatttcttttttaagagagaagaaagcaagcctgtgttagcaggggtggggtgaatgctcgtttcttcagttgctgaaatcctaatccagaggctcaggaatctaatccttagttactgtccacgtctgaaaccaggctcacgtaagaacaggtctagggcatgagcaaagagggagacccagaagaatggaaacagtgctggcagagcctcacaccctcctgtccttgattttaggtcgtggcatctgtggtggatcaagacagtttctctgggtttgcccctctgcaaccacaggtaaggcagtcctgaccttctccatggacctaggtctcgagagctttctgtgaagcattcaattcgagagactatgtgtgctgagttgcctgattgtaagggctccttcaagtggccctcagtgcagctgagggatctgcctgccctctctcagtcctggtttccatggctggtgaggaaataaggcagtgtcaggcttcaccccaagtcctctgaagctaactctcctgcttccccacaaatgccggtcttcacatctctaaagagatctgctgatcctctctctgaagcctcaactattctctcaggaagctgaaacacaagctatggaaggcttattaacaaagcctcttcttgagtacaggggcaagtggggaaccctgtggggcctgggcctgaggtttgggctctcctggctctacccatctgctcatgtgcaggggtttccttcgggaacacaggcagngcactgagagtgaaccctttttctgcccaagctgggcttggagaggtgagctcagatgaactggatgatagtggatctagaaatgcacacagagcttccttgtgaaggaaagaggggaaaacacattaaggaaaatacgaactctgtggcaatgaacctgtgatgggcaagagtgttggtcagcactagcagagggcggttttctgagcaggggcaggtatgttccagatctagattccttgatctctttcttcacaataaagctgatgaaagccttgctgaagtcccttgagcttcagttcagccagaggccatgaggggaaygcagcccaggtaactggattccatggtattcagtgtagaacaggggaggagattcttgcccagtcagtggatcctgtgtcaattttaaatactcagaagtggccaggcacagtggctcacgcctataatcccaccattttgggaggctgaggtgagcagatcacttgaggccaggagttccagaccagcctggccaacatggtgaaacccctgtccctactaaaaatacaaaaattagcagggtgtggtggcacatgcctgtaattctagcaacatgggaggctgaggcaggagaatcacctcaatgagggaggcagaggttgcagtgagccaagatcgcgccactgcactccagcctgggcgacagagtgaaactccatctcaaaaaaaattttttttwaattaatttaaaaatactcagaagtgtcatgtgacatagtagacattaattacagaacagagcttttggaaactgtcctgggaaaaggacagagctcaaggtcaaagcattcttgtgacaccatgttgctgtgtgactgctaacctccagaaactagctctggctcaaaatgaattgctgtgctagtgaaacctgtacctggggagctggtgggaggtgttatttcccagtgtttagtcagggtgactgtgccctcttcctagacagtgttctcatcagtcagaaatgcgktatttgattttctggtctggaagaatgctcaaattaccatyagccgtttgttgtctctcccctgctttccctcattgccttttccgttttcacttctcctgaatgttcaataggcagctgagcctccacccagaccgaaaaccccagagatcttcaggtaagttagattcaaatccataaatagaatatccaagcgccaagcctgagctgatggcaagaaagggagggaagaagatgaaggtggggtcagggtctaaatcttgttgaattttctggaatgtcaggcttcttctagaatgtcaggctagaaaggaatgcctagaagaatgtcttctagaatgtcaggctagaaaggaatgatatgatggggatgggagtcttgactgtggtggggctggccatcagggcytggctgcagctacgtggtgtcccattggccctctgtccacgtgcacagccacccacatggcaaggggttgttgctgaggggcagtggtgtyctgtggaacatagctaccctggggaccaggatgctgacctcaggttggagatcggtttcgcactggctgcagtcscctctgacgggggcaggccagagctctctggartcaggaatctagaatgacgtcctttttcctgtgtggatgttttccactccctatcggcacatgctttctgaagaagtaaagaggaaggactgaagaaaaggaagtccttcttctgtaagatgaaaaacaaagggtgacataacctacagctttcttaagaattctctcaaagtgatgaagcaagcctggtcctcccacccaaaaaggaggttttaaaaagtgattggccaggtgtgtggctcatgcctgaaatcacagcactttgggagactgaggtgggcggatcacttgagatcaggagttcgagaccagccgggccaacgtggcaaaaccccatgtctactaaamatgmaaaaattagctgagtgtggtgactgacatgtgcctgtaataccagctacttgggaggctgaggcaggaggctcacttgcactcaggaggtggaggttgcagtgaaccaagatcatgtcactgcactccagcctgggcaacagaccaagattccgtctcaaaaaaaaaaaagtgacaaaagtaccaaagcaactacaaaaatgagggggctggatgagctcattcctaagctccctgtcagctggaagggcctgtattccctacaggagtaggcacgatgtctggaaacaaggatgggccgaggggaaagtaacagagtggggagtaaagggagggaagcctgaaacctgaacaccagcctctcagtcacacgttccaaagtgatgccaatcagagcctcaaagcctaaaagcatgaagtcagacttaagggaaycgacactgcaccacggcagctgggcagcctcagagccctctatgtgcatccctcacgctccctgtcacctaccctgctcacggtctctctatcctggcccaacactggttctaggtggtttctccttcctcctctcccaccaatctttctggcccagctggctctcacctgacttctgctttgtgctgttcccctgaccacagtcacctgatccaccccaccccagcccagccttgggtgctggccaagatgacacagccagggaccttcctcctcagagcagaagggagggcaaggattgtaagtcctcactatctagtgttgtggggtttttgctttattcttgcccctctgcatatatggttatgagcaggtgtacaccagtttcttgctgagacctcttgggagcccaggcaggctcagtgtcatctcggcagttgcagttagatgtggagttagagccaggctggagccaagtccctggctccaagttcagtgtatttgcgccatggcatcatgtgaggggatgggggctggatcttgtgtctatcctctgcagggctctggaaggggaggctcaccgtgtgctatttgggtttgtgcctgagacaaaagaagagctccaggtcatgccagggaacattgtctttgtcttgaagaagggcaatgataactgggccacggtcatgttcaacgggcaggtatgcagaggatcaggggctggtgcgatgggcatgggatcctggcagcaaatgcagtctctgtggagcagtatctgytgccttctttgcagaccagccaagttcttttgtctgttcgtcatcccttccccaggactctgggctgttctgtggtgtgggtactgatgagcacatctttattttttcctttctgattctgtggtgctgcactgcagaaggggcttgttccctgcaactaccttgaaccagttgagctgcggatccaccctcagcagcagccccaggtaatgtgatgccaaggcctgacccatttcctctcaccctttarggatctctccctggaggggagaaaagcagtgtaaaagaggtgttgtcaggacccctggagaaagattcactagtcttgagcccgccttgagatggcaccagctacccagagctgaacctgggaatgaggggaaaaaagcccagatgtgctaagttggaggcatctgtaggtcccattgggcccacccacctctgtgactcttcctggtcagaagtcacttgggaagcaaagcctacagtatatgagtgggttaggtcttcccaagtgtgtctgcttcacgtggaagagtagtcaatgtgttggctggtacaatgccattagaaagaaaatgaggccagctgcagttgctcatggctgtaatcctagcactttggaaggctgaggtgagaggatcacttgaactcaggagttcgagaccagcctgggcaaaatagagagatgccacctctatacaaataaaaataataaaatgagatctgccttagagctttgaatcagagtgggccttgccagccactgcttctaaactgctgctactccctccctcacacttcaaaagtctgtccttctgccaggcctagagagctgtctttgtcagatctgagcatccctgtaagtgactcaatggcagtggagactgtctgtctctagactgtgcaaccagttgtatatgagctcagccctccctggtcagtcaccatatccaaatgctttgaaaagcttcaaatgccttgcaaatgagaagtggaatttttcctttctcaatgccctctgcagtggagacaagagctcagtcctgccccacggccagtggatttccaatatggctgaaagagttgctaaagcggcaagggcgttttagcgggttaggattcttctttctactgtgattttcattttcatcaggccaactccacctcctcttttggccaacatttccttcgtcttccccaaatgtcactaccattccaacttttaggacgttatctgcatgtggctcctttacatggggtctctgtaggggtgtttccccacatccacccctgcctgggaactttgaatgaargttctgaccntcgctccctgttgccttcaggaggaaagctctccgcagtccgacatcccagctcctcctagttccaaagcccctggaagaccccagctgtcaccaggtgagtggtcctggagccacagcctaggtctgggtgcagcagcatgccaggctgcttcctgagttcctctccctgccttccaggaaattctggtttcttcttctcccaacatgtcactcagctaatgaccacgcagccccagaatccccctttcctgmaccacccaccccaaacatgaaatcagtgccctctctccctgccttctgcagaacactcacggggcttgggtgaatgcagctggttcctgagtgactcacgtagtcaccaaaccccttgatcattaggtagggaaacsatgtctcaggaagaaaagttgaagtaactatacctgcttatctctgaggggcatggagtggctgttttcaaatgtctgaggcactgtatctggaaaagaaattgctctgtggagccctgaggatgaacaaagaaccaatgggcagatgtgaaatggaaatgttctctctgaaaggctgtttcctagtgtggagagggctgtcttgggaagtgcacttgaagcagattctggataagcgcttggtagagacgcagagtgagtggttggccagattctagatcaatgattgccacacgcgcctgatcatcagaatcactcgggatgtcccttcccccatttttattttgaaaaatgtccaacctacagaaaagctgacagtagaatacaataaacatcagaatatctttcacttaaactcaccaattgttaacattttgcaccatgaactcgccctgctccattctatttttctcccccgagccagttgaaaagttacagactcgtgacacttcaccctacacagctgcaaaaacgcagtctcctgcataatcacaatagaatcatggtatctaggacactaaacattcatatgatagtattatataatgtatattccatattcaaatttctcccrttgctcctgctcaatgtccttgacaggttttttgttgttatcttttgtctagaggctcatcaaggatcacatataaacctaggatgattttgtgaatacagagtcctaggctactggctctgatattttaggactggaatggggctcgggaatttgtattttagaaaaaaacttcccatgtgattctaatgatcagctaggtttgagatcagtggccttctctgatcatgtaccccctatagtaaatatctttatgcatgctactcttacataaattagattaatattagattgcttgattaatagattagattaaattaataaactttaggaaacatacacaaaaataaagaataaggtgaggatcagtggttctaatacttcttcctgtggcctctggctcaccttgcactccgattttcattgctttggatcccgtgggcttaattgacctttgggatccctgctaaccttgtgggttggtgaggatatgctggtcctttggtaattacctataggctccctagaagcagagactgagtttgttcatgtgttcatgaccttcatgcttccccagggcgagattttccccacagtttactaaggttaataattgccccacaaattaaagggtaagaggttgggggccctatttgaagaggtttcatctgtgtgtggcaggggctggccaaggatgttcattcaccatcttcttttgttttactccctactttttccattcaggccagaaacaaaaagaagagcctaaggtaacatttttccctcatactgtttcaagtggtagaagatgggatagcttgggctatcaaccacagacatgtctgtctggattataggaagagccccaaagggagggtcgaaccagttgctaccttacagagtccatgagctagggaccttcttaatagcctcctccactatcatgcacacacttcctactacccaagctagtgggccagatcttactcagtaggaattcctgtccaagcaagggttgggctaaaggacctctgaaggccttttaggctactgtgaaaccagttacttactggcctctcccctgctgtattgggtaccccctgtgccaaatcacgaaactgcggtgatccaggatgttgagagaaagcctcagacactcaggagttccctttgtttcctccccactcaggaagtgaagctcagtgttcccatgccctacacactcaaggtgcactacaagtacacggtagtcatgaagactcagcccgggctcccctacagccaggtccgggacatggtgtctaagaaactggagctccggctggaacacactaagctgaggtgagctccatgcaggcagctgtgaggggtacagtgggaaccttgtgctggcctggaggagggaagaggaggatggtttttgtgatgatgttctttgactggattcttactcattatccccacccagctatyggcctcgggacagcaatgagctggtgcccctttcagaagacagcatgaaggatgcctggggccaggtgaaaawctactgcctgactctgtggtgtgagaacacagtggtgagtgcaatgaggggcatctaaagttacatttccactgagccacttcctcaacaatttgaaatttatcaagcaccttctgtgtactaggcactatatgtggtgttggggatatggtgtgtaataagtnacagctctgcctcccttttacctgcatcctcaccccatttgcagcagggagagagtttcccacaagagaacagcaggcccagcagggcaggagctcacagaaagcctcctgcccctccatcagctccctgcctgactgtgtcaaacatcccatccattactgtcaagcaaggttggaatgaagtcatatcatagcttaaggctcagctcatagccattcttcaccttttttttttttttttgagatggagtctcactctgtygcccaagctgggtgtgatcttggctcactgaaacctctgccgcccaggttcaagaaattctcctgcctcagcctcctgagtagctgggattacaggcacctgccactgcacccagctaatttttgtatttttagtagagacggggtttcaccatcttggccaggctggttttgaactcctgaccttgtgatccacctgcctcggcctcccaaagtgctgggattacagacatgagctgggagaagaagagtgaaagagaatgagcctagaaaagggcagtgtataaagctgtttaaggtatcttccccgttcagaaaattgccttcaggaaatacagccactggggatgagactccctggtgtctctggctgagacaaaaggccccaggatcctgggggtaagagtgagtgtgagtgtaaggggtctcttggaagtctgaaaagtcactctaggttttccagctgtctgtctttggactaaccccttcagcatcttttttaaaagattcttcctagaaggagttctgctctaaatgtgaactacttcacttaaacttttttttaattaaaattttttcctttgacagcagcttcaatctatttggtggctgcacatagccaaccctcttacaactccccacaatcttttgcaatttaatccaggctcaggagtcactgttgaatgttctttatcactatccattacttttggaggcaacaaagcaggctttcacttactaggagaaagaaaaccaggcgcagtggctcatgcctgtaattccaacactttgggaggctgaggcaacatggtgaaaccccatctctactgaaaatacaaaaattagctgggtgtggtggtgtgcacctgtagtcccagctacttgggaggctgaggcagaattgcttgaacccaggaggcggaggttacagtgagctgatatcataccactgcactccagtctgggtgacagagagattctgcctcaaaaaaaaaaaaaaaaaaaaaagaggcctggtatggtttatgcctgaaatcctagcactttgggaggccgagatgggccagatcacctgaggtcaggagtttaagaccagcctggccaacatggtgaaaccccatctgtactaaaaatacaaaaaaaaaagaaaagaaaagaaagaaaaataaaatgaactaacatttattaagcatctactctatgcaggaacacttaccattaaccaagtctaaatatttatacatatttagaagagtactgccacagagtaagtgttcaataaatgtcaactactattattgtatgtcatctcattgaattcttctagcctcaatttcaggtgaggtaactgaggttctgagaagttacactgcttgcttagggacacagagctggtaagcagtggaggtgggatacaaaccyttctctgtggactctctagggccatttccacctcattgtattgcctctcaataaaaatataccaacgttcaacaaacaacattaagaagctagaacttataatgctcggtacatacaagcctagcagcatttctaatgttgatttgttaaattctatgattcacatctgtagaaaccgcatccttctccttcatttgtgaagcaaaagtgacaataatgtggaagaagtctaagatcataagtctaagatgtataagaaatgttgttacagataaaacaagtatggcattgtgcagtggtttttgaactttagcaagtatcagaattccctagaggacttaaaatacagattgcaggattcaccttcagggagtttctgatttagtagttttgggatggagttgaaagtctgcatttctaacaaggtccctagtgttgctgttagagttgatgctaagaaagccagttttgacttagggctctgtccccatctgtaaagaaataataatgcccattctacctgtctcaagattattgtaaggtttcagtaagatattttaagactgtatatgattttgcagaccttttggtttcatttatcccaggggtccccaacctccaggccacgggccagcacagggctgcacagcaggtgagctgcaggtatactggcctgagctctgcctcctgtcagatcagcagcagcattagattctcataggagtgtgaaccctattgtgaactgtgcatgcaagggatctaggtcgcatgctctttatgagaatctaatgcctgacgatctgaggtggaacaattttatcctgaaaccaccccccaacccaccacccaccaccattcatctaaaaactgtcttccatgaaactggtccctcgtgccaaaaaggttggggactgatttacccaaccatccagtattcataaagagcatataagctctacacaaggcactgatcacaaactttatgagtttatatcccaggttctactttgacatttcgctgtttcctttagtgatgttcagtgttcacttggcaggaaattgggaaaattaacaggccctttattatttcagggtgaccaaggctttccagatgaacccaaggaaagtgaaaaagctgatgctaataaccagacaacagaacctcagcttaagaaaggcagccaagtggaggcactcttcagttatgaggctacccaaccagaggacctggagtttcaggaaggggatataatcctggtgttatcaaagggtaagtgctactccaagactatagaaacaaatttacatgttagcagaaacaaggtcaagggcagagagaagaaaatatcaataatctacaaacaaaactttagccagtgttttcaacccccttcctagcatctagctggagggagcaaagttgagcactcagactttccctgtctattgctctagtagccaggaaagcaacaagaagctgagttgttttgtttttgtttttgtttttgagacagagtccccctctgttgcccaggctggagtgcagtggcacaatctcggctcactgcaacctccccctcctgggttcaagcaattctcctgcctcagcctcctgagtagctaggattacaggcgcccaccaccatgcctagctaatttttgtgtatttagtagagatggggttttgccatgttgaccaggctggtctcaaactcctggcctcaagtgatccaactgcctcggcctcctaaagtactgagattacaggcatgagccaccgcacctggccggcgataaacatcttgattattaaagaggagtatgctttggaaaccatggattctcattcccagaggtaacaaattgggctggaatcactttgcctttgcatcaagctgtatgaccttctgcaaaccatagttctttgaattaatgtacttttcaaagagaaaagtaggtaaattttgccttaaaaaccagctattcagaactatcctgtgtctctggtgactttcttgattctgtttgtaatgaacagactaaaaattgaaacagcatgcctgtaatcctagccactagggaggctgaggtaggaggatcacttgaggccaggagttcaaggctgttgcctgggcaacacagcaagacccacctcttaaaagtggagagttctaagaatccctggaagagtttgttaaatcaattcctgggcccaccctccagagattctgattcaggtctggggtggggcccaccaacttgcatttctaccaagtttccaggtgatgctggtctactgcctacactcttaagaagcaccattccaactcgtggtttgccagcctaattctctacctcgacacaaaaaagtcccatcataaaagccctgctcatacgctgagtctgtgcactaccaatgcaaagcagtgaaaaactaccatcaattataacagaaaatccaacagacaaagagagggggaaattttaaagttaatgagggtaggctgggcstggtggctcacacctgtaatcccagcactttgggaggctgaggtggtggatcacttgaggccaggagttgaagaccaacctggccaacatggtgaaaccccatctctactaaaaatgtaaaaattagctgggcgtggtgatgcacatctgtagtcccagctgctagggaggctgaggcaagagaatcgcttgaacccgggagtggaggttgcagtgagccgagattgcaccactgccctccagcctgggtgacagagcgagactctgtcttaaaaaaaataaaaataggccgggtgcagtggattatgcctgtaatcccagcaccttgggaggtcaatgtgggctgactgcttgaggtcaggagttcaagaccagcctggccaacatggtgaaactctgtctctgctacaaatacaaaaattagccgggtatagtggtaggtgcttgtaatcccagctattcaggaggctgaggcaggacaatctcttgaacccaggaggaggaggttgcagtgagctgagattgtgccactgcactccagcctgggttacagagtgagactcagtctcaaaaaaaaaacaaaaacaaaaacaaaaaaattaaaattaaaaaaaaagttaatgggggtagagagagtatacaacaagtgtgtagcaattaattaaaaatatgagtagtataggctgggcgtggtggctcatgctggtaaccccagcactttgggaggccaargtgagtggatcacttggggtcaggatttgagaccagcctggccaacatggtgaaaccccatctctactaaaaataaaaaaattagccaggcgtggtggcgtgcacttgtagttccagctccttgggaggctgaggcaggagaatcacttgaactrgggacatggagcttgcagtgagtcaagattgcacctttgcaccccagtctgggcaacagagtgagattctgtctcaaaaaaaaaaatatgagtagtagtaatatagaagcagagtgttccaacaagagagaatggtaactcagtgggaagaactgggttgaacacctccaagtgccactttaaaggtgcctaaatcaaccaaccagctcaattgtctggagtttgggagagggagcaggaatacaatgaaagaacacactaaaacaaccttttgggtagatatggagagaagccagtatgcgtcttactatgacctatctgtacaagtctaagttgaggaaatacccatattgtagcacttcaacagaaaacagaatttagcggtcagggtaggacagaggggagttcaattgcattcaagttatgagatggtctcatctacaaagtgtttctcaaactttaatgtgcatgtgaatcacctgcgaatcttcctaaatggattctgactctggtttggatctgggatttttcatttctaatatgcttccagtccacgacctaccctgtaagaagaatcaagacagtgatttgcagttagaattacctaagggaacttttgaaaaaactgctgcccagtcacaccacacattaaagcaaaatttctgggggcaggatccaggcaccagtgccttaatgtctgatctagatgtacaaagacaaacttctgaactggctgtgtggtcaggtaggtgggctttggagatyatacctaagttgtctgatttttactggcagaatggctctgaacaaactattcatctctctgggtctccttttccttagtaaaatatggatacctacaagttattatgaagtctgaatatattttttaagtacaatgcctgcactctattaaaggctctgagtaggagctattaaaatatttatatttaacaaacatgtactaacccatcactagctccagctcacctgtttaatggagttcagtgaaaagaagaaagtttactaaagaactttcatttttaatatatttaaccaatggcatgtcccttttctgtagtcaaaacaaagattcccaacaaagcgcaggtaaaattctctcctctcttaaaaaattgggccaggcacggtggctcacccctatcaccacagcactttgggaggctgagttgggtggatcacttgagcccaggagtttgagaccagcctgagcaacatggcgagatcctgtctctaataaatacaaaaattaaccaagcgtggtggcacagcctgtagttgcagttacttgggagtctgaggtgggaggattacttgagcccaggaggcagaggttgcagtaagcccagattgtgccactgcactccagcctgggtgacagtgagaccctgtcaaggttgggggtggggaaaggacagaaattctatttaaggattcgttgttcaatttctttgacccttcwtctctatctggtaactttttgaaaaacataatttatccttcttcattttgctcattatcatgtttaagacagatcaataagatggttaaaccctgtgttcactctcaaaccactttgcaatactgtcttttccctgttgatcacaattaggggtggggaagggtgacmgataacaaattctgtgtggaatagccagacagggtaatcttcctacagtggttttagaaatccatgtgtacttttccttttatcagtgaatgaagaatggctggaaggggagtgcaaagggaaggtgggcattttccccaaagtttttgttgaagactgcgcaactacagatttggaaagcactcggagagaagtctaggatgtttcacaaactacaaagctgaagaaaatgaagccctattacttgtttgtaagatttagcacccttctgctgtatactgtactgagacattacagtttggaagtgttaactatttattccctgttaaaatttaacctactagacaatgatgtgagtacccaggatgatttcctggggcacagtgggtgaggagatggggacaggtgaatggaggagttaggggagaggaaaagtggatggaagtgtctggaaagggcacgagagagtcttccaggtactgatcctgtttcttgctctgagtgctagctagccagctgtgttcacactgtaaacattcatcaagctgtacatttggtgcacttttctgtgtcataccacaataaaaaaaaacctakcatcttacaaaaacaagacacccaagtccaggcccaaggagtaagtacaaatattcctgtttctgaaccattactgtaattggctcttaaggcttgaagtaaccttataggttactcataaggcatatacaaataaacttgtttgttttcttttttcattatgtcttgttgcttaaacagaacctagactgagttaggttctcatggactacaacactcaattccacagagaattaatagaattacatacctttgtacattctcagagaggaacatgtgttaagaactcaatactgaatatatatcaatcgccaacatttaagtgatgaaaagcagcggtgttcatgaagctagttcgtaagtagtatcttgttagctgacacttcgtaatacagttatgcactgcttcacaatggagacatgatctgagaaacgtgttgtgcaaactcatctagagtgcacttacacaagactagatggtatagcctactacacagctaggttaccaggtatagcctactactcctaggctacaaacctgtacagcatgttactatgttgaattctgcaggcaactataccacaatggtaagtaagtatcatcagtgtaaacaaacatagagaaggtcagcaaaaatgtattataatcttatgggagcatcattgtatatgcagtccattgttgaccaaaacattgttatatggtaaatgactgcatatactatgctatactaatatacataacagaatgctatggatttggctaacccaattgtccaatttttcaggattaacttgggtgaaggattctgtaactaactaaactattagaccttaaggcctggccttagttcctctccctacccacttcttgttgtagcgtatgtggagctttgctaacaatttttcaagtgtgcaggcgcctgtgaaaagcagaataaggaagtgaactgcagactgaatcaacatgcaggtgaaaggatagccggtcagggtgagcacacaggcattaaggttagctataccactggcttccagcacacagttggaagacccagcaagctaccaatcactggaaactttggacacaactcaaagaaaagaaaccccaaagctaagaagaagaattaattaatgttgctgctaatcagattcagtgaatttttacaggccaaaaggataaactctctgaactgcctcagtaacagctacaataggaataaaaataaaaatgatgggctcttaattccttaacataaggcattcttttattaaataaaagaattttgataatcgatttcttactactcatgcctttccattacaattaattataatttccgtaattcatcattggtttggaatgctactaaaagcaaaattaaccctgaaaaatattcaagttctgaccatttatgcctttccctggatgacctgtgagtagttgaaattcttgccttttaagttggattttcttcaatacttcttttatatcttttaggatagaaaagaaagaatcgatacacagatctggttggagagaacatggtttaattaaaggcaaagctgattttcagcagctgcaggtcttgcacagacaaaaacaaaaaacaaaacccagaaaacaaaacaaaaaaccacaaaagaaagtttactacacaaaaccagtttctgataaagattctcctccccctcattactccacagtgaggatgataaggcgaggaatcccgccccaagagtcagaaaacattccaaacaccaaattctcatgcagaatggggctttagataggagctgggtattactgggagtgagatggtaaacctggttagcttgtctagggcgcaagaatcagtgacagttcaaacactggaatgttgcagctgcctgaatgcagagctcaaacacacaaactgggtaaaggtagtaggaaaaaggcttgggaagaggagagaaaggtggacacagggaaggggctgaagagaagcacaaaaggtttcatattgccattgggtagggggcttcaccttttcagacctttcaaaaaaacaaaacccaaacaccatgtcaaactaaaagagcaataatgtaagcatacggggsggggggggggggctccaaccactctctctgaagagcaatgagcgttatctcaccccttttcattgctggggttgcccagactgcagtgacaactggggctcctggatgtgctttgctctacagctgtcttccagctcttaagttccacactaactccatacactcgcacacacaacccctcccctctgggacagcagatgggcacgtgtgtgtacacaaacatacagacacacaaaggagagacctcccagaaaataaaccctaccactagcacagcaattgaacaattagattgtttccataatttccccttaaaatattacttttccaggaaatgactaacagaaatgctgtccttctgtttctacacaagaacattttcagtcctctttcctcctaataaatatcatacaaagagtttattttcctttctttcgtctcttccaaaatggacgacgtcgtgttttcttctgtgcctgatgggcacatgtccgtgctgccttgaatttcactctgaaagtggaggctgggagactgcagctgggcaggggcctgggccctctgtgggctacgcagatactgctgcttccttcctcttcagactgtcttttgggccccaactgctggaccccatgctgttgcttcttggggagatgtgatgttgcacacattaggaataaaaacaattactagcatacagcattgggtaaaagaagggatrgagatggggcaggagggtgggaagtagaatgggggcacaaaaaccaaccaaaraaaaaataaccacactgaaagcttctacctattagaacgtgtcaggctgtgaatggactagcctgccttctgtgagactgcttgctgtgcgactgtaaaatgtacaggaatcaaaaacgtaatttgaaatcctacagcagtctacctgctagtccagcccagcaccaccacccacactgtatcctcgattggggctcgagcacctacagagtgaagggcattccctgctggagtctcctggccagaggaaggcctaccagagccttctgacaggccttgaactctcccttatggaacatttccactggctgaagaggtcggttccccatcctgtcaccaccaacctctcacaggagcagtgaacggggctttccttgctacacactgactagaagcacacctgtgtatggaagaattcagtgtgatattttactactgagagtaataataataaaagatgtttaagaataatttcaactacattctcagtcagcaaagcaatcattaatggattcctattttattccccaaagaggaaaaaaggactgagaagttcccattggcttctcccatctgccttcccttctcagctttcacttcccatgtggctggggacatgcacgatggagaaggtgagaggcggtgataccaagtaactgagtgagataaacagcagttcctctctctctccctccggarggccccggggggacggagagttcctgatggatttttctttttgttgcactgcgaacatttcgtgcacactcagcgggctggtggaatacttacaccctcttgacagcgagaaacagaaaagagggctgccacctgcaggggactgtgtgggccagtcctgcaaacccaacatgccatggtttatggagccttcattcccaggttgccactttggcctcagtgtggagggttcatggtgccttgtccccgttgctgtttctgcttctgctgcattaacagctgctccagagcagaaggtccaggatgcatcatggaactggaccagatagactgaaaaacagtccagatcttgtcagcagaggtcaaatgccaagttgtctgaaagggatttttcaatcccagccaaatataaaggcatatatatggccccaaaacccaaccccactccccataaaaatccagctattagaaaaagtcattataagactcttaaagctagttagtttccattaagactattttaaaccagaagaagtgaaatcacattttatgtcaagtctttttactgaaactcagctgtatgtggtaccacacagggcatttactataaagttttcaggcaaataaaacatttctaaaattagatactcttattttgtcagaaaaggcttaaatcaaacattccaaaatgaatcagaattttcttaaccttagaatgaaactaaaacctttgtttttgtcctcctgaagatactgctttaccactagtgaattcagaaattaaaaattatcactcaagaatcttgtaaggcagaccatgtttctaggactttgttatatatgtgctatgtatcagtcaactccgagggcctgagaagtctagctatttatgtgaatgaaagcagagacacctttgctgtaataatcttgtggttcttgttcctgaaatctactcacctttaggctttccatgaggacagcagaggaatcctccatggaagggccatggcctgtccaggtgccactcggagtgctggcctgatgccaactgctctcagaggatgacgttgctgagagataatcaatgccaaacccacccatggctaagggatgaaaagagataagaaaaattcaagaagatgttctatcactgccaattgccagaccccagggaaggatagagtaaattctttcaattttgcctggcaatgaaatgtagatctcacctggcttawcagttttccaccgatctgcagtccttctatccctgttatctggagtcccaatgggtccaaaattggagaatggaacagaattatggttgtgtgttggaggagagctgggtaggctgcttgggttagaggaatgaggagactggctggctggtgttgaatgatctattaaataatagcaacacaggatatagtaaatcattgtttcacaaacatacaaagaactacaggttcctgtagatctgatcactaaaattctactaacaataaccacagggctttgaaggaaagggaaactaaaggctccaaagagatctgctagatgcactaatttgccctgccacacatatctaaggcatattcttcgccttaaaaaagcaaaataaaatagtaggcaatttttgtcaactgaatgaatgccctattctcacacggctatttcagatacatgtttattggtcttatgtatcagaaagaatttgctaaccttaagaattactattaagtcagactctaagttaaaaatctcaattttaaaaagtgcagagctgggcacagtggtgtgcacctgtagtcccagctacttgggaggctgagatggaaggactgcttgagcccaggagtttgagtctagagtgggcaacaccacaagacactgtctcaaaaaaaaaagtgcaatttttctgcaaagaatgaacacctacaaataaaactaaaaagcagctgagaaccataagatagaacctctattttctcccttacatctctgctggctactgaggatgtaaaaagttttgtcagtagcatttattacataaaccggcttcttctttttttttttctatttcctttcagaagttacaaaaacaaacaaacaaaaaataaaaataacccaacaaatgatatatttgtaattacagaatctcactatcccttaatcaatctgagtgtacaggaaatgtaaggtctataatttaaagagtagttaatacctgaactggcaggaagtgatggagaccacggagtcccttcaaaaagggaatacagagatgtttcctggggggccattgagggactgagttctgctttggagctggatgtcaggtttttcccatatacctcattgaacatactattatttgggtatctttcctgaaagacatgacagtgaagttataaactcaccccaaggaaagagatttgagaaaatccaatgtcttgttcatggatgcttggtacaccttaagcttttcttaggaagagaaattttgaaggcttttatttctttttgtttcaattttccagtcaaattaattttcctctttgctttctctcacccttaaat

SEQ ID NO: 96007 - DNA, 44136 bp, Homo sapiens
  misc_feature (1)...(44136): n = A,T,C or G
gtattcaggccaggttaagagttttgcatggatttcctcaattaatcctcaccacaaccctatgaggcaggtactagcatcatttcccattttatagctagtttactggttactaggtcacccagctagttcaccttagaactagatcctcacattgggctggtgcacctttcacctccccacctagcaaagtcccagccttcgtgcccccatcagatcccacctggtccatgaagcttcccagacatacccatttggagacagtggagtccagtggttaagcgcagacacttcaatgccagacattcctttcaccctcccagcacttgatctctgtgggtggggtgggatggaggagcggctttcataagcccttaggggatttctgtgtgaggaccagaagcagaccctgaaatgaggattccctgcaaacgacttattaaagaagtgctctgaggacagctggtaagcagagtgcgggggaggggggcgcagaagaggaaaggggaggaaatctgtcaagggggtaattgcagataatgtcctggagagggcagcttcagcctggccccgcccactgggagctctggagtctaaggttagcctggtgaaggacagggagccaggctttcacagtcccacctgccagtggttggtgagggcgctccctgggaggactgaagtcctaggctttccacctgtatcggcaaaggcctcctccaaagaagagctgcaggctctggttgctggaagagaaggcacaggaggaggcgggagcgatctgagatgtagggcaccgacactgcgctatagaggggcatccggacctccacatggagaagggcaggctgcccagactgttcccacaaaccccccgcacccatctgacctcccttccccatccttccacccctactccagtcttactctatttcaagtttaaaaaatgctgacctagattcttcaatggatatggagttatccactgacagagagagggacagtggcttgaggaaagtggaaatccaactggaagtctattaaagatcgacaaaagtcaggtgtgatggttcacaccagtaatcccagctacttgggacgctggggtgggaagatcctttgagcctaattcaaaccagcctctgacaagcgagaccctatcagagagagagagagagaaacaatgtcccaggcactgagggcctaagaaggcagccattacttattatgtgttatataatgtctattgggtggtaactgtgtggcaggtgtggcaggtggattctctctcttaatcctcacccccaggtcactggaatccagagcccacactgttaaccaccttttgatacgtctccctttatgattaggtgtatcaatacagttcattcaggggagcagagccattatgggtattatgggaataagggctttattacaggaatgacactttccccaaagactgaaggagctggaaaagtgaaagtctgcaaggaactgtgggatactccaagaggagtcacaaatgggtggaggactaggtgaaacctatctgctgggcacctctgtctgtcatagcatctgactagaagatttccacagaggaatggctgacactcccactctgccttccaaatctcaccccaggtcctcttttggccaactctaactcagagccttgttggtagggcgttctggaagtgtactttccaatttaaccaaatcgatttagcacaatccagcacattataaaatcttcaaagtaggtgagatatagctggctaaaagtccaggctgcagaataaagtttgggccacatttttgtatgtttatctcccttttttaatggctgcatgacattttaaataatattggtcagtattttatgtatacggtagcatttagaaacactggaaaaatagtaaatccttcagagctgcacttcaaggactaagcagagtgtctggcatgcagtagatgctcagcaaatattggatgaatgaatggatgctgaatgactagagttcttgcaggacaacattttgcccaagacaaaatcgcccaggggcaggaagtggcctcgttctcccaggtaagggggaggtaattctactcaccaatatgccactactttcagtcttctggctagcacccaaatgggatgaaaactccgtgtttactgcttcgaagaggaaatgatcaccacctctttggggtgtcttctttcctcatgaagatccccttaattgtacttcctcatgtgcaaaagtggggccccaaccctcttccttggccacagctgattgaaccatgattagatacctgaacacagctgggccaatcagattctcccttctgggaatttggaattgggacctaaataaataaaaaacatttaacaaaacaagcatagataactaaaggggggtagaaagattattactaatgaattaagataactgacaggcaacttaggcaaaagatattttagtttcttacattacactctacatcaaaaaaattttgaatgtttttagaggctgggtgctgtggctcatacctgtaatcccagcactttgggaggcagaggtgggtggataacttgaggccaggagctcaagagcagccaggccaacatagcaaaaccccgtctctactaaaaatacaaaaaattagtcgggcatggcacatgcctgtaatcccagctacttgggaggctgaagcatgagaatcgcttgaatctaggagatggaggttgcagtgagccaagattgccccactgcactccagcctgggcaagagactctgtctcaacacaagaaaagaaaagaaaagaaaagaaaagaaaagaaaagaaaagaaaagaaaagaaaagaaaagaagcaaaccacagagataaaatattcacaaaggactcatccagaatatttgaagaataagacaagcaaaagacaaccaatagaaaaatggacataagacttcaacagaggatactgaaatgaccaataaacatacaaaaagatgtttgacttcattaatcagcaggaaaatgcaaattaaaaccacaataagttataattacacacagcaaaatggataaaatttaaaaagctgacaatatcaactgttggtaagaatgtgggaaaaccagaactctctctcactgatgatggcaatgtcaactagaacaaacactgtggaactatctactatttgggaatatctatcaaagctgagcatatatatgtaacttattacacagcagttccagtcttacttatacacccaagagaaatgcatacttctttttaccaaaagacatgtacaagaatatttaccgcaacactattcattatggctcaaatctagaaacttccgagtacattgtggtatagtgacattgtggaatactatacagcaatgagaatgagtgaactacaactaatacattcaacctggatgaatctcacagatatgttaaataaaagaagtatttactatataattccatttatataaagaaaacgcaaaactaatctctactgttgaagtcaggctaatggttatctttgagggatagtaactggcaacgaatatgggggattctggagatgcggataatgctgtttcttgatctgaatccaggtaacagtcattccatttgtgaaaacttcattgaactgtacacttacaacacatcctcttttcctcactgcacaacacatcctcttttcctcactacatactatgctttaccataattttttttttttttttttttttgagacggagtctcgctctgtcgcccaggctggagcacagtggcgcgatctcggctcactgcaagctccgcctccccggttcaggccattctcctgcctcagcctcctgagtagctgggactacaggagcccaccaccacactccgcttttttttttttctctctgtttagtagagacagggtttcaccatgttagccaggatggtcttgatctcctgacctcgtgatccgccctcgtcagcctcccaaagtgctgggattacaggcgtgagccaccgcgccaggccacttcaccataaaatttttaaaaataatttttaggagctctgttactggtggagggtgcccaggttcttgacattttgaacaaagaattggacaaaacgtacaaagcaaggaaacaatgaagcaacaaaagcacagatttattgtacatcaaagaacactccttscggtaggaagggcccaagcaagcagcaattacagaattttctggggtttaaataccttctagaggtttcccattggttacctggtgtacaccctatgtaaatgaagtagtggccagcgatcagtctgattggttgcaggaggggaccaatcagaggctgaagtaaagttatgaagttataccccatgcaactaaagacttggcctgccaccagcctgactgattgcccgcggggaccagtcagaggtactttcaattttttatctgccacccagaagagggattagcttctggtccttttgttacttgggctagaaagttggggttttccttttgatttagttctaggaagtcagcctaaatcggccttaggttccctgtctccagaccctattttcctgcctcgtagcttttaggagattaatgcctgcctgcagacaacttcctcatttaactttcacaacacccctgaggcagcaagatcctggcgaggcagagagcctctcaagcttttttggatgaatattttccaagtctgagtttacataggtaaagaaatgtaagcagtttttttttgttttttttttttgttttgttttgttttgttttaacagaagtggctgctggagtggagatgggaatgggtaggactttagccgctccagtagccattaacgccccaccctggttatccttaaaaaattcgattaaaaaaaaagttcttaatatataaacatgacctcagccatcctatatatacatcaacataagaaaaaggtcccgtgctttttatgggaacagcttcaagacaggtatcccagcccccggcccctccccagcccccttgcaatcagatccttgtcttctaaaacctgccacacctaagagcgctgcctgaaggccggtttggcctgttgactcctggttttgactgttggtgatttaagcgattggaactggaagcaccatttgacaacattttgtaaatcattacttctgaggttgttatgacgacggggtgtggcagtccggcttcacctgtggcagcagcttaggtccctgccctcctgcagagcacacttcaccgacagcaggactcaggttttatacaagtctctactcgccattgcttacgtccaagaacccaacctaccaggtttaaacaatttccagtcacatacctgagccaccaccaccttatcctgaagggatttttgggtataatgcaaatcgattgaccgaacatttatttacttattcaagacacaaactaagagatggggtgtaactgattatctaatttgttaatttagtcaataatatgccagcattgtgcaggggaattacagggaataggaaaaagttaaatttgtgtaaatcatcagattgagtcattttcctactttaaaacttccattttcttccgatattaaaataaaaaccagacaacaagcacctgggggggggaaatcccctcttaaaattacaatttctatttttaattttgtcttcagttataaaatttattttaaagttatacaaaaatgaagtggttggattgtggaattacgtcttttaaaatgttatttgtccaatgaacaaaaaccactcgcaccgcaactccttttactatcaaattctgcaccgttgcaaaacttccttcactcaacgcttctttacaaacatcgcgatagcggagcggtctcttgggcgcaccccgtcgcatgttcaaccccacccacttcctgtctgacgatctccttacgtcaacggtgcgctggagcgagtgagcagcgatacctaggrcggaagtgctctcggcggaagtgatcgctgtgtgaatcgtgggtgggatggccgcgggccgcctctttctaagtcggcttcgagcacccttcagttccatggccaagagcccactcgagggcgtttcctcctccagaggcctgcacgcggggcgcgggccccgaaggctctccatcgaaggcaacattggtaagggccggaaagcggctgccaagccttggcctccgccacgcaggcgacagaggctgggaaaggagctgggcccggaatggcctgcgtctgatgcggccggcctctttttctgggctgcgaggagagcctttcccctcgcaaagtgcactgtgtatctttgcctccttgtttttaggatatcgggcctcagtacccgcccacaggaacatatttgttggggcataaaagccacgcagttagtggataggacaagaattgtattagctgtttgtaatagatcgaaattgaagcgacaagcgggtgcagtttatttgttctcctagatagggttgccatatttagcagaaattaaaaataatatccagttaaaatagaatttaagataacgaataatttttagtgtgtgtccaatgcaatatttgggacatccttacagcaaaacaacaacgaaatcactcattgaaagttcaaatttaactgtgtcctgtattttatctggcaaccctattcgaagagagttcctaaatttcagtcgttcaaataccacattcacaatttttgccctgtgcctgtgctagttgcataataatttcttaaggcttttcttagaagaacctcactttttaaacttaaaaacatgtattaaattaaaaattattttgttaaaagagtgagatccagtatcttgaataaaaagtagtcagaaagcaaaatgaaggcaaagcatttcgatttaatattaataaattctgacttgatacttttatctaccaagtcactgagcccctaaaakgggcttagcaagtgttgagtactgaagacgtagcagcaaactgagaatttctttttttattcattcaacaaatcaccttttgagccacttccatatgccagcactgttcttggcctggagaatacagctgtgaatagaacaaataaaaatctctgctctcatggaactcaagtagggagagatggacaataaacaacataaattaagcaaggtgaacaatatgttagagagtaataagtatgatggagaaaaattagggatgaagaattgagggaagtttttattttattttatttgagatggagttttgctcttgttacccaggctggagtgcaatgacacgatctcgactcactgcaacctctgcctccctggttcaagcgattctcctgcctcagcctcccgaatagctgggattaggggcacccgccaccacacccagttaatttttgttttgttagtagagacagggtttcaccatgttggccaggctggtctcaaactcctaacctcaggtgatccgcctgcctcggcctcccaaagtgctgggattataggcgttagccactgcacctggccgaagttgtcattttaaataaaataagcaaggcctcactgagaaggtgacatctgagcaaaaaactgaagatgagggagcaaatcacgtggatacctgggagaagaatcttctaggcagagtgaagagcaattggaaaggccctgaggtggaaagtgtgttcggggaataggagggaaatcgttgtgactgaagtcgagtgagcaaggatgggagggaaattagggcaaaagcccaaggggtggccagattttataggccttatcatgggtttttaatcttaccgagatgggtagccattggaaggtttgaggagtcaagtgacagttttacttagattataaaaagatcactgtggctgataacattgaaagtgaagagtgttaagtggtattgcaataattatagtattgtgaaaagtgaaagtggtgagacgtgattggattctagttatacgttaacaaaaattgagttacattttaagtaaaatttaacagtggaagtggtgagaaatgattgggttctagttatattttaagatagggccaattggatttggtgacaggttgaatgcagagtgtaaggtaaagagaggggccaatgatgactccaattattttgacttgagtacttgaaagatagactcctgattttcttttatttcctcctytccttcttcctcccctcccctcgcttcccctcctttggtgtggtcttgccctgttgccaggctagaatacagtgatgcaattgcatctcactgcagcctgcctcccaggctcaagccatcctcccaccttagcctcttgagtagctggatccacaggtgtttgccactatgcgtggctaattttgtatattttttgtagagacagggtctcactatattttccaggctggtcttgatctcctgggctcaattgatcctcctgccttggcttcccaaagtgctgggattacagaagtgagccttggttttaagcatgttaggtttttacatgcctattaatatccaagtagaggtgttgaataggtaattggatatgtaagttcagaattagggtctccccggactggagctgtaaatgtaggtggtatttaatgccagagactatgtgttgatggaaaggactgagccctgagcatgcaaatattatgaaactggggagatgggaaggaataagcagagactgagaaggaatgcctactgaggtaggagaaaaaaacaaaagagaatgatatcctggaagccaagtgaagaaggtattcagtgggagggaatgatcagctgtgttatactgtttaagtaaatgaaggtctttggtgaacttgaaaagaacagttttaggagtgttaggagtgaaagcctaattggtataggttcaaggagaatgggaggtgaggagagtgggttaagataactggaagtttttagaaagggaagtcatggggtggtagctgaaattagaagagggtgtgagtgtttaacatttttaattttctttttgtgaaaagaattagagcatgtttttaagttgacagaagtggtctagtggaaaggaggaaaattggtaaatcgggacagaggatagaattgctggagtgatttttaagcaagaaagaatggaatctattgcccagtgggaaataatttagtcttagctaggagcacaattcatccctagtaacaggcgtgatggcaaaatatatgagcaccaacttcagagggtgtggtgggaacttgggaaggtcttttggttgtgtctgttttcagagtgaagtaggaagaaaggtcatcagctaagagtgaatgtagagacagaagacatgaaatactctagtgaataagcaagagaaatgttgaattactgggtaccatttaggacccacttggagttagtggtcatgaatttaaagtgagaccagtcaccatggctgtgtgtttttctccagccaaatccgaaacattgaaaggaatgggaagggagagtcctgctatttgcctgatgatgttattatttaaatatgatgttttgtaytgtactttgagaaacacacccctaaaggaagctctgtcctcaaatcccagagagagaacagggtatgtcacaaagtaagtacttaggacaggtcatcagataaggtttgaactccctctattttcctgacttttgcttcttaaccttgtcaaatttctctgcttcttccttgctttcttgtgcaacagaggcttactgagtgaggactaagagtccactctcatgctgagcacagcagtgaatgggatacagctcctgtccttcaaggagctcacaactcacaactaagtaggagaaaacagattcgacataattttcttttttttttttttttttttttttttgagacagagtcttgctctggcacccaggctrcagtgcagtggtgtgatcttggctcactgcagcctccgcctcccaggttcacgccattctcctgcctcaggcctccaagtagctgggactacaggcgcccgccaccatgcccagctaatttcttgtattttttagtagagacggggtttcaccatgttagccaggatggtctcaatctcctgacctcgtgatccgccagcttcggcctcccaaagtgctgggattataggcgttagccacygtgcctggccgactcgacataattttcatactgtgtggtgagatttgtgattgggcatggaaagccagaatctctggggtaggaattcccaagaggaagaagagggaaaagtgtttcagccatagaaagcaacatgtgccaaggtggtgaagcctgaagaaacacatgcagttttttgggggtttttttgtttgtttgtttgtttktttgatggagtctcattctgtcacccaggctggagtgcagtggtgtgatctcatctcactgcaacctccgcttcccaggttcaagtgattctcctgtctcagcctcccaagtagctgagactacaggcatgtgccaccacgcctagctaacacatgcagttttaatgaaagagaagtagttggatgtgcctggagttgaagggacctgtgaaagggtggcagaacaagaggttggaagggtgggatttgccatatgtcgaagagccttgtggaccatgctagtttatcctgttggcagtgggaggctgttgaacacttgaagccagtgtgtgccatgaccagattaatttaaaaaaggaaattgtgtaggatgagaaagaaagctccataaaacaggcactttctttgtatattttgtttgctgcagtacccatagtgccttgcatccagtttgttggatgaatgaatagatgaattggaacagagttgagtctgtgcactagttttgtggctattggagtaattggagggaggaaagatgcaggcctgaatagaagaactgaaatgacagagaagtgacggtttcagagagattttggaagcgggattgacaggatgtggtggccacttggaggtgaggtaggaggaggagtagaggagggtgacactgaggttcatgaggatgggaataaaggaagaggcggtctggggaggttagagtgatatgttttgtatgaggtgcctgtgagacatagaggtgttctgagacagattggaatatgtgcctgaggtcaagagagtccggagatgggtgctgagatttcagatgtggaagttgttgactggtgggtagaggggtagttggtgaagccttggaagtaaatgcaattgcccaagaaaagggtgatgcgaagtggaatgggaggacctaatctgactctttttactttcatctcccactactcttcatcaccccacacaccctgatgactctccctagacagaattagtcactgcctcctctgtgggctgacataacattttgtacccacaactgctgcagcacttgagttctgctgagcttgtttgcacattcaccaccttccttgggctctgaccactcagtgtgctgttcatctttgtattgctgacacctaacccccgccttgacccagtgtactcagtactgaccagattcttgaatcctgtgctatgatatccatgtggaagttaggcattggtacccacacagggaatgtattaaactgctttttaaatcaagagtgatcatcttctctaatcacaggtaacatcctcaagcaaatcagaatgagagcacccattcaggaaacctgaacagggaaggtgaacccctgtcctgaccaaaattgggtatgtttagagggcttttcttgtattccttctgctctaagtcctattattctgatcctgaaggtgcagacagcggcatgtaaggaaaattgatcagtgaagtagcaactaatggcatctagcatgacttacgaagccatataagatgtgtgattgaaagtcaaaagcttggtacctagaacccctgaaaatctaaaaaataaaacacctagcctgtcttttaagactgttcatccctacagtgtattatcatcttcttgtgattatcttacgattacaagcgtaaattgaagaaaagattgctgtatgaaatctcactgtcagtgagtcatctcagcatttttaccttattttcaaagacccaaccagaaaagaggaaactcttttgcacttttcaatcaagaaacttaaacataaagcagtagagggcttccctaataacatgtttcctccagcattcaaaattagtgacttcacatcactaatatgtgtcttacttattttragtataaatgattgggcaaagaatccttgggaaaaaatagcctatttatttcaaatactgtatagtggattctctgtgcctgtgactcacctccttccctccatcactgttctcatactcaggatgcaaaggttcagtctctgtcttcaaaagtgagctcccagtctagctggagggagtgatgagtgaacaaataattacagcgtaatcctttggtaaaccagagcaggcagtaattaactctgcctagagatgaagtggcgctggagagagttcaaggaggcttcacagagaaggtggcagtggaaagctgaatcacctggtaggcaaggcgggaggaggggatgtcagatcagtgagggtcttttgtgctgagcagatgagtttggatcataggaaggtgtgagaaaattttttgccttttttttttcgtaaacagtttttcatgaaaaaaggtcatcaaagtaaaatgtattaagttttttttaagcctgctgactgatttttattaactttgcctagaatgcctttaagcttggagcctgtatgatcctgggtactcagtcttggggttrgaatataacttgagggcaagctctcagcctagatcatcatttcagttatagtacttacctctgagtagctactccataaacatttgttgattgaatgagtgagtgaatgaatgcagcatcaaatacagtatctgaaataaagacttcaattttttttggaaggactttttaaaaaagacattagacagttttatatgttctgactttgttggattttggtaaaagatttcagaattggattttttttctcatgtttttcatcttgttcaggagatgaaaatgcctagaggtgataaatataggctcctatgaaatacagctgtattagacgtaaaataatgggatctgttattttgggtattacatcatatgctatcttgctgctagattttagcattacatagctatggtaggcattgtcagtttatagaaaattttgtggggagaaaaaaacatgccttagraaaagatgagtggtaacaacagaactctttgtcccagcttgtggaatgagaatagtggagctaatgaaaatcaacatgttgaagtaatatactcttaagaaagtaccttccacctttttttaaggttgtggcaatataacaacagagaacactggtggccagggtcctaagggaaggtttgatgctgcttgtaagttctgataccttccaaaattcataatactgagagtatattgaaagacaggccgggcgatgtggctaacccctgtcatcccagcactttgggaggctgaggcgggcagatcacctgaggtcaggagttcaagaccagcctggccaacatggcgaaaccctgtctctactaaaaatacaaaaattagtcaggtgtggtggcacgtgcttatagtcccagttactcrggaggctgagaggctggagaatcagttgaacccgggagttggaagttgcagtgagccgagatcaccccactgcactccagcctgggcaatagagcaagactctgtctcaaaaaaaaaaaaaaaaggaaagaaagataacagcagtggcccggcgcagtggctcacgcctgtaatcccaacactttgggagaccaaggcaggtggatcgcttgaactcaggagtttgagaccaacctgggcaacatggtgaaaccctgtatctgccaaaaatacaaaaattagccgggcgtggtggcacacacctgtagtggtcccagctactcaagaggctgaggcaggagaatcgcttgaacccaggaaacagaggttgcagtgagccgagattgtgccactgcactccagcctgggcaacagctagactctgtctcaaaaataaataaataaacaaacaaacaatatattggacaggtcaaacatactggacagctactcaggaggctgaggtgagaagatcacctgagcccaggaggcagaggttgctgtgagccaagatcacaccactgcactccagcctgggtgacagagagagacccccatctcaaaaggaaagatagcagctaagctgggatctaactaaattgcagtaagtctgagatagtgatatcataagagattggctgaagaagtatggctttctgtagacaggggtgttctggtcactaggaggaggcttctgaagcaatggagagcaaaacaccaccactcttaggaaccccctgtgaacatcttgaaacatttgtcaaaacaaacaaacaaacaacaccccagcaagaagggaaaaaaaaaatctatgatgatcaggtatcacagcactgagaaagttatactgtgtctggctttaataaaaccatgtaactttgaattattttttaaagtaattattccacatctgtgggtggtacctggcacagctcagttccagtggaattagtttaagaaatactgccctgtagtgaattacccaggctctccaaggctgagaaacatggatggcacagctctcaggacatttcaccaccatttactgtcattgtatgctgaagctgccttgtgattactaaactagctttccagaagccttggaatggggcatgggttacagagtaccctgagtattaggtgttattgttccagtcattggaactgtatatttcctgttacatctaatttgttggcattctagaattaatgtgtttaaattgcatgagtcaatttcttggagtcctgactgctcttagatgaactaatagtgtctgacctcagagcccttcctttccatctgcaacagttttttaaggtaattgtttttaacttttaaaaaatataagtaattctaacaattgttcaatcccagccatctaacaaatcagctacgtttatcttttcatttaattaaaatagctttttagctattaaatagcagggaccatattttagacttgttaaacaacctacaatctaaatattgaccatctgggccaaatattttaagcgagggcttactcagggcagacaggtatctgataatatacacattcaaccacttcgcacctgaccagtgtggtaggaattcagagctagagaagtcctgaagaagtggcaccttaggcttgctgggggaaaggatttagacacaggcctggaagagcaggggagggcatttattcattggagtgtgggaagagcagggatcgaacagatgtgaagaagcacacacaagttaggtggaggtggggactgagagatgagcgtgactgtacaaatccacagattcatgctgtttgttcttatcctgcctattcagagaggagttggggtggcatgtagtaaatgtcatctattaaatgtgtgggttcttatgctgagacatcagcaccccaatcagtaaccataagtggaaggatgccccccttctttcccttgagaaagattacttctgatagaggagattgaggtccagatacagtcttaagatttattttttatttttcacaaatgtaggtttcagagggaactgaaattagtaatatattgtgtattttattcattcagctaggtcattaggttgtaatttgttttctaccctggaggagccccatcctstagctggagaaacacaatgacaattgcagtgatggagtctcacccagaataccaaccatgcagaaaggaggactagctaatccagcttagaggtgtcaggatctggaaaggcttcacacaggaggttcatctaaacagaaccttgaggattgagtaagagttggtcaggtgaggagaggaggcgcttcaggaaatgggaaagcatatgcaaagtcatatttgcaagagaacatggcatgattggagtttggtcctgcaggagggtaggctacctaaaggaaagccaaggccagagaggcatacacagggatcagatcttcttgtgtcttgcagaccatgttaaagagtttggagtttgtcatgaagcttgttcaggtcttagctcagatgtcactaacttcccattgcacttagaatagaattcagacctcttaccatggccacaaggccctatgtgatctggccccggactgcccatgtggccacacccatcttgagccactcctccattgcttgcccttgctatagccagttagccgatagagagctgtcaaaagattgtaagcagtgttatttcatattcagtctggccacagtatggagcatggattgaagagagcaaggccagcatcagaaaggcaagagatgataagaggctggtcttgagcatggaggtgggaatggagagaaaaggacaaatatgaaaaatgtagaagcaaatgcagaaggatttggtggccactgaggtttggcagaggagggacttctgtcagtgagtggatggtgtgttcataccctgaggtctgggatacaggaggaagctcaatttggtgggaaagatgattagttcatttaggaaatatgttgactttgaggtgtttgtggaatgtcccaagtggagatgtctggagagttcttgaatagtctctggagctcatggaggtatgggccaaacattggtataaatgggaaaagataacttgaatgttgtggtactaggttgatttcatctccaaaatatttctcgaaacaaccactacttttcactcctctgccatcacctcggggcaagctgctatatcttttaactagtctgcctgcttctgcttcagcccattcttacacagctagtggagtgatcttctaaaaatgagaaggagtcttataattttcctacttaaaaccaatcttcactaacttcccattgcccttagaatagaattcagtcttcttaccataactacaaagccctgtatgacctggccctggactccctgtctggccacacccatgttgagccacttctccatcacttgctcatgctgtagccatactgtatggcttcttctagggcctcaaacttctgtattgttgtgtgtcaagttctttctctctttcaggtctttgcatatgctactccctttgcatgaattgwcatcttttaggtcttacctcagatgtcattttttcaagggagtctcctctgacctcctgggctatattagtgccatcctgcattttttcctagcacctaacacaatatgttagtagttaattgtgcgtttgtatcacccatacaagctctgtgacgacaaaatccattctgtgttttgtttaccattgtacccacagttcctgacagtcctgagctcatagtcagcactccatgaatattttttagatttgttgaatgaatgagattataatcatttttattttttgtcttgaaaaacttagaaattttacactgtcacagtacaaatagaatggtgactcaagtgatagaacttatggagctgatttcatctacttttacattttcaactgttattaaatgctctgcctctggaaggttgagacatggaaattgcaaattaaatcttaaaaggaatttttcctccctrttggctgtattcattatggtngttctggttagcatgaattgatctgttatcagtctgacaatggtacggcygctgagtttgaaattcagaaaactaatacttgttcccttgagtttgggcgtttgtggcagagtttagtagcagccttctcyttcagccctgatttgggaagcatcccaatacatgctatttgcattgcagctgtgggaaagtccacrtttgtgaagttactcacgaaaacttacccagaatggcacrtagctacagaacctgtagcaacatggcagaatatccaggctgctggcacccaaaaagtaagtttttagttgtggtgggtagttggcaggcatgggtgaataatctaattgtcataatttaatttactctcagtgagtaaagtagcccagtttgagtatcctttttaaaatagcttcattccagaaagcagaccacatacaccagagaggatatgacttgtttgaatatgtgcagttttgatttttgtggtttttatatgtctatctaagtgactgcctctgttgtttgtggtttcccaaagcatgtccaaccatcatggatggctttgaagatgaattttgtcattcctacacttaagtatttatattattacttaagctaaccactaggattaatagctaattatagtgattttaactttttaaataaagtcttagaaattagaagggatattagagaggttccagtcacactttgagtcaatgggagaggttacagctaacatttatgagcatgtactatgtgccaggcactgtactatgccaagcacagtacatttcacttacacctcatggcttaggccctggtgtcaagactatggctttggcagaggccatagagttggtttccagccacatcagtctgagtaaggaaagacttgtttcgacatgacccttagagggagcagaagcaccatgcctcctcaggcaccatgaactgctcctgccgccacctgggatattcactgagtggcacattctggttcttaactctaattactaaacagttctgccttttaatgagccatgttgcacccctgtgactctgactcattggttcaagttctacctcttaagtcttttaacttttcgccgtaacaaccctatatatagttgaaggtaatgattttcctgttctttctccccctcaagtctctctccttttttttttttttttgacagtctcattctgtcacccaggctggggtgcaatggtgtgatctcggcccactgtaacctccaactcctgggttcaagtgattctcatgcctcagcctcctgagtagctgggactatgggtgcatgccaccatgctgggatactttttgtatctttagtagagacagggtttcgccatgttggccaggctggtctcaaactcctgggctcaagtgatccacccaccttggcctccaaagtgctgggattataggcatgagccaccatgcctggtcaagtcttctctctttsaagccaaacacctccagttttcctccaggctattctttactctgaagtaactttacctaagtgatgagtcctagtttgttcactttccactttgaatttactaagagtgctacttggaggtgaacaggacattctggatgtagtctaagtgggacagagtatcatggaacttgttctgggtgccatttttttttattccaacccagaattgtgttaccttttgtggctggcatatcatgcctattgaggatttttgctgcttaagttgtctctttatatgtctgtatgtgtgcctgtgtgtgtatttgtgaaattaactttcctatgcaggaataaattacatatctttttctgagtatgccacaggtcacctgtgtgtatttcaaaatacagtcatgggctgcataatgatgtttctgtcaatgatagaccttgtatacaatggtggccccataagattataacaacatatttttactgtaccttttctatgtttagatacacaaatacttaccattgtgttacagttgcctacagtattcaatacagtagcatgcgatacagctttgtagcctaggagcaatagggtgtgtcatatagcataggtgtgtagcaggctatcccatctaggtttgtgtgagtacattttctgatggtcacacagtgacaaaattgtctaaygacacatttctcagaacatattcctgttgttaagtggtacatgattgcatgtccacaattgtttgatattcctcccttctagaagtagagcgtaattcttgccttgaatgcagctggactttgtgatttgtttctagtaaatagaaagtagcaaaaataagaaatacctttctagggtaggwcataagagacactgtagcttccatcttgttctgggggaagccagctgccatgtcaggaagcagccttttcaagggggccacacggaaggaactgaggcctcctgtgaacaggtacgtgagtctttttggaattggatctttcagccacagtccagccttcatacaactgtagcctcagccaacatcttgactgaaacttcatgagaaaccctgaggcccagccacccagctaagctccttcccaaattccttccccatagaaactgagataatgaatgtttttgtttaagccactgaattctggcataatttgttaggcagcaatagataactaatcatcctgtaatcccattattcagaagtaaaatggacatttttctacagagaaaatgtatagatttacatatacttacataaatgtataaaatatatatacatttgctttttgaaacaaaaattttgattgccacctgtatgtcacttaatagacaagatctccctttcacagtgatatcattttaatggttgtagtgtactgcataatatgaatattatcatttagttatccagtcctctattttgaatgtttagttttctaatttcttcctattataagcagtgttgcaatgatgaatatcattgtagctatactgcttgttttttaatataaagccatgttttgtgtatctttttgttctttagtgaattgcctgtccaaaccccttgccttgtttttttctattgagatcttcatctttgtgtaatggcttcataaaaactcattgtatgttaagtatattaactctgtcatatrtttgtttgtcattttcttttytttttttttttgaaacggggtctcgccttgtcgcccaggctggagtccagtggtgtgatcttggctcagtgcaacctctgccttccgagttcaagcagttctccctgcctcagcctcctgagtagctgggattacaggtgcctgccaccacacccagctaattattgaatatttagtagagatggggtttcaccatgttggccaggctggtctggaactcctgacctcaggtaatccacctgaattggcctcccaaagtgctgagattacaggcgtgagccactgcgcccgaccatgtcatttttcttttatcttggtatataatatatttttacaatataatacatttcagtttttatgtagtctaacctgtccttctttttcctcatagttagcacctttgatgttaaaattgtagcccaggagtataaaaataatctatttctttttgttgcttttatggttttatgttttatgtggctttacaagttataagactttagttttttcacaaatggttatctacttakccagtagtattcttgtttattcctgagcagaatatatattttgtttttattgtgactgagatcttttttccacatcatcttctgaaactggttattgctgttttaatggaaaacagttgattgttatatttatcttatatgatttaatttctcatttttttatttgcttgaagttttggaaaataatagttgtctctaaatagtaatcatttgaaagagttttctaatatctgtgccacatttctattttcttgttttctttcattgggtagaacttccagagcaatataaactaatagcagtgagggtagtttccttatcttgttctgtcattaatgaaactgcctctaatatatcagtgttaagtttaatgtttattattcatttcagtagaccgtgtggtacacgtacccttttgttactagaatagtaactgtttttatcatgatcaaatgttgaatttccatcaaaaaccactttagcatctagtgagataaacaaggggtttttctttttaatctcttagtattagtcatagatttaataatggtaccatcctcacatttctagaatgaacttttttttggtcatgatgtactattccattaatttggtaatgtgytgtttggaattttgcatgtatatttatttatacagttggttggtattattatttgtgtgtatggtgatttttgtttgttttgacttktgggttctttttaggcagggtcttcctctgtcacccaggctggagtgtagtggcatgatcatagctcactgcagccttgaagtcctggactcaggtatcttcccacctcagtctcttggtgagttgggactataggtgcataccactgtccccatctacttaaaaawwwtttttttttttttttgtagagatagggtctcactttgctgcccaggctggtctcgaactcctgggctcaagcgacccttccacctcggactcccaaggtgttgggaccacagatgtgagctgtgatgcctggcccatgtgtagtttgtgacaggttttaccatcaatgttatgaaaataaatggagaaattttgcatcttttctagcatagaaatgatctattccttgaaggtatgatagaaatcatctttaagattatatggattcagtactgtttgaggggaatcattattggacaactgttttctgcctcagttattcaggtttttttttttttttaagatggagttttgctcctgttgcccaggccagagtgcaatggcacgatctcagctcattgtaacctccgcctcccaggttcaagcgattctcctgcctcagcctcccaagtagttgggattacaggcataccaccatgcccggctaattttgtatttttagtagagacaggctttcaccatgttggccagactggtctcgaattcctaacctcaggcgattcacccactttggcctcccaaagtgccgggattacaggcatgagccaccatgtccagcccctagggagaatttcttaagctgatactcttttctttttctttaaagagtctcactctgtcacccaggctggaatgcagtggccctattatagctcactgcagcattgcttctcagccttttggctaagatcaagtgtatagctcactgtagcactgaactcctgggttcaagcaaatcctcccacctcagccaccagagtagctgggactacaggcatgcaccactatgcccaggtaacttttaaatttttttgtggagacagagtctcactatgttgcccaagttagtcttgaactcttggcctcaagcaatcctcctgccttggcctcccaaagtgcttgggttataggtgtgagcccccatacctagcccttaaactgatactctgtaaggatcttctaattcactaattaggtttactgcattatacagtctgctagctaccatcttcattatcttcattgggtgttttacttgggcaattgcatttttcacctctaagaaagttattttcttattgttccttttttatgatagcttattcttgttttatcagcaaggccgtatcttttgttttctcctgtttctgacaacagccctgtctgagcacagagactagtcctctccttttgaattgctaagtawttttgtgtccaattattgttcatctgtttgcttatatttttggaaggatgtttgcatttgttctgtagctgagatgggttctttcagaaattgtgttggtttcttttacatttttggttccagaagagtctctctttgatagcccaaagcccactggtgcaatagaacccaccagtcaacctattgcatctgccagcacagcactccgctccacatacagtgtgtgaattgtgcaacaggcccagggctgctcccaaccatctctagtgacaccacagagactacaggagacacaaatttgtcctcctacttctacctccagctcttagtcaggggccacgtgtgaggctggtatgtgtgggcttgcggggtcagaaggagggaaatcccgaaaatacctctgagttaaatgyttttctggtccactctgctctatatgtgttgtttctgctgaagcctttcaaagggctaagacccttctttggaatctaatagtgctattttgccaaattggacttcttactgttgttgaatcttttttctccttctgtcctgttgtctctacctgaagtacaatcttcttaatctccatttccatctgtgagaattctactcatcagttacttcccagcttaatgccactttctttcagaaactccctgagattccttccaccatcagtaatcgtcccttcatcacatgttctgccttacattccagcttcgtacatcctcatcaccctcttcctttytgcactgtgagctctttgagttcaggaactgtcttgttcacctttagatggagggtgttggaatgatgaggttagaggaagccaggtttgagtcccttcaacatttactcgccatgaaaccttgcacaagtaagttacttaacctctgagtggattttcccctctggaaaatgggcattacaacagtacctacctcatgaagctgttttgaagattaattgaggtaacataccacagtaaaggttgaaataaatgttaattcctttttctatacccttacggtaccctgcccatgtagcgcctcatccacacaggccttcagtgattggtgattgaataaaaaatacagatccaaagtgcttttgtacaaaattcacttttgcattgttgagtcaatggcagatccagaaaagaatctgrggctgggcgtggtggctcacgcctgtaattccagcactttgggaggacaggagttcgagaccagcctggccaacatggtgaaaccctgtctctactaaaaatacaaaaattagcttgtcgtggtggcgggtgcctgtgatcccagccactcaggaggctgaggcaggagaatcacttgaactcggctggggtggggaggagggcggaggttgcagtgagccgggaggttgcagtgagctgagatcgtgccactgcactccagcctgggtggcagagtgagactctgtctcaaaaaaaaaaaaaaaaaagaatccggggctgctgaacatcccacacttgtgcccacttgcacatgccgagtaagtggaacgttttaattatgtttcataaagtctctagaattaagtagggttttgttttaacaaacaaattgtactccttatatgaaagataaaattctatttggtggttgattggttggattttcaaataagcagttgctttctggtttgccttgacattttataaacataactacagatggaagctcaaaagagaggcaacatagtgttatagtggaaagatttgattcagagttaaattttagatggttgttgactgttaactcctccccagacagacttcacaaatccctcaatcagtgatcgtgttaattctatatatggttcttcctctgcttttgttatattgaagtggcatgtcatctccctttagagagtcttatttaataggtaggaaaatctcatmcctgattatgaaattttgactaagctggggatctgattctacctttttggtggaaggaaacttttgtaatttcttctttcattgattattaaacctgtttggggaggtaggggtgtgtgtggaggggtgtaccccatggagtaaatatgctttctaggaaattttcttctttttttcatctccctctaggcctgcactgcccaaagtcttggaaacttgctggatatgatgtaccgggagccagcacgatggtcctacacattccagacattttcctttttgagccgcctgaaagtacagctggagcccttccctgagaaactcttacaggccaggaagccagtacagatctttgaraggtctgtgtacagtgacaggtaaaatgccaagccctccacsagtcacaagccccatgctcagtgctgcctgtttgatcttgcacagatcctgcactgctatggtcactgatgattataatttgaaaaattntcttcttttttaaagacaacactatacagatttgtccagagttgtacttctaccagattgtcatctatgtcaagaaaggaaattgggtttttcatcaactgaatgctttgaatttcttacattgctactgattaccttatgtttccttattttctggcatggagcaagctggtagccacctaatgtaaccatcacatgctaaaaggcacataatagacacttaagtagcagtgtatattctaagaaatcaratgattcagtggttgattatcccctttaagaaaaaagcagacgaaattaaaatttgtgttcctgaaaatgatataagagatattttcagccttttttttttattsttcaagaaaggatgcttaggcagaaatagcacatctgagaaactggcttctgtctcagatttagccctttttgaccccttcttctgtgagagggctttttgctggccagagtctagtggacatcagtgcctgtgtcagatcagggatgggcatcatcctgaccacctgagggagtgagatgtgaagtcactttgaatgcaagctagcagcaccctgggaagtgagcccatctgctccagaagagctaggccgtgcaggctccggaatgcctggctctgctgcagagaccaggctgtgacttgaggttaagccgcctagagacaaagtcaggatggcttgatctggacactgctggagtttttcttatctgaagcctatgaatgaccagtgtcagtgtgaaatrgtgctttcaagcaaaacgatctttcttaaggctctttgaattatcaaaatgggaagtggtacattttcattgtcactgctgaagacactcagttggttactcttttaattccaaattagacaaactagttctatttcttagtgcttccggaaagcctcctagaagaaaaaaaataaggatacatttgtaaatgacaagtgatttttctgactttaccctaaaatcatgkaagatatgtaaaacaaaccctataggctatccgttccttgtktacgtaccccgagagagcctactttttataaaagctaaatatgtgaattacaaatggctgggctataggttttacttctttttcagctgttggatatcccacctgcctgttttcctctcttctctcccaagccatgcctctcggactcmgaagttgaattacatataaccacatgggttgtttggaaacatagtcagtctttatttctagccgcttcatgaagtaggtgtgtgagaccctcagaggaaaatagagaagtagaaacactttgttaattagaaatgcattaagaagctgcatggatcttaacctttgcttgtaaaggaagaggtaataattgattacactgtgggcatacaacattccaggtgctatcttcagtgagggcattttcgagacagaaaggaaaactaatcacaagttctaatcccgagggtaatttagactttgttcacttgcacagatttattggatgcctcctgtgttgaagcaccaaggctggccctggggctgcagcagtgaataaggcagacccagtccccgcctaacagggactgaacacatgctcacgtgtgtgatatttgttccaaaggaggaacacaggttatctgggagagttgattatagcgaggaagaaatcttagtcttttctgtttgagttaaaggaaacattagcatatggttttagagcagaggccctgactcctagatccttatgccctgttctgtcctgcagcccctgcattcagtctgcagtacttccctcccactcagcaccacacccttctgcccctcaccccatcaccaccacaagctttgaagaaataaaggaagtgctctttctcaagaaagccaagaacccctttcatagggcttattagcaaatctttaatttctctttataagatccttttttgttttaagacagagtctcgctctgtcgcccaggctggagtgcagtggtgtaatcttggctcactgcaacctccgcctcctgggttcaagcaattcttgtgcctcagtctcctgagtagctgggattacagggacacgccatcatgcctggctaatttttgtgtttttagtagaaacggggtttcaccatgttggccaggctggtctcaaactcctggcctcaggtgatccgtccgcctcagcctccaaaagtgctgggattacaggtgtgagccacagtgcgtggccactttataggatcttaatttcatcttctagttatctgtaaagaactcaaaaacattttgagtttaaaatgttacccttttatttgttctcatcaactagactatggctaaaccattccagactgggaaagtttacttgtggagtttctaagttagcttcttcatagcctaacaaaaagcagttataataataactaagatatctagaagactatgtgccagtcactcttctaagcactttgtgaggattattacaagacatcatcataacaggctgagaggatttaggtgacttgcctgaagttacatagctagtgaatgtttcagccagtatcagaccctgaaatgttattctggaaggtattctctcagtggtgacactcacagccttgcagtctgtactttcctgagccatcatacacaagggttctgaattttattttctccaaagtggccagttgctgagcattgccttggaaactggagtcccttgcttaggatgcaaattgtgttttttattaaaatgcctgaggtttgaaagcaggattgacccctggtttgtctgaagccatggtttatgtttagctctgatttcctgtttaccagatgctcttttggttgtagaaataagcagggggcaaagctggtttgatttttagctttagctttcttttatctgaactagaaactcagcagcagaggaagcaagcaagcaggagctcataatgcattttgcaggagagtctgctttcttagtaatactgaaattagtaggaaatgcattttctgctccatagaggacaccacataaatactatttcttctgcatgtctcagctaaacaaaaggatggctcagtagcctggagacttagaagccctcagtccttgtatgaaatttagtgggtggatttatactggattcacttgtttatttgttttgggccttgctataataataataaggaaatctcaaaagttcaagtttacatatatttgctgtatgttctgactggtttctagcagagaaaattgttagggaccaatgatactatcttctgtctcttttcttccagtgaatcaatccatctggaaaggtgtgatttcagcctccaaagtctagatcctatttcccatcttagtactgagcagggagggagatatgggttaagaattcagatttcttaaggattgatgaggagctagaaaggttaagtggtttgaacagacatggaacaagttggttattgatttttctgcttctctctctctctcgtgcctttcattccatttcccattctcctgccctccccattcccatcccacttccaaccaggtatatctttgcaaagaatctttttgaaaatggttccctcagtgacatcgagtggcatatctatcaggactggcattcttttctcctgtgggagtttgccagccggatcacattacatggcttcatctacctccaggcttctccccaggtaacactgaacctacaaccttagactttagggccatatgaaacctaagaagtgacattctccaagcccctgattttctggttggagagattagagcgtagacattacctgcagcacagagagcagtgggggacaccctcctgtcccagcgttgagcaccctgttccccactggcttcgtgtagcagagtgctaaagccattgactatgcataaaaggatygctgttgatgtaggaacaacagagcaaatcgagtgtcatctttatgatgacgcttagggtttgcaggtgggacgctctgacctgtagccacttgcctcagctcctcctttactctgactgggtcatcagagtgtgtagtctcagtggtttccttagtaagatgtgaggaggaagaggagaattttctcacctcatcatratactgccctaatttatagcccttttttgaactgtgatgccattgggaaggcaggatggactatagcagttccattctgtgactctctggctggtgccatcctacatgaagtaggatgatgtcacggcaggagcaccagagtctctggagatagaagtgagctgtggcttctgctgactggtagtgaccttgggcagcccctggagacctttccactggagagatccttgcctgtaaaatccactggttcaatctagaygatctctaagggctcttctggagtgggattctgagtcaaggtgagttttttttttttagagatgtactgctctcagcttttgagatatacatccaatatatagtcaaatgccagatataccacatactgttagaaggaaggaaagctgtctccaagctagaggctatgctttttagagatggaactgagacttgtgggcagaaaggagccgagaacagactgagcagaaccagaggatgagtgggagagctcccatcacagagcctcacaccagccaacgaggagaggactggaaggaagggtcttgccttaagaaggtggcaaccaggaaaaaaggcccttgaatgtgactggggccagatattggggatctttgtgttgagagtttctggacattttgaggcaaaagctagatcgtacgagggaataagagattctacagaaataaataagggttaaagtttaaaatgaaactgggcyggtgcagtggctcatgcctacaatcccagcactttgggaggctggcgtgggaggatcacttgaggccaggagttcaagaccagcataggcgatatagtgcgactccatttctacaaaaaagtttaaaaattagctgagtgtggttatgtgtgcctgtggttttagctrttggggaggtgagacaggaggatcacctaagtccaggagctcgaggctacagtgagctgtgatcgtgccactatactccagcccaggtgacagcgtgagaacttgtttctaaaataaaataaaactgaactaaagattcagtgaggccagagggctaataatcttccatggaaagamccacactaaagttagatgcattgatygcaagttgacaaggtgggtcatgtttatgtgacttctttcaatagtcttcattgcctgagagccagaatagaagaaggggattatactttaggggtagagattagtgtcagcgattgtggggagaggagtcccctctcaaagaggacagtttgaagtgtcaaagtgtagggttcaagttgggagagaagtcctgagccccaggaaggcttgtggcctgggccaaagaggagtgagagtgctgtgaggttggattgagtaaagatcctggttggaatttgaagaagtgacaggtttcctatgggagtcttgggatggctggactgaaagaagcaggaggttctcaggacgagctgagcattaggagaagtgagaatgctgacttaaccttttccaagagaacagcacattcagctcagtgccatgaagccagcattggggaggagtgagagaggaagtgggctgactcattcctgggagtaaaatggggctacttgggccagctgaagaggctcttgtttctggggagtggaagttggacccagcaaggagaacaagaaagtcttaattgcttttcttctttgtgcactctgaatgaccttataacagaatgcctgaaactggttaatttataaagaggcttattttggctcacagttatggagactgggaagtccaaattgggcagccttaacttccattgaggacctcctgctgcctcatcatatgatgaggtggaagggagcaggcatgtgcaaaaggggcaagataggaggagcagccttgctttataacatcccactctcatggcaactggtccaatcccacgagagtgagaactcattccggcgagaattaacccagtcccaagagagtggcattaatctgtcttaacaacctaatcacctcttaaaggccccacctctcagcactaccacactaaggaccaaatttccaacacatgaattctggggggatacactcaaaccatagcaaatggtgatgatgatgatgatgatcatcatcatcatcgtcgtcgtcgtcgtcgtcgtcgtcacttgggggcagatctgcccttttggagaggctaattgaaatatttcagctggagtagaatgagaagagttgaaggattattacaacttaatggcagaaaagaaaaatagcttattcattttgagattagatggggattttaatgctgttttgatggcattagttccagagatgcaggaatgcccatgtttcttccctgaagtcacacttgacctcttctgtgaaattcagaggtaactgtgcccaagggaagagcagaatagaagttgtcctgtcactatgtaaaaagctgtgcaagtgcccaatcttccagttcagagccctcgtaaatactgagtttcgagcatgtcagatggacttcgtaggtccttctgctcctttctacctattcttccctaacttcttttttttttttttttttttttttgagacagagtcttgctctgttgcccaggctggagtggcacgatctctgctcactgcaagctccgcctcccgggttcacagcattctcctgcctcagcctcccgagtagctgggactacaggcacccgccaccacacccggctaatttttttttgtatttttagtagagacggggtttcaccatgttagccaggatggtctcgatctcctgacgtgatccgcccgcctcggcctcccaaagtgctgggattacaggcatgagccaccgcgtctggccccctaacttcttaaaagccagcaagccgggccagactggaccaggcgggtgcagtggctcaygcctgcaatgccagcactttgggagaccaaggtgggaggactgcttgagcccaggagtttaagacccacctgggcaacatagtgagagccccctgccctctacaaaaaatttaaaaattagccaagcatggtggtgtgtctgtattcccagctactcagcaggctgaggtgggatatcacttgagcctgggagattgaggctgcagtgagtcaggattacaccactgcatttcagcctaggccacaaagcaagaccctgtctcaaataaatgaataaataaatttttttttttagaaaaggcaactcaggccgggcacggtgactcacgcctgtaatcccagcactttgggaggctgagatgggaggattgcttgaggccaggagctcaagacgagcatggtcaacatagggagaccccatctctaaaaattttttttaaaacacaagcaagctaacaattttaaaactcaaaagagaaatagctaggcctcagtgttcctagccagccccatggaatcaagagagtgcagctgatcaatgtacatcaaaaagccaggccctacctgggactggcacagcatggggacagcatgcaggaggtgcatgggacaaatggcacctgggtttgggcttgagaggcatagtgaaaagacccactagcagtcactttccattttctgtttctgactccaagcaagcagagcagcagttcttcttcctgggtgggacaggttaagaagaccagtaaagggtctctccctcgccacttgtagctacactatctttcctgttcacattcaggtgtgtcttcctcatgaggactgagatgaagaggggtcagactaaagcactgtttgcacgggatttttttaaatagaatttgttatagcsatatcagtaaagcaagagttatgccaaatgctcatagtaggagtttacttcgacctctttttttttccccactcaatactgccaccagttaagacttagacttctcagggaaatccatttgctctgttaaggaaattaatagtaaatagaaatatgttagcttattttaatagatcaatgttagtgtcaaggtttgtctgcaagcagtgaatgaataattataaatagctttcctaaaaagaattgttctgcctttgtgtgtgtacttggaaacataaagtcacattttaaaaaaatttattttcacgaaacagacaacattttttttctcagaaaggaaaatgagatgatagctttgctatgcttagaaatcctaaagctacctttctggtgggaatataaattggttaacctctaaggaggcagtctggcagtatataattgcaagtgcatataccttttgatcattaataaaatttgtttctataatttcatttccttagagaaaaggtaagataagagggaaacagcaaagactcccaagtctttgggattattgtgtactacatttggaaattaagttttcatttcttaagtaagttattgaaagagggaagtcctggccgggcacggtggctcacgcctgtaatcccagcattttgagaagccgaagcgggcagatcacgatgccaagagatcgagaccatcctggccgacatggtgaaaccccatctctactaaaaatacaaaaaattagttgggcgtggtggctcccgcctgtagtcccagctacttgagaggctgaggcaagagaatcacttgaacctgggaggcagaggttgcagtgagctgagatcgcgccactgcactccagcctggcaacagagcaagactctgtctcaaaaaaaaagagtgaagtcctaaatcagtgggttaatccatctgttcttccaggacagatgatattgaataatgaaatgtttgtcaagcagagagaggactgaggataattcagtcaaaacaaacatttggagcaaaaattttgaggtgtgaaagagcctggcctgttccccaggaaagaggtcaaatctggctaaagcagtgagtccaggggaagagctaaggcagttgagaagtaggaggggtagytttgtgtgacaggtaaagaagatgtcattttctgagccagtgtgcatcaaacttcactaccagatgaatgcagaatagaattatgtacactctgcaaagcagcgggggaggagagttagtctcaagcctcacttgtttttccacttctttgttttatctttgacctgtgcaaattttacattctattcctgagtgaatgtttggtatgacatgaaagagatatttcaaattacctaacattttataaatgcaatgctattcatacatactgctttgaaccctggggctatggctgtaggcggtaaagagcctgtgaagtattttcagcaaggaaagtcatgtcattatattgccgtactacagacgggtggagtgaaggggaaaaactggaaggagggaacagcttttgccaggagctcaatacarcttacctcagtgacctgtggatgggtagacaatgaggaaatagaagcccacaaggactgcactgctagtaccttatgaaggcaggaatttactcctggactttctgaccttaaggcctgtactctgtccatatgcttccctgcctccaggaggcagaaccagaaggctcttgccataatccaggtaagaagtaaagaggacccgaccagggcagaggtgagaggagaggcaaggagagaacattctagagagatgaaagagaattgagtgacttcccagatatagtagggagaaggaaaaacaaggaaaattccaggtccgtggcttggatgactggatggatgatgktcatcattaaccgacttaggatacttcagaggaagagcaggtttaaggtggagatgggaaaagaatggtgtagatcctctgattgcataagaaaacaagacagcagaagcaaaggcatggcttgtaatgcccaagatagacattatgggtgggcctcagagcccccgaagactgcattrtagcagccaaaacagcaragagctcatcagggcttggggactgtcttttaggtttgtttgaagagactgtaccagagggccagggaggaggagaaaggaattgagctggcctatctagagcagctgcatggccaacacgaagcctggcttattcacaagacaacgaagtaagtggggagaaaagaatgtatcagagacagagacctggctcccaacagcyagttgttaaaaacaagttcagcatgcagccccctgtaggaaggttcagaatatactggaaatggttggaaatgtcaagcattttccaactcagaagtttaatattgctggacaccgtggctcacgcctgtaatcccagcactttgggaggctraggcagtcacctgaggtcaggattcaagaccagcctggccaacatggtgaaaccctgtctctactaaaaatagaaaaattagccaggtgtggtgtcaggcgccygtaataccagctactcgggaggctgaggcaggagaatcgcttgaacctgggaggcaaagattgcggtgagccgagatcgcaccactgtactccagcctgggcgacagagtgagatgcccagaagaagtttaatattgaatataatctttacattccaagggcctttttattagattgtatttctccagctttttctttgtttcttaacatttccctagactgaacattgtgattgatggtgatagttggctcagcatgaagggctgaaaatgttagagaaattgtcagtattactaagttggcattcctggtttctgcctgtcctccctttaggcttggtttgttgtccacttaaaatgtttggtgctctgactgtttgttagtatcactctcaagaatgaagagaaacctcaacctttctgtttccggccaactttattgaatttgtttttttaaatgcagtttacatgcagtttctttgaaaagtcatgttgaatttagatctgttctctgagtaagacttggcgagtatgtgaaacttgactcaagttacatttctttttttctgtcccccaaacgttcacgcttcttataggctccactttgaggctctgatgaacattccagtgctggtgttggatgtcaatgatgatttttctgaggaagtaaccaaacaagaagacctcatgagagaggtgggaaggactttaactcctgttttctggtggtttcctttgttgtacttttatctttctggcctttgcttcaaagttcaatatcatgggtcttgtgctttgcatctcacattgcatttcacactccaaggcctatggaatcttgtgcagattacaaatatccctattctctaaagtatgctggactaataattgttaaataattgacttgtaacatgtgcttgccagctgactttcttctctaaggcatcctaaaactagggaaatgagactactggattctattcccagctctgccacttgatgctatatgaccctgggctgcccacatttcttctccatgcctattattttcctttcctcacaaaaacctcatgggcttggctgcatatgcattgggggtggaccattgaaaattctgttaaaaatgtgaaattaaacttctgattttctccttcccacaggtaaacacctttgtaaagaatctgtaaccaataccatgawgttcaggctgtgatctgggctccctgactttctgaagctagaaaaatgttgtgtctcccaaccacctttccatccccagcccctctcatccctggagcactctgccgctcaagagctggtttgttaattattgttagactttgccattgttttcttttgtacctgaagcattttgaaaataaagtttacttaagttatgcttgtttttctaattcagttgctcatttatttcagcatgtatctcttggtgcttgctctaaattcacctctagactagtgtattagtccgttttcacactgctataaagatactacctgaggctgggtaatttctaaaggaaagaggtttaatcgattcacagtttcgcatggtgggggaggcctcaggaaacttacaatcatggcagaggggaaacaggcacatctcacatggtggcaggtgaatgagcgagtgcaagaaagagcagggaaacctgccttataaaaccattagatcttttgagagctcactgccatgagaacagcatgggggammctgtcccggtgatacagtcgcctcccaccaagtctctcccttgacacctggggattacaattcaagatgagatttggctggggacacaaagcctaaccatatcaactagcaattttcaaattgctcccagaactctaacccaagccctacctgccatgcatgaagaagggaaataaagtggctcaagagtgggtgggatcttaaatgtgagccccccagagcaggaaatggagcatgaactccaggaagcttctttatctcttcccatctgccactcttgacataggggacaggtgtggggaacttaaacccttgtcctagagctaaagaacctggccaaaagaaaaaggtagaaaacagcaagaacccaaaagttaagcatctgacatttaagattggcccgcccggcactctatctttgtctaaataccttacccaatgacttccagataacgttaatggagtggatctctctgtgcaggaaaaaaaaaaaaaaaattttttgttgtgctctttacccttcaaatagaatttattgttaagggaagaaaaatacatggctctataggattgaagtgctccattgccagaagcctgcaggtccatgattcacaggagcagatctgcactgaacccttgacggttctgcaggtacacaggaagatgaatgatctggggacgtaagagtgccccagaagacagaaatctgtgtttctgtcctttatgctttggggaaatgaatgtgagattggtttctaacaaatacataggccaggcaaggtggcttacacctgtaatgccagcactttgggagaccaaggcaggtggatcacctgaggtcagcagttcaagaccagtctgggcaacatggcaaaaccccatctctaccaaaaatacaaaatttatccgggcgtggtggtgtatgcctgtaatcccagctacttgagaggctgaggcaggaaaatcgcttgaacccaggaggcggaggttgcagtgagctgagatcacatcactgcactctagcctgggcgacaagaacgaaactctgtctcaaaaaaaaaaaaaaaaaaagtaatgttttaatataaaagtatggcaatttccttatcctacttatttaaaacattttaatagctttattgatacataattcacatattatacaattcactcatctaaactgtacgattcaggccacacacagtggctcacacctgtaatcccagagatttgagaggccaaagtaagagaattgcttgaggccaggagtttgagaccagcctaggtaacataatgagaggccagctctccaaaaaagtaaaaattaaaaaaataagccaggtgtggtggagtgagcctgtagtcctagctacttgggaggctgaggtgggaggatcgcttgaacccaggaggctgcagtgagctatgatcctgccactgcacttgtaggtgacagagcgagactctatctcttaaaaataaagtgtacaggccaggcgtggtggctcacgcctgtaatcccagcattttgggaggctgaggcaggtggatcaactgaggtcaggagtttgagaccagcctggccaacatggtgaaaccccgtctccaataaaaatacaaaaaattagccgggtgtggtggtgtgtgcctgtaatcccagctactcaggaggcagagcaggaggatcgcttgaacccaggaggcagaggttgcagtgagccaagatcgcaccactgcactccagcctgggcaacaagagcaaaactccatctcaataaataaataaataaaaacaaaaaataaagtatacaattcaatagtttgtagtatagtagtcatggggctgtataaccaataccacaattccagaacattttcatcaccccaaaaagaaagcccataccccatctcccccaagtttccctgctgccaactcccagccctaggcaacaaccagtctacttttgtctctgtagatttgcctattcctgcaatttcatatgaatagaatcatactatgttgtctcctgtaacttttttttttaactgagcataatgttttcaaagttcatccaagtggtaacatgtatcagtacttcgttcctttcttcccccacaacagtctcactgtgttgcccaggctggagtgcagtggtgcagtcacagctcactgcggccttgaactcctgggctcaagccatcctcctacttcagcctcctgagtagttgagactataggtgcacaccaccgcgcccactaattattttatttttagtagagactgtctcactatgttgcccaggctggtctccaacttctggtgtcaagtgattctcctgcctcagccttccaaagtgctaggattacagatgtaagccactacactcttcacctagttttaaagcctgaaagtctacaaattcagcatctctattggtaaatattgccttttagaaagtaaacgttggctgggcactgtggctcaagcctgtaatcccagcacctagggaggccgaggcgggcggataacttgaagtcaggagttcgagaccagcctggccaacaaggtgaaaccccatctctactaaaaatcagaaattagctgagcatggtagtgcaggcctatagtcccagctactcgggaggctgaggcagaagaattgcttgaactgggaggcagaggctgcagtgagccgagattgcaccactgccccctagcctgggtgacagagcgagattctgtctcaaaaaaaaaaaaaagtaaatatcctctaggatagtgcgggccatcaacagtgtaacctaggtgatatttgtcattttccaaatttgtagccgagatcatctgtagagagtaaacatattaatgagcagcagtaattttgaatcttaaattgtgggggagggacaagtaggtctgggtggagcctgtaagtgtgcagattaggaccacaggaaggcaggctgaaaccttgggcaccgtgggtttttaaagtggacgctagagagtggaggtcacactaaaacggtccctactctacactcaggccagtctggatggctgttattcttggtttaggccaactcccagcgtcaaaaaatttggattaacacataagaaatagctgcatttctttctggcttacgatgtggtaaaacctgctgttctggaacctgaatattaccttgatgggtttataacaaggatcaaggttgtgaaagttctcaaactctcagaaggtgataatttcaagtaaaagagattgtttgttatatgcaaataccagaatcacagaggaagtgatgcaacgaaataacatgcactttaaaattttaatactatttaaccttcttcagccctcacttaaatagcagtttacattttctgaaccactttctccttcatgggtctctcctggctcccctacatttgatgcctccccttctgcttcctgggctgccatctttttctcttttcctcgaaagtgttggtgtccccaaggtacccttggctcatttctgtcttcgtccactccctctgcatgatcttggatttgttttctatcactgccattatcaaattaccacaaatgtaacagcttaaagcagcatacatttattatcttacagctctggaggtcagaactctgacatgggtctcactgggacaaaatcaagttatcaacagggctgcttttctttctggagtttctagaggagactccgtttctttaccttttctgtcttctagaagctgcccacattccttggcttgtggccccttcatcttcaaagccagtagtgttgcatctctaaccacagccaggaatccttctctgctttcaaggacccatgtgattacactggccccctctgggaaatctaagctgcggggtgggagggaggctgctattctgctttccgcagatctcaaacactatcatggctcctactattctcatggggtgaagacttcttatgaacttggaaattttatggaaaatgtgaatcatatgcaagagggaatggtatcaagcacccctgtacccccatacccacattctagcccaatcagcctaagatcaccagaaacgaaccttgagtttgagaaggtcagattgcaatgaggaagaccacataccagaggaactgtggggcatctcaccaaacaggaaaatataccgttacaggattttaaggaaaactagagttttggtaaaattgaatgaagcattgtttggataggtgcaaagcaaagcaggactgtgtataaaggagtctgttctgaactgttcggtgaactcaggtttgtttccctagaaagtacaaagttaagacaaacatggaatttgtgttcagaagctccttacgtgaaactctgaacctggcttggaaaccaagacaacttctctgtgtcaaagtgacttagaatcttctggccaaaaaaaaaaaaaaaaggaatttttactgataacatttaacatttcacacagcaaagtttttactgataacatttaacatttcacacagcaaagtttctgatagttcatgattttaaagaacaaggtttctctatgagtcagaaagcagtagtcacacaaggaaaggggtcattatgacactttacggctacaacgtgctcgtgggagaaatactgtttcatggtaacttttgtgactggctttagctgtgtaatgtcctcccagcctgttgagtcgcagggcagctttttaccttcttagcatgagccaacttcgactttctcgccaacttcgactttctcgccaacttcgactttctcacccacttcggttatctactcagaaccaatctggtttcacctacagcctacccccactctcattattctgaagcaaatcccaaacaggaggatgtcttttaaagctagagctatatcaaactatggatttcacaacccggatcccttatgctcaatgggtacaaaacagttctccccacccgcatacccaccaccaaccctaccccaccccagccagcaaagccatttcccctgcttctccattcaccccgttggccacattaaaaaccttggtgttatctttgaccccccacttacactcattctcaacaaattctgcctattcatctctgaaatctttcaaatcttctctgcacctgtttctgtctctctagttgaaggtgtagtggaaattgtggttgactccccagcattcatyccacctctcctcctcttccatagcagtcatatggtccccattgtagcagtggccatgcctaggaatggcaggaatggcccctcccctgccccccaattactactaccagtaatcatttcttccccaagccacatcaactaaatgatgtataaaaaagaacagtggttgctaggtcaggtcacctgccccacccctgccaccagagagctgcccctcagcctctcctatgtggaggtatgagagctaccatgtttttataaccctatctcccatcactcctaccataaaccccacgagaccacccatagcttcagatgtgttttcccacatgacaaaatgtttctctctctctctttctctcccaccccccacccaccaccccaagcttttacactggaagaactactcaccctgccaggcccaagcccaccattcctctctctgtggagcccttcc

SEQ ID NO: 96008 - DNA, 265132 bp, Homo sapiens
  misc_feature (1)...(265132): n = A,T,C or G
tcttttgagtccttgatcagcgtttcactgaatacacaatttagtctggctcagtgaatctgcatttttacataaacaataggggaggccggacacagtggctcacgcctgaaatcccagcactttggaggccaaggcgagcagatctcctgaggtcaggagttcgagaccagcctggccaacaggatgataccccatctctagtaaaatataaaaatcagctgggcatagtggcgggcacctgtaatcccagctactcgggaggctgaggcaggagaatcacttgaacccagggggcggaggttgcagtgagctgagatcacgccattgcactccagtctgggcaacaagagcgaaactctctctcaaaaaaaaacaaaaacaaacaaaacaaaacaaaacaatagggcagaggaagcaatcagatatgcatttgtctcaggtaagcagagggatgactttctgtcctgcatctgtgaagatcatctatcaatttacattgccaggatgaaattcaacagaactgttttcaggtaaagatcttgagacccacaaggaatttccttgtgggcaaattgtgaggaagatatgcagctttcttttttttttttttttttaatctttgtagctatcttattggggaataaattggaaggcaggtttgcctgacatagttcccagcttgactttcccctcagtttagtgattttagagtctgaaattaattttcctttcacagggtgtcactatgttgcccaggctggtctcaaactcctgggctgaagtgatcctcccaccttggcctcccgaagtgctgggattacaggtgtgagccaccatgcccagcccatttcattattattattattattattattattattattttatttatttttatttttgggacagaatctcgttctgttgtcagactggagtgcagtggcatgatctcggctcactacagcctctgcctcctgggtttaagcgattcttctgcctcagcctcctgagtagctgggactacaggcatgtgccaccatgcccagataatttttgtatttttagtagacatagggtttcaccatgttggccaggattgtctcgatctcttgacctcatgatccgcccgcctctgcctcctaaagtgctgggattacaggcgtgagcccctgtgcccggccgagacagaatctctgtcacccacactggagtgcagtaatccaatcatagctcactgctgcctcaacctccggggtcaagtgatccttccatctcagcctcccgaatagctgggaccacaggtgtgcaccacaacgcctggctaagttttttatttttttgtagagatggggtctcacgatgttgcccaggctggtcttgaactcctgggctcaagcaattctcccacctcagcctctcaaagcactgggattacaggcatgagccaccctgttagactatttagcctgttagactatttagcctagtctaaataaatgatattttaagagagtgggagcgtagaagcaggtccttttgtgaagcatattaaaaatatataataatgttcacacatgggtttcgtaactccccagtgggctcatcttgcctgctgcctagatacagcccatttatcaagacacaggaattataatacagagagcgtttaatacacagagagctggctaaaccgaagactggaattttttttttttttttgagacagagtcttgctctgtcacccaggctgaagcgcagtggctcactgtgacctcccgcctcccgggttcaagcaattctcctgtctcagcctcctgagtagttgggattacaggtgcatgccaccatgcctggctaatttttttttttttttttttttttttgtatttttagtagagacggggtttcaccatgttggccgggctggtatcaaactcctgaccttgtgatccacccacctcggcctcccaaagtgctgggattacaggcatgagccaccgcgccaggccagagttttattattactcaaatcagcctcccagaaagtttgggtgtttcaaggatagttttgtccatgcccaggaatgaccaagggaagtttggaagttaaaggcaagatgaagttggttagatcagatcattaatgaaagtggtctaactaaatgttagatcgctgttaacaatgtttgcaaaggcggtttcaattcattcctgaaagttcacattttgggaaaagaaaatttcccaaattttgcagagggatggagggttagtttccttaaaagatgggaaatgtgtatttcctttccctcttcaatcactgttgctaggttcaagtaactctaaggtgcctcctccccacagcgtactggggacaggatctgcaaattatcacacccagtcttatcaccagttatataacctgtaggccattctctgacctctaaaccttccatatccattgttttgtgggctctcagcaacacattctttttcttagtctcttattcattgtatgcctgcctcactccatgccccataagggcataaatattactgatctttttagcctggccaacatggggaaaccccatctttactaaaaatacaaaaattagccaggcatagtggcacatgcctgtaatcccagctacttggtaggctgaggcacgagaatcacttgaacccaggatgcggaggttgcagtgagccaagatcatgccattgcattccagcctgggtgacacagtgagactctatctcaaaaaaaaaaaaaaaaagaaaaagaaaagaagagaaaaaaaaattactggtcttttaaaaaatttttgacattatttcagacatacagaaaggttacaggaaaagttcaaagaatacttgtatactcttccccacttgttaatattttacatttgccacttgttttatgggttttttttttatgtatatacattgttatggactgaattgtatcctctccaaaattcagtgttgacactctgaccttggaatgtgactctatttggaaataaggcctttaaaacaatgattaaaatggttaaaatggggctgttagggtaggctctaaattaatctgattggtttctttataagaggagattaagacattcggagaggccgggcatggtggctcatgcttataatcccagcactttgggaggccaagacaggtgaattccttgagcccaagagttcaaggcttacttgggcaacatggcgaagcccggtctgtactaaaaatacaaaaaattaggctgatgtggtggcgcatgactacagtaccagctgctggggaggctgaggtggaaggatcacctgaatccaggaggttgaggctgtagtgagctgaaggcgcaccattgcactccagcctgggcgacgagagtgagaccatgtctcaaaacaacaacaaaaaaagtaaaataataaaagatattcagagagagacgtcagggttgcatgtgcacacacagaaaaggccataacacagcaggcatgcagccctctgtaagccaaggactgcaagcctcaggagaaaccaatcctgccaacaccttgaccttcgcttctagcccccagaactgttagaaaatacatttctttcttttttttttttttttagatcgagtctcactgttgcccaggctaaagtgcagtggtgcgatctcggctcactgcaacgtcggcctcctggattctagcaattctcctgcctcagtctctcaagtagctgggattacaggcatgtgaaaccatgcctggctaatttttatatttttagtagagacagggtttcaccatgttggccagggtggtctcaaaatcctgatctgaggtgatccgcctgcctcagcctcccaaagtgctgggattacaggcgtgagccactgcactcagcccatttctgttgtttaaatgactcagtctgtgttattttgttatggcagccctagccaacttatacatacaaagcattatttttttctgaactattcaaaagtaagttacagacatggtcctttagtactagaagcaagtgcaatatattctcttacattactgcatgcgattagctaacactgataaaatgctattagctagttgcagactttattcatattttgccaattgtcctataatgtcatctatagcaaaagagagaaaaaaagaagcaagaaagagaaaaaaagaaagacaaaaagttttgggtccagaatccaatccagaatcaaacagcatttagctgtcatgcctaggctcctttaatggagaacagtttctcattctttgtctttcatggccttggagctgtcaagagtacaagcaatttatcttgtagaatatctctcactttgggcttgtctgatatttccttgtgaatagattaagatctactagtgtgttccaaagctttacaactgttttttttcctggacagttttaacattctaggtctgtgatctttcttctcaatgtgaaatgaggaatctgtaaccgtttttaggagactcattggtttaggaaaatcaccttattaaatttacagacttgttaagagctacgaagtgatgtgtctcctcaatggatcctatcagaaggcatatatgtgtgttcccttactgggtggtgctaactttgatcacgtggttgaagcagtaactgtcatgtttcttcactgtaaatttaccattttcctttccttcctggaggctagaagtaaaggtcaaggtgttgacaggattggtttcccctgttctttgtttgtttgttttgttttttgagacagagtctttttgttgcccaggctgaagtgcagtggcacagtctcggctccctgcaacctctgcctcccagattcaagcgattctcatgcctcagtctccccagtagctgggattacagcgtccgccacgatgctcagataattttttgtgtttttagtagagacgggggtttcaacacattggccaggctggtctcgaactcctggcctcaggtgatccgtccgccttggcctcccaaagagctggggattacagaagtgagccaccgcgccctgccctccttaagtttccttgcgggagagatactttgagactatgcaaaaagtttgcgggaaaaaatacaggaagcccagttgaatctgaattccagataagccataaataaagtataaatatgacctcccaaagtgtttatctaaaattctgatttgattgggcatcttgtgtttttatttgctagatctggcaaccctatatgtaaatatcttgctcctcatccaactttcacccagttgttttgacatctattgctgcttctgaatcagggttgcacatgcaaccctgacgtctgtctctgaatatcttttatgattttactttttttgttgttgttttgagatatggtctcactctcgtcgcccaggctggagtgcagtggcgcgccttcagctcactgcagcctcaacctcctgaactcaggtgatccttccacctcagcctccccagtagctggtactgtagtcacgcgccaccatgtactgattttggaaaatggtgattttctaactccatcattccttttacttctgttcgttggcattctatcagcttgtcttttcatccaccctttacagtgcttggcacacagtaggcgctcatataattgttcaacgaatgaatgaatgaacttttctyttststtgtccggccttcggtgacactagcggcgtcaggcaggagtttgacttcctcagcctatcatggcacgttgccgaggcttcagcgccttacaggacctcgctccaggctcttctggctccaatcaaaagcagggctctttcggacttcgcttacgtttaataaagaaaaccggttggccccttcggctccacctggctcaacagacagccagtggcatgcggcagggaccaatgggtggcggagggaggcggggcctgccacgaggccgcagtataaccgcgtgscccgcgcgcgcgcttccctcccggcgcagtcaccggcgcggtctatggctgcgacttctctaatgtctgctttggctgcccggctgctgcagcccgcgcacagctgctcccttcgccttcgccctttccacctcgcggcagttcggtaagagggtcacagagctcggtcagcgcggaaagctgaggggaacggagggcgaggggcacrccgggcccccgaggkacaccgagggaagtccttcccgaacatctccgccccggcggtggtggccgctgaggggtgtggcggggcgacgtggcaccgagcgccgccrcagctctcgactggggcgcttcctcggcgcggagggctggtacccgaagcccgcctttcggagggagccgctctcctgcgactcggggcgtcgccggggcccgtggccagtcggcgggcgggacgggggtggcgtgcggaacgcgaaggcatcagtttacgcggagccttccgacagcgccggccgcctctggctgggatgctgagagtcgtctgggggagaacaggcgagggttccaaaagagcagccctcggcgagttgtccttgcggggaccctagcggcggagggcgctgctgcagctgatgaaatcgcggagccgacttgctcggggtccccgcgccgccctcctccctccgccggtgggagtggcccgcgctgcctccgctctgccaggaacatgaacggactctgggcaccctagctttggctgcagcccaccagagcctgtcagtgccgggctgcgtacatagaggtggcaaacatccgggaggctcccagggccttagggaaagggggaatggagagtgacaagtacccatatttcagcggtacttgcagaatttcagttttacaagatgaagagttctgaagatggatggtggtgatggttgcacaacatatgaacgtatttaataccactgaactgcacttaaaaatggttaagatgggccgggcgtggtgacacgcgccgaggctgaggcacgagaatcgcttgagcccaggagttcgaggctgcagtgagccgtgattgcaccactgccctccagtctgggcgacagagcgagaccctgtctcaaaaaaaaaaaaaaaaaaaaaagttgataaggtttatgttatgtgaattttaccacaataacaaaattgggaaaaatatacaggggaggaggaaaggaaaagctctgtttgcatttttgggtttccttgggaaggtgatttggtcggtcattagagcgctggcattgttggcattgttagagccctgcaccttacaacatcagccccttctttttttcatctaacgttcactgtgtaccagacactatgccaagctgtgcgaattcaaagatgagaaaaactgttcttaatggagctcatgttcctgacaaggggcagaacacgcgtgtaatttccagtcagtgcggaaatgctgttagaaatatttcaaaggcgctgcttgttggagcaatgagttcttgaaggaaaacgtgggaggggactttcagggttttccctggtctgactcttgacctcccccatgtttcgttactgtgtgttttctccccttctccctcttcctgagtgctggcctcatgtgactgtggaccagacctttcctaggcttccatggtccaaaagagatttataaagatgctctcattcattacctaaagaactgggccagtttgtctacactctccaataacaaatgctcttttcactacctttctgaaagaacaagtaagcttcatccacatctctgaaagcaatccatattatctgtactgcacatttgctatttacaattcccacatattgctttcttactgctgcttattttttaaaatactgtttatttttaaatactgcttatttttaaaaagttgtatccttttaaaaatatgagtctgcattctttttttttttttctttgttggatggtatgagagtttcaggaacataaacctatggttggagaaatagtagcctaggagacagtgggattaggaagtcaatggactttagaggcagaagtttgcctttgaatcttgtttctactatcctcagtttcatcttctgtattacagtgttattataatagtcccaaggtaacagagtaatatatgttaaagtgtaagcaaaacacctagtgtttaatagatgtttgttcctttctccattatgtcttccttcactcattatttttcccattaataattgataacaactcttccctaaatcacttgattatgaattgtaaaatgtcctgatactaatttctcatggaaaattacagtactgtaagctattgaattaaaaggaaagtgaagatgctactcacttggattttagttttgaattttattttattttttgagacggagtcttactttgttgcccaggctggagtgcaatggtgcaatcttggctcactgcaacctctgcctcctgggttcaagctgttctcctacctcagcctcccaaacagctgggactataggcgcacaccaccatgccctgctaatttttgtatttttagtagagacagggtttcaccatgttggccaggctggtctcgacctcctgacctcaaatgatccacccaccttgacctcccaaaatgcagggattacaggcatgagccacagttttggattttatttgaacagtcctcttgacttcttcctattctgttgattacctatcttaatgggatttttttctttcctttttttttttcttttttggcaggggaatctctccctaggtcaggttggagtgcagtgctgcaatcacggcttactgcagccttgacctcctgggctcaagtgatcctcccacctcagcttgtgagtaactgggaccacaggagcataccaccatgcctggctaattttttttttttttaacttttagtagagatggggtctcaccatgttgcccacgctagtcttgaacttggcctcccaaaatgctgggattacaaggcctgtgccaccatgcccagccctgggaattttttctaaacacatctgtgaatgcatttaattctgggataaatgttagctaatatagttacaattttggattccccgtgggacttagctgactctccatttccctgtttattttggggtagcagttaatctgccccttggcaaaagagatgatgctaaattagttaatgactcactcccaaggctgtatttcacattttgcagagttgtgggaagcagaggagggctgacagttatactatgaaagatattcattgcatgtgactttgtttttggttcttgttactctttgactgtttttctttcttttctttttttttttttaagcaaattggcataacatccagaacctgcttttggaagcaaagtttgggacttggaacactggcttttcccagaaccctgtgtccttaacttyagtatatgattttatctgaatgtgctaataccattttctctaagtttactgctttcaaaagaaactttttatgaggtgcaagctaagtcattctcactgactagatatacatatagtgtatatacttatatatatctccttatgtgtaagtgtatctattttaaggatacatgtgtatgtgtgtgtatatatacatatatatataaaaccaagagaaaagagtaagaaattagttttattgaacatatatgcctggcacattatatatgtttgttatttcattcaacataaatgactgttctaagccgttttaaagtagtctttcactctgtagtgttccaggattaggaatgtatttttggcctgcggtgggcattccaggtactaatacaaatcaggaatgaggaatgttgccaggtgtatttgtatcagcaaaacccccctattttaattttttttttttgagatggagtctgactctgttgcccaggctggagtgcagtggcacgatctccgctcacggcagtctctgctcactgcaacctctgcctcccgggttcaatcgattctcctgcctcagcctcccaagtagctgggtctacaggtgcgtgccaccatgcccggctaattttttgtatttttagtagagacggggtttcaccatatgagccaggatggtctcaatctcctgacctcatgatctgcctaccttggcttcccgaagtgttgggattacagatgtgagccaccatgcccggcctgcaaaacccttttaatgaagtcctcttcgactctaattctgaaatggaattgtgaatattaatatgttttcaatttcttcatataccatgggtataattaaatgctattatatgttgtgccatgctagtattatataaaatcagggtaaaagtatttgatttgctgtaagattgtaacttttttctttttttgagatggagtcttgccctgttacacagtctggagtgcagtggcgtgatcttggctcactgcaacctatgcctcctgggttcgagatattctcctacctcagctcccgagtagctgagattacaattacagggtcctgccaccatgcctggcaaatttttgtatttttagtagaggcggggttttgccatgttggccaggctggtctcaaacccctgacctcaagtgatctgcccaccttggcctcccaaaatgctaggattacaggcatgagccaccgtgcctggccagattataataatttaatacttcacaagatgcaatacagattaagataaagtttatatataagattattgcattatatctaagatgttgagatttggtttaaagttggtatttaatcataatgcaataaaaaacacttattgaaggcctaaagattgtgaaagctttaaaatcccatttaaattagcagttactggccgggtgcagtggtgggtgcctgtattctcagctatggaggcaaaagctggagaattgcatgaacttgggaggctgcagtgagctgagattgctccagcctgggcaacagagcaagactctgtctcaaaaaaaataaataaataaattagcagttatcttgagaattaattttatctgaccctacaggatattcagtaccttgatgttaggttttagaatataagaggagattacttcattggtcttgaggttagagcagtcttcatgacaccaaggacagagatctaaagggaaaggctttttttaatgggatcattttacttaaggaagagatgctcatctaktttaktttagtttagtttagtttagtttagtttagtttagtttagtttagttttttgagatgcagtctttctctgtcgcccaggctagagtgcagtggggtgatatcagctcactgtaacctctgcctcctgggttcaagcaattctcctgcctcagcctcctgagtagctgggattataggcgcgcaccaccatgcctggctaatttttgtatttttagcagagacggggttttgccatgttgaccaggctggtctggaactcctgacctcaagcaatccaccctcctcggcctcctaaagtgctgggattacaggcttgagctaccacgctgggccagatgctcatctttaagtaatgggcactttactgtaaggacatgtgtgaaaataggaaaactgggactcttccacatttgggtttcatggaacccaggaagagttgcataagcagttctctttgggaagagacagcctttcgggcagctgaacatggttttgggaactggaggttcttctagatcctgatttttcttcttgctccccacctcagcaacagttttctgatttcttgccctgttgtctcccattggtgtgactattattctgcctattctttctgtctttgttctgtggttctagtttgaactgcctcagggacgagctcttactggttcaactaactctcactgctctgttgagctaagcttttgcgccaactggaccactggccagcctagagattgttgcccttggcgtcacatactcactcctggtctgtcagctttggatgatatggtggggtccctgggaagagcacattgccaactgtgagaaggagcttcctccagtcccctgccctgcccctattcttaccaggaaagtcttccccagaagggactgtggggagtggtggtcattttgatgtttgacctgtccagtatgttgtttgtttgtttgtttatttttgagacggagtctagctctgtcaccgaggctggagtgcagtggcacaatctcagctcaccgcaacctctgcctcctggtttcaagtgattctcctgcctcagccacctgagtagctgggattacaggagcccaccactacgcccagctaatttttgtatttttagtagagacagggtttcatgtgttggccaggctggtctcgaactccttaccttgtgatctgccctcctcggcctcccaaagtgctgggattacaaacgtgagccatcgtgcccggcctatattgtttgtttattcaactacagaatataatttatcgatttaaaccaccataaaaatgaagtcagttgactgggaaatgatttgaaatacatgcctggctgctaacaacagggacaaaacacgaactacaaatggcatataagcagataagaaaaactatttaacctcatggtgaggggtcaaacaattgcaaattraaactgtaaaacacttagtaatgatcagggcgcagggtggtgtagcagttaagagcccagactgatgtgagactcagcttgaccaagcgctgtcagtcacttaaactccctgagcttcaaattaatgataataatgatttctatcaactttatccccctccatatgtagctggatatattcattcatttatttatttatttagcagagacagggttttgccatgttgcccaggccagtctcaaactcctgggctcaagccatcctcctgccccggcctcccgaagtgctgggattacaggcataagccactacacctggcagagttttagtttttataaaaattcaagttatttggttttgtgactctgttgccttctgcagaaatgaagctgttgtcatttctggaaggaaactggcccagcagatcaagcaggaagtgcggcaggaggtagaagagtgggtggcctcaggcaacaaacggccacacctgagtgtgatcctggttggcgagaatcctgcaagtcactcctatgtcctcaacaaaaccagggcagctgcagttgtgggtatgtgtccttctgagacctcgactgcggttcagttgaggtttatatgaggcaaagtccattctaatttatgatttcttttttctgattaggaaacccaagcagaggaggctaatgtgattgaactgtatcccaaaactttgtcataggaaatcagactatatctttcggggtttatacagtaggacaggagatactggttggtattctctgtggcttctggaaagaatataagctacattctgttcttagtctttatatttgataggtgaccctgaatgcattttacatttgctttccttgagcaataatgggtctccagtggaggtgtttgagtgtttgcagcttaaagccttagaggcttagggggcatgattgagcaatacagtattaggtgacctcagtgatgaggtcaggaacacagtcgtagatttgaaggaaatgactctgacttctgggaaatagctttcaagttcttcaccgattggttctaaagccaaacatgcagtttagaagcagttcaggtctggatgatggggtttgtgttctaggtctcacggtaccacagattactgtgtctctgtggacaagaggtgggtgggcaggctcagatatgcctctgcctgcccatctgtgggcctgtggtctgagcagcaggtggcctttccttcgaagggctgtgaaaccactcgcgtggctgggtggggttactggcctgtaagcctgtggttttctctgttctttattattgaggagtgaggcctcctgctcttttaattgaaagcctttagaaacctctagataatggcaagccatggcattttgttttgttttttgagayggcatttcgctcttgttgcccaggctggagtgcaacggcgtgatctcggctctccgcaacctccgcctcccgggttcaagtaattctcctgcctyagcctaccgagtagctgggattataggcatgggccaccatgcctggcgaattttgtatttttagtagagatggggtttctccatgttggtcaggctggtgtcgaactcccgaccttaggtgatccacctgcctcaggtgatctgcgcctgcctcagcctcccaaagtgctgggattacaggcgtgagccactgtgcctggccaagycatggcattttaagacattgggaggtagtgtggtgcagaaaaaaagaacatggattttggaaccagaaagactggctgtattattagctcgcttatttatttatttatttatttagagacggagtctcgctctgttgcgcaggctggaatgcagtggtgcgatctcagctcactgcaacccccgcctcccaggttcaagcgattctcctgcctcagcctcccaagtagctgggactacaggcgcgttccaccaagcctggctaattttttgtatttttagtagagacgggttttcaccgtgttagccaggatggtctccatctcctgacctcgtgatccgctggccttggcctcccaaagtgctgggattacaggcgtgagctactgtgcctggcctagctcgcttatttttaaacctctctgagcctcagtctgtctgtaaaataaggttaatgaagattgcatagaatgaggtatacaggatgtgttaagctagtattctctggtgtatatatttgtgaagttacttttttaggttccttgagctacttcagcttttagggatgagtgtgatgatacaaaacccgtatggtagccaagtatggtaggcaacatagcagtgctcattaaatgcctcaaaaatttttttaacctcaaaatttcttataataggaatcaacagtgagacaattatgaaaccagcttcaatttcagaggaagaattgttgaatttaatcaataaactgaataatgatgataatgtagatggcctccttgttcagttgcctcttccaggtgagttttggactccatttaacatgattgctgctgcttctgctcctttccctctccctccctctctctctccctccccatccccctcctcctccctctcctttccttgtctcactctgtcacccaggctagagtgcaatggtacaatcatagctcattgcatgctcaagctcctgggttcaagggatcctcctgccttagcctcccaaatagctaggactataggcatgtccaccatgcccagctaatttttacatttttcctagaaatgaaagtctgtctgtgttgcctgggctggtcttggactctgtgcttcccaaagtgctgggattacaggcatgaactaccatgccctacctaaaatggtttctgaggggtraaaaggccttgttactttatacacctggttcttcatgtggatttggcttaaaggcaaaataaactcaaaagagtgaatattttattagaaatgggacagaccaactcagaataccaattacgccttgatttagtattgtggtcttgatacaaaggacagtggagggaagcagctgtgatagacgatattggctttgctattggtgtttggctttgcttatgcgagttccttccatgcagatgaagtacatctcagaggcaagctgtagaagaatagatttccttgcgaagcagrtaagctggagtcaggcagtgctgactatgcggtggtgatttaaggcaactgtgccaatttctttttcagagcatattgatgagagaaggatctgcaatgctgtttctccagacaaggatgttgatggctttcatgtaattaatgtaggacgaatgtgtttggatcagtattccatgttaccggctactccatggggtgtgtgggaaataatcaagcgaactggtaggtatatcccagaattgcatgtctgtgttaatattataaaagtagtactggcaaatggtaaaaactcatacagtcccaaagagtggaaaccctactgcatatcctctagtcttactccccaaagtttacctctcttaacagttttttttttgttttttgttttttttgagacagggtcttgctctgtcacccaggctggagtgcagtggcgcgatcttggctcactgcagcctctgcctcctgagttcaagcgattctcatgcctcagcctcctgagtagctgggattacaggcacgtgccaccatgcccagctaatttttttatttctagtagagacaggtttcaccatattgaccaagctggtctcgaactaggcctcaggtgatccgccccctcagcctcccagagtgctgggattataggcatgagccatcgtgcctgcccttaacagttgcctatgacagtttttgctttttaatccagaagtctcagtgaaggaaattttctatttttctttttctttttttttgtttttgagacggagtcttgctctgttgcccaggctggagtgcagtggcgtgatctcgactcactgcaagctccacctcctgagttcatgccattctcctgcctcagcctcctgagtagctgggactacaggtgcccaccaccatgcctggctaactttttttttttctcgtatttttagtacagacggggtttcaccgtgttagccaggatggtcttgatctcctgaccttgtgatccacctgccttggcctcccaaagtgctgggattacaggtgtgagccatcgcgcgtggcctctatttttctttttaattttttctttaagagtcagaggtttcrtcatgctgcccaggctggtctcaaactcctggcctcaagcaattctcctaccttagcctccctggcctcaagcaatcctccctcctgctgggattacaggtgtgagccaccgccccagccctcagtgaaggaaatttaagatttgatagtggtgacagtgcacattcctgtaacattttgtagcctgtagtatgctttctcctgttttcttttagcccttattatgtgtagcaagttacagctccagttgactgatgaggcaaaattgggttcatgttctaggccatctgactttgttttcctttggactggcactacttttaatgtcaatacatatatttttataggcattccaaccctagggaagaatgtggttgtggctggaaggtcaaaaaacgttggaatgcccattgcaatgttactgcacacagatggggcgcatgaacgtcccggaggtaaggaaattgctttcagggaacactgtccttttttccccatgtaagaactttcagaagccatcctgtgcatgtttggaagtattaactctgttatactttgtatttgttgaaattttgttaacagacaattcagggagtaacctttgtagagaagctgcacccagtgtcacctgagtttctttattattcatttatcatgtaactagcttcagaaataaatttaagttttgagtataagcatggttgtaggcaattagaaaatttcagctatagctttgatagctggagctaaggagcaattcttattcaaagatactgtgtcatttagtggaaaaaaatctttagccgttgcaaaggattggattggtatgactgtaatgtgtcctgtcaggttctgttaattggttctaaggtaaagcctcgtcaatcagttatcacataattattgtaataatgaccttacatgattatatcagaaataaaggcaaaactatatactttcaactatctttcaacatacttaaaacaaccttgagtaattttagtgatattttgcttagaaaaggtaaaattcttgaaaggctttaaaaataggatgaataaatttaattatatgactcaaaacagtcgagctgggaccaatgggttaaagctatatgatattaggtattaattttaaaaaagtaaatgacaattagctgttcagaaaacatggcacaagccattaagtcagtttttttttttttttttcctggagatggagtcttgccctgttgcccaggctagtgcagtggcacaatcttggctcactgcaacctccaccttccaggttcaagtgattctcatgcctcagcctcccaagtagctgggattacaggcatgcgccaccacgcccagctaatttttgtatttttagtagagacggggtttcaccatgttggccaggttggcctcgaactcctgacctggtgatctgcccacctcggcctcccaaagtgctgggattacaggcgtgagccactgcacctggccgtaagtcaattatttttcagagatgttgagtttctacaatgacttgactagttgagacctaatccaatcccagctttgtgtcagaaatcaagacatctatttttttctttctaggtgatgccactgttacaatatctcatcgatatactcccaaagagcagttgaagaaacatacaattcttgcagatattgtaatatctgctgcaggtaagaacacaagggggatggagggaaggacttcacctcagaagaggaggttgtacccctcatcttagaattcgcctgcctagctgctattcatcattccccttgtaatgattctttgagctgcctacaaagatgaggatagagttgtgattggaataccggtttctggcagtccattatagtctagatgggtgaatgttattcctaaagcttcaaaatatttatattaatatttactgtataaagtttaaatggttccttttgtttcctgtcaggagccaaaataaaaaaataataaaagtaaatagttccttagttaatatttttaacaggttttaataaaacatgttgattakttcttcagggtctcttgaaattgaagttagacaagaatctgacaggtagactgttttcagtactaagttgatctttcctttctccatttccaggtattccaaatctgatcacagcagatatgatcaaggaaggagcagcagtcattgatgtgggaataaatagagttcacgatcctgtaactgccaaacccaagttggttggagatgtggattttgaaggtaaatggtgaaattttatttttaaaaatgaaatcaataaatactacctttcatggacatttaggatagattatttacttttttttttttttttttttttgagatgggagtctcactctgttgcccaggctggagtgcagtggcgcgatctcggctcactgcaacctctgcctcctgggttcaagckattcttctgcctcagcctcccgagtagctgggactcccaaagtgttgggattataggtgtgagccactgcgcccagtcagtatgcttttccctccctctctccttcccttccttctttctttccttccttccctccatctctctcccttccttccttcccctcccctcccctcctctccccccacccctttcttccttcgtttctttctctttttttttttttttttttttgagacagtctcactctgtcacccaggctggagtgcagtggcaccatctcggctcactgcagcctccacctcacagcttcaagcgattcttgtgcttcaagcctccccagtagccaggactacaggcatgggccaccacgcccaactaattttgtgtatttttagtagagacggggtttcaccatgttggccaggctggtctggaactcctggcctcaagtgatccacccgtcttggcctcccaaagtgccgggattacaggtatgagccactgcacctggccttagtaggcttttcataagaattagagaaacctttttaaaattatggcttttctagaattattttaggtgttttatcatagtgatggagagcagttataaacttttcagggaattgtttttttccttagacttatttcataattcaagcaatttcttgacttttaacaagtttgaaaatttgatgaagtgatttttctaaaccatggagtttcccaaaaagtgttagagatttctcattttcacactgagagatcacaggcctagaaagttaaaatggtccaggaaaaaaccatacccctgaaatactagaatatactagtagatttcttctttcagttctgtttttttttttaagaggcagagtctcactctgttgcccaggctgtagtgcagtggtgtgatctctgctcactgcaacctccacctcccaggttcaagtgattcttctgccttagccacccaagtagctgggattacagacatgagccaccatgccggctaattttttgtattttcagtagagatgaatttggctgtgttggccaggttggtcttgaactcctggcctcaagtgatccgcctgcctcagcctttaacagtgctaggattacaggtgtgagccactgcacctggcctctcctttcagttcttaagatagaatgtttatccgagttttatgctgataatcctttttttctttccttttttttttttttttttttttttgagacaggatccctctctgttgcccaggctggagtacagtggcaggatctcagcttactgcaacctctgcctcctgggcttgagcaattctcctgcctcagcttcctgagtagctgggactataggcacatgtcacctcacttggctaatttttgtattttttgtagagatggggtttcaccatgttgcccaggctggtttcaaactcctggcctcaaacaatctcccccacctcacaccctgcctcagccccccagagtgctgggattactggcatgaaccactgtacccggcctatgctgataatcctattcctagctttctgtttttattaaagcagtcaaacccatgcctaggtatgtaaggattttcactttaacattaggttaattttttttttaacttctcacttttaaaaaattactgtgctttctgctttggacaaattatacttaaaattaaattaagaaaatgctataggcaggtattgaggtaatgcttattattgttatacttacaactcccacacagttaacctactagatatttctttaatagatttctttataggttacttagatgtataaatattccttgaacaactctgtatgtgcatgttattttactagtgtgttcacaaaaccttgaatgatgtagatgtgatttttgagttttatgcttatgtatgttactttttccttgcatgcttgtttaataatatattaaagtacacacatgtcctttgccataactaaagcagcctgcctgtcttgtttctatgtaggagtcagacaaaaagctgggtatatcactccagttcctggaggtgttggccccatgacagtggcaatgctaatgaagaataccattattgctgcaaaaaaggtgctgaggcttgaagagcgagaagtgctgaagtctaaagagcttggggtagccactaattaactactgtgtcttctgtgtcacaaacagcactccaggccagctcaagaagcaaagcaggccaatagaaatgcaatatttttaatttattctactgaaatggtttaaaatgatgccttgtatttattgaaagcttaaatgggtgggtgtttctgcacatacctctgcagtacctcaccagggagcattccagtatcatgcagggtcctgtgatctagccaggagcagccattaacctagtgattaatatgggagacattaccatatggaggatggatgcttcactttgtcaagcacctcagttacacattcgccttttctaggattgcatttcccaagtgctattgcaataacagttgatactcattttaggtaccaaaccttttgagttcaactgatcaaaccaaaggaaaagtgttgctagagaaaattrgggaaaaggtgaaaaagaaaaaatggtagtaattgagcagaaaaaaattaatttatatatgtattgattggcaaccagatttatctaagtagaactgaattggctaggaaaaaagaaaaactgcatgttaatcattttcctaagctgtccttttgaggcttagtcagtttattgggaaaatgtttaggattattccttgctattagtactcattttatgtatgttacccttcagtaagttctccccattttagttttctaggactgaaaggattcttttctacattatacatgtgtgttgtcatatttggcttttgctatatactttaacttcattgttaaatttttgtattgtatagtttctttggtgtatcttaaaacctatttttgaaaaacaaacttggcttgataatcatttgggcagcttgggtaagtacgcaacttacttttccaccaaagaactgtcagcagctgcctgcttttctgtgatgtatgtatcctgttgacttttccagaaattttttaagagtttgagttactattgaatttaatcagaytttctgattaaagggttttctttcttttttaataaaacacatctgtctggtrtggtatgaatttctgaaattctgkcttcctatgactcctagttgtgacctaaccagtttttttctcatttaatcaatgtagctattcctatattcagtaacacttacttctatagccttaaatagataattttttttcttctatttttttttttttttttgtagagatggggtcttgctatgttgcctgggctggtattgaactcctggcctcaagcaatcaatcctcttgcctcagcttcccagagggctgggattacaggcctgggccacccacacccaaacagaggtttaaagagctttggagaaaccagcctcgtcctccagtctctttgtttgtttgttttgagactgagtcttgctctgttgcccaggctggagtgcagtggcatgatctcgggtcactgcaacctctgcctctcgggttcaaacaattcttgtgcctcagcctcctgagtagctgggattacaggtgcatgccaccatgcctggctaatttttgtgtttttagtagagatggggtttcatcacattggccaggctggtctcaaactcctgacctcaagtgatccacctgcctcggcctcccaaaatgctaggattacaggcgtgagccactgcacctggcctgtcctacagtcttatatcacaacaggttgtgccaagctaggagcttaatctgtaaaatacttgaggcagggataggtttgtctgttttggcttttggctttcatgcgagcagaagtagctcctgctctaggcagcttgaggcagaaagagaagaaacaattgagttgacctacctccgtcctcgttcttctgccagctggcgttattcttttgatagttctctggagtttaaagaagtttagatagtttgctggagatgtttttgtaagtgacgtatagcttatgtctctaatccatgcctgcttacctagattattaaatgtggagcaagatgaccagacaggattaaattttattgaattacagttacaagtggaaaaaatgactgacttactgcatggagaagtattatgtcaacctgttaaaagctatrgaaattaaaatgttcatgtatatacaaaatataaatgacatgtaaggtaaaattacagtgatcaatttacaacaaagaaattaacagtagttttccagcttgtttgattaatcaagcaggtttactcttgaatccatagcrtttctacaatttaatttggacaaagttctattccagatcagccaggttttaaaactgaaatgtgttaagggtggattgttagcttccccaggattggtgtggatgataaatactttttttaaaaattaattattattgtttataagacatggattccagctgtctccctggctggagtgcagtggcatgattatagctcactgcagccttgaactcctggacttaaacgatcctcctgcatcagcctctgaaatggctgggactacaggtgtgtgccagcatgcctagctaatttttaaacatttgtttagagatgggtctcactatgttgcccaggctggtcttgacctcctgacctctgctgattccccccacctctgcctcccaagtagcgggattacaggtgtgagccactgtgtctgacaagaatttatacttaagcataggagatggttctggaaattctaagaaattctgctctcagtaagagtagaggtttggagctttacctcttggcagtatcccttggaagggagctctgagattaaatgtaatcaaacacttattgagagctttctatggaccaggcactacactagacgctgggaattacagaggcaattacctgtcctatactcaaggtgttaatgatctagtgtcatttttctttaaaaaagaaagcacctgcatttgtcatcttgagcaaatatagtaactctaacctcaaggttcaagtgatttactcaaggtttaaatcatagttgttttggagaaagtaagtgtcagatgcactgtggctgtcagggtcatagtaggcattwaatcaacatggttggtgttcattaaatgtggattgaagataaaatgactgatcttaagtttcatgaggaataggtttgcttcattgaaactggtttttatcttcccaaatagttttcaatcattcctttaaagtactaggttgattaatattgcaaagttgtaatgtaaaatgtgaccttacctctgtctaacctgtattgttcacatgaatgggagtttgactttggkaataaacattgaaaatttgcagggaggacccacccaaatgtatcatgaaatgtgattccaggtatgaaaaaccagtgatactaatttaaaggatcattttgatttaacatgtggtttcaaatttcactttaacaagaactattttattttagaaacatttatccactcagatgcattggttctttcattaacagagttttggaactggcttttcaatctgggaaagccccagtcacacttctggagcaaggcccataatgcagatggttcaaactttttttttgtttggatacggagtctcactctgttgcctaggctggagtgcagtggtgccatctcagctcactgcaacttctgcctcctgggttcaagcgattctcctgcctcagcctcccgaatagctgggactacaggtgcatgccaccacacccggctaattttttgtagtttagtagagacggggtttcaccgtgttgcctaggctggtctcgaactcctgagctcaggcaattcacctgcctcggcctcccaaagtgctaggattacaggcgtgtgccactgtgcccggctggttcaaacttttcatataacccttaggaaattggatgtgacagggagaaaagataggaccttttcagcatttcttaatatgcagaattgccaaatattccaaagatggtctagtgacataaaagtatattacaagtttgtttgagaacatctatatttaaatctaacctttaaacaattttaaattgatatttgttttaaatatgaattgactattgcccctttatcttagctatggtttggggaaacaagcatttttttatttccaaagaaatgttagaatttctatgctgaactgcattttaaaataaaatataatatttagctttaggtattttaattactacaaaggggagagctttgcatctaagcaatacttttcatcaatagatctccagttttctataggcagacggactccctctgtttgataaagaaggaaacaggcacagagaagttaagaccctcccagtgaagactaagccaggctctccatctcccatctgggagaagctgcttcatcctagagggtggtctcactgtcagtttctcttcggtatttatccatgtctgtgaagtcatagtctgactccatctctatcttcacctgtggcaccatgaacactgggttccgtgagtagctgaaagcaggtgaagctggacaggatattttgaagtgcaaggtgatgctgaacgagaagtaggaaagaaggattacgtagttcttggtgttttgaacccatcccctagagcagggctctaatgcaaatacttccatcttygcttctgaactctcagcacatgccagaatgagcagtttcctattggcttggccttcagccatagtcacgcatctggtctcaccctgtaaacctatcttcacattgctgccaaggtgaacttttgaaatcacaaatttggtgattcctcattgggttcaaagaatctaagctccttagtgtgagaagacaggagtgtcttgtcttctcacaaacacaaacacagtcttctgtgtttgtagtcctgcctgcttagtttgccccatccattgcagtgttctttgctctttggaggtgtgtgtgtgtgtgtgtgtgtgtgtgtgtgtgtgtgtttgtgtgtgttttcaaatggtacttcgggcctgtgtccactgcctgaaatgccttttcttttctctgccccgctctatgtctggcagattccagtttccctttcttagattctcaaaacgaggctactccctccctgtgtrctccgatattcttgcacagggtgctctgtctttgtttgcatgcctttctttccacatcctcagggattaagcatcgcacctggtagatcattgatgcttagtctttgttaaaccagatcatgttgcagagcctttcactgaaacagaatcttgctatttagtgatctttgcctccatctgttttcataaattcagtaaaacaccaatgaggttgggagataccatctccagttaccaaagtttcttcatttctgaccctgtcttagggccttgtgtaatttaacagggttttggaaacccctaacctggtccaaattttctctctactgcctgaaattgggagtagtcagtcaatttcatgtagattattttataaatgaaaataagatagactgcttttctcataataccggtgtatactaatgtataaagatcaatggcatcacatatataggagcctgactggggaagtgggatgagaaggaaggtggagattaactgggacaggtgacactttgggctagagcatctttgggactgctgcttagggagggttgaactggggaaaagtgtgtcgtttcaccctggcattgggatagcagctttgccttataattcagaagatcccctgccccgtttccccaaaaatctcttggatgagtgccctctgtgcctggagattgatcttctagacttgggatagcctgtgctgtaattactgtttgatccctgtccattctagggcacaaggtaggagtgggactgcccctggcatcttcccaagtaacaatgaagtaaagcctttcttgcctctaaattcatcttttctgtgtttgcccccactatgtcatcatcagggagtctcacctttttcacgggtggcttctcatgaagaacaatcacattgttggcatgggggctcctggcaactggccttgaacctattcttaacagttcccatctccagttgatctctgatgttagctttgatgttgatctctgatgttggctttcctccataccctttctgacctttgctaattaaccctgctgttaattcattctacagagtaccccagggtttcgatccttagcgttcatttatcctggctttcagtgatattacacttaagccatgcctagtttttctgttttctttttttttctttttttgagatggagtcttgctctgttgcccaggctggagtgcagtggcgtgatctcggctcactgcaagctccgcctcccaggttcacgccattctcctgcctcagcctcccgagtagctgggacyacaggcgcccaccaccatgcccggctaattttttgtatttttagtagagacagggtttcaccatgttagccaggatggtctccatctcctgaccttgtgatctgcccgcctcagcctcccaaagtgctgggactacaggcgtgagccaccgcgcctggcttctgttttctgtcaatatttcctttctttttttttttttttttgagatggagtctcactctgttgcccaggctggagtgcagtggcgcgatctcggcttactgcaagctctgcctcctgggttcatgccattcccctgcctcagcctccctagtagctgggactacaggcccccaccaccatgcccagctaatttttttgtatttttttagtagagacggggtttcaccatgttagccaggatggtctcgatctcctgacctcgtgatccacccgccttggcctccgaaagtgctgggattacaggtgtgaggcaccgtgctgggccacaacgtttactttcaatttttgttctacctaatcttttataagaatttcctttactaaagttgaatacctttgtgtgttgtaaccatgttgttaagtcagtaagaagacatacttgtttcttggccctgaatgatgagtcaggtttgtcagcctttgactcccagttgggggccagcaagggccttctactgagaggacagctagcttgggaaatcctagaccctccaccttcccggccatttcctagtctcttacctaatacgcaaggagtctacctaacagtgtttaccttcggtcaagttctgtgtcactgaaggaagaatcagagtgagtaactccaactggaagatctttttcctggcaggaaaatgaaaaatgtcagaygtggagcaggtttgagmaccatatttctccgggcttcccccaccatttcctttcttttccttctctaaccctagagccaacactatgcaagaggaatacggggcctcagagatgtgtggcttcgggcttagttactccttcacccagaaggtgctcagccagggctagggggtrtgaggcatgggagggccagggaagagagaaataggagtgggggaggagtctgagaaactcaagatcttgaggtacctatgatggacagtgctgatgggaaggatgccctggctacccacccctaatctgtctttgagggtggcaagccctgtattagaagcacggggctcgggactaaggtagggatctttcagaagacctcgggacaggctatgttgcctggatgacaggactggccacctatagggagctgaggctgggaggggttaaaggcagtaatataatctcccaggatttccataagcaatgcccagtccctcctaggcagcctccctctcagctgtctgctgagaaggtgctgaggattcacacagaggcacagcacaaccaccacgaggacctccaattatgcctgacttataacccaagtgctatgctacctatttctctaaagggaaaagcttggttctgarccctcaaccatttcaacagccactggaaaacatgggaggcctggtgggccatgtttggactgatgtggtctgaaacaacatagaagagggccaggagatgccacagggatctggggacacctggggaaaggagggaatgagggattttgcctcaactaaagtgagaattagtcgagtctgcaggctttgctctggggtttccatctggttggagtaccagtcctggtggcccagttctctttgatctctgccaaggacaaaggtcttctagcgcaggggtcctcagctcccaggccatggaacagtagcagaaccaggccgcacagcaggaggtgagcatgggcgagcaagcattaacccctgtgctccagctccggtgggatcagtggcagcaatagattctcataagggtgagaaccctattgtgaactgtccatatgcaggatctaggttgcgtattccttaagagaatctgaggtggaacagtctcatcccaaaaccattccccactccctactggtccgtggaaaaactatcttgcacaaaacttgtcccttatgacaaaaaagttggggactgctgctctagcatccaaaatgattagatccccctgagttacagatgaaagttcctaggggaaagacatggaggactagtagtaagaagggagagacatcatgtgttttacttactggcaatgcagtggataccgttttggggatctgattggacactttccatgggaatctttataaycgagggaggagggaactggggctggagaaaaacagtgggaaaagaggataaacaccaacacaacaatttggctttctttttttttttttttgagacagagtctcgctctactgcccaggctggagtgcagtggtgcgatctcggctcactgtaacctctgcctcctgggttcaagtgattctcctgcctcagcctcccaagtagctgggattacaggcgtgcacccccatacctggctaattttttgtatttttagtagagatggggtttcaccatgctggccaggctggtcttgaactcctgaccttgtgatcccccctgcctcggcctcccaaagtgctgggattacagatgtgagccaccgcgcgtggccaacaacttggctttcttgccaagatggaaaatgcatgcatgaacattgcaaaccaccattctgttcacctctaaacagttaggggatgctgcaaataccctggggtccactgaaggggaatgggcacagttagcctgctgtcctatacacaccatcagacagaccggaactcttccaggaatgttactcatcaaaacagttttatctgtcacagcaaccagtcacttgggaatgaacctcacacaacaactgtgttgctataagacaagtaaaatgaatttgtataaattgaatcctgtttttccattgatatatcataattcagagattctttttcccaaccctgtaatagttcttggcatgtggtagccactcagatatttattgaaagtatcaacaaaagaagtatttgtctttaaaaggcacttagtctctgtttctttgttttcagaacccacctttacaaatcatctacaaacacatgcattatgggactcttcctggaagagcacagtaattaaggaccaggggagttctgactgatcagaagatggtttaatcaccaccagccagtcagaagggatttgccttgaacaggtttcatctgcacaaggcaaaatcacgagaacaggacagggtggatgcagggacgtgagtttgggtcaaattgggagattgggaaccaagcacagcattaggagatggcacaggcagcttagcatatcagaaaccagcaaagtcaggaattattttcttaattccttcttagaaatgtagctacatgtccattttgggtaagtcacttccttttgtggggacagtttcatcataagtaatgaacacatgaattaagaatctttctgcctcatgttttgtgattcactataatttctggactggccccttgtctgttgactccctgagtgttttggggatgaaatgggaagggaccatgggagaagaggggcagatggggcaaccatgttgtcccagacatctgggaaatgtagccagtctccttttggcgaggatacctgcctctttccccatctttgtcctcaataccctaggcaaaggcgcaagcaaaacttgttcccagcccctcctgcctgtctggagtccagtctacttataaggccccattagacacctctccccaagtctgctccactctttggaggtcagtcttcataacctccttccatgctggagctgcctcctggcccttcccacaggaacccgcttgctgtgatcacggccgtaaagcccacagtgatggaaagagtgggcatggccagtcaccttttccctggacagggagtctcattcaytctggcccaccctgaggatattcacataaacagaagagccctcaacaccccagaccaagacaagcagatgccccagcccatcctggactgggccgaggcactgctgcaggccacccaagaagccgccctctccctgtccctggcaaaagtggagagaaggtctctcaatttctcctctgtgccccggcctcacatcttccccacctcctcatcacagtcctcgtgggcccctttttttctcttcctcttcttgtctgtctcctttttttccttctctgggaggatgttgtcaatccaggccaggtcgtgctgggaaaagatgaaatccagaagccttcgaacgatgatgaggcccaggatctgtggtggagagagactaaagttttgtgagaatttggagaaaactgtggtctcaatgcccaaactcaggcatagatttttttctccctcagtcggctgagttcagggactttttgtggtgtctttggagccgtctygaagctcccataagccattattcactttccctccaccgtagttcctcttgtctggcccctcaggtgartgaccatgcctaccagtgaccaagagggacggagcctgtgacagccgaagtggggagcctcagaaaggccatgggctggagaactacagttattctttaaattagtggttctcagccaggcgtggtggctcacacctgtaatcccagcactttgggaggccgaggtgggcagatcgcctgaggtcaggagtttaagaccagcctggccaacatggtgaaaccctgtccctactaaaagtacaaaagttagccaggcatggtggtgggtgcctgtagtcccagctgctcaggagactgaggcagaagaatcgctagaaaccgggaggcggaggttgcagtgagccaagattgtgccactgcattccatcctgggcgacagagcaagactccatctcaaacaaataaaataaatacataaattagtggctctcaaacttgagcatgcaccaggacctggagggcttgttaattaatacacaaatcactggattcccccagtttctgatttagcaggtcaggtaatgcctgagaatttatgtctctaaccactctgtacatttgccaaaactcatagacccacacattgaattttactgtatgcaaattaaacaaaaaaatcaataggtggagggtgtgggtcttgccctgccctatctggctgtgtgtccagggtcactctgctcatgctctctgagcctcattttctcatctgtaaagcggggttattagtgctttgggggctggtgtggactcagtggaacagtactcagtaaatgctaatcatgactactactgcctttcccttcgccagctctgaggcccctgagggcactrgggggaggatctatctccctttccctgcagtgggggttctcaaccctggctgcaggtctatgctcacctgtggacctcataaaaataccaaagtctgggtttccctagagattctgatttgttgatctgggttgattttcatgggcagcccgggtcaagaaccatggactagacccctcccagcagtgtgcacttcaagttctcctcagtgtccttactttgtcccctaccccagagccctcaggctttccccaggcatttgctgacacactccaggctcctggcaagggcctgggtcactgccctcggtgagttatctagggggccagatgcaacatgttgttggctttgcattcttttcacttcttattttggagtaatttcaaacttatacaatatttgcaagaatagtgaaagacctgtaacctttcccttgctcaagctttatatataccatcattgggttttgttgttcttgatctctgaccctcgttcttcccctgcccccctacttcactatttagctttttaaatttagctatcttgaatggtggaaagatctatatttagtacgcatcgacttctgagactggttggaattttggcagtgggaactcggtctcctggttgaactgattttctttctccgtccctccctggagccaggaggtagggtggctcctgggttctcactgagcggctctgacattccttcctccgcctcctctctgccccaccccacaccatctggcctggactcacaactcaaatcaggtcattctgtgccagcctccgtgacccgagggagccaggccacagctgacrggaaggcagaaggtggcaggaggggaggttgcgctgcacctctgggttgcccaggccaacctgccaggcaggagggggaagcccgtgcccactttaccatgaccgggaagatgatggcagccaccgtggatttgaggatccagagcaccgccaggcagaggatctgcaccagggtgaagaggtggatccggcgcagcggcacgtgccgcaggaaggcatggtccggctggtgcttggctggcatcaggaagagcttgcagcgttcccagaactagggggacagcgggggctcagccaggcagccagaccccgagggccygctgggtcctgggactaggggaaggggtgcctgggtggggtctcagagaggggaagccccctgctcaggccttaaggatgcacgggaggggggctggaggtgtctaggcggatgcataatggggtcttagagaaagggtcctgagccctgggtgaggggaggagccctggagctggccacaaaatggacattgtccatattcagggaaagtgcaagttaattgtaacacaaactgtttaagaattctgggatttcacagtaaatacagaacaaaacaaaaatgttttcttctgcatagctgccttagggaagagagagaggtacagtgaaatgctcactggagtcagcttcttctggattttgaattctgaccctccggtccccatctgtaaaatggggatcagaggacctaattacatagattcaattatatgaggcctatgaagtgcctaacatatttattttgcctgatagcatcagtaagtggtagtatcattattactattattctttcattgaattaggacaattggggacaattgggacaactgaattgggggtcttggtgacatggaaccagacatggaatgttgactccagatcatgaagggatctggagggaaagccttacctggatgccattcagggaggccacgcccatgtagaggaagactccgtacagcaccggcagggggatacactaaaatgagagcagagctttggatcggcctctgcctggggcggcccttggccaccctgttctggatgacagtggctcctgaccacagaggcagctaggaaactggatatttggggraacagagagtcagcagaactgggatgtgggcaggggtgaagatgagggtcactggggctgtactgccccttctctggctggggtagctggcccagcatgcagctgctctcctggcctggcccctcactgcaccgtgcggaggccatgtggtctggctaaagaaatgycttctggaaagtgagaagactccacagactgccccctcctcattcctgcccagcttcttcctacctccagcctcagctgagggtcccctaaaactgctcagcctgcaggggcatggggacttttaatgagctgatctacatcagcagcgagtacccgggacacttaacagaaatcacgcatccggccgggtgtggtggctcacacctgtagtcctagcactttgggaggccaaggcaggtggatgacctgaggtcaggagtttgagaccagcctggccaacatggtgaaaccccgtctctactaaaaatacaaaaaaattagccaggcgtggtggcacatgcctgtaatcccagcaactcaggatgctgaggcagaagaatcgcttgaatccgggagatggaggttgcggtgagctgagatcgtgctactgaactccagcctgggcgaaagagactctgtctcaaaaaaaccaaacaaagcaaacaaacaaacccccccgccccccaaaaaaaccaaaaaaaaacagaaatcatgcctcatacgcaatcacatacaaaagaagcagaacaaaagtgtgtaaactaatcagcactcatcaccaactaaccaccaatagtttggcgggtatccttccctccaaacttgcacacaggcaatttgtttgctttttcaaaaatgggatcatagaattcatcccactctacaagaatgattccaaatcttcacagcctttcaaagcattcttccgctgtctctctcagctgtttctgccccttaccttctctctttcacctgcagctgtggctccccatggtgagcagaggctgttcctccttgtggtcatgttagagcactccggagagcacagagcactatgccaacactaggagggctttagaggaattttttgcccctaaagaagtctgttcttagatttgagcttttttttttttttttttttttttcttgagacagagtctcgatatgttggccattctggtctcaaactattgttctcaagtgatcctcccacctcggcctcccaaagtgttaggattacagacatgggccaccatgcctggccgattcgaaggtgtttttttttttkggggggggcacggagtctcactctgtcttgcccaggctggagtgcagtggtgcaatctcggctcactgcagcctccacctcccgggctcaaccaattctcccgtctcagcctcctgagtagctgggactacaggcatgtgccaccatacctggctatttttgtatttttagtagacacagggtttcgggtttcaccatgttggccaggctggtcttgaactcctgaccttaggtgatccacctgcctcggcctcccaaagtgctgggattacaggcttgagccaccacacccagcctgattcgagctttttaatgcaaatacttgtatgttaaacagtgtcaaaattgacatacacaatggcaccttagaaccctctctacaaaagtaagtagtccctggccatttaaaatatatttttcaataaacaaaatgcttgccctcctgtgtgtaatttgtttcccccacaagggaaatatcccttaaaaaatgccagcctcctacttactgctcgggtatgcccagcaccaattctcaagccagaaatattttccattgtaaatacatcagccagaatcatcattctttagcgtttgtttcttacaaggtcacctctgaatgaggtttttkttttttttttttgagaagaggtctcactctgttgcccaggctggagtgcagtggcatgatcatggctcactgcagcctcgacctcctggactcaagtgatcatgcctcacatgtaccatcgtgcctggctaatttttgtattttttgtagagatgggggtcttgctatgttgcccaggctggtctcaagtgatcctcccacctcggcctcccaaagtcctgggattacaggcatgagccaccatgcctggtcatgagctgttttgagatattcaaagaggaaaaataatatcggcaaaaggttgaggcaattacaggtaaacttaattcaagaaaggaaagtcttacgtgggcactgatcaagggaaagggagagtgatgggcgattggctggagtggagagcagggaagcctggtgggaacaccttgctttctggagtctctccagaaagagacccttgtgggggacgcctgcctccattgtacccctacttgacttagtctcttagctgttgtggtgggacataagcaagaggagcttcaagctgtgtgggaaaaagtcactcgagtccccagacttcctgagctcaggtgatcctcccgcctcagcctcctgagtagccggactacagggatgtaccaccatgtttggcctcctgctgcaagttttaaacttcatgagccccaaaccctggcaatgtggamacacaccccattcaggaagttcctgatctaagcagggctacaacttggcagaactttcagagggaagagtatcctccagaaaggtgagagtggccctgggatgggtgggagagaggattggtgatgataaaaaactgcagtatcacagaaaacggcggtgacagtgtggaaacattgctttggcctagtaagactgtgcctttctttttcttttctttcttttttttgttttgagacggagtttcgctcttgctgcccaggctggagtgcagtggtgcgatcttggctcactgcaacctccacctcccgggttcaagccattctcctgtctcagcctcccgagtagctgtgattacaggcacgtgccaccatgcctggttaagttttgtatttttagtagagacagggtttcaccatgttggtcaggctggtcttgaactcctgacctcaggtgatccgcctgcctcggcctcccaaagtgctgggattataggtgtgagccaccatgcccggcyaagactgtgcctttcttagggggctgataggccagtgatccctagccatgtggggaccccctccctgcctaaggcatccgctctgctttctcaggcaacgaggccctaggtgacagtgcaggacctcaccttyaggatgggagccaggaagacagagattcccgtcaggatgaagacgatgatgccrgttactctctgttccctggcagagaagaacacatggtcagggtgtaccaggaaatgcctggcaactactctggccctcctgcccctctgtgggcacctgaagcttgtgtccaaggccatggccttgagggcttctgcatgaagctctgcctggttgcctgaggcccagctgaaccatatgtgggaagacaggcggcccctgactggggcaagggcatcttgcaggagcattgagggaggccgcttagtgtagtggcttgtagctggggggcttgagcaggactgatgtggactggatcctggctctgccacttgctagttatgtggcattgggcaggagcctgcccatcttgagcctcagtatatgcagataataatggcacctattgtgaggatacatgcgagataaaatgctattactctgccctttgattttaagatttcgtttttgtggggcacaatgaatgaggatctggggaagaggacaccagcagagcaggtgtcaggggtgggaggcaggtgagccctgcagtcgggcagagaagcctcattcgggcaggctgggcggtccaagtatctcaagatagtgggagaagttcttagggcagccacgtaggagaaagccagggtttggtgtggtctcgccctggaggccctaaggggctgaagatgtacttctctgcctaccatggggcgtgagagaagaggcaagtgaaggaacaggagtaacaggcagggccacagactggggagcgggggtgatcccaggacagccttctggaggaatagagactgagcaggacctgaacccgcaggagggccatcagggcagtaggggcctggagggtcttgaggaagaggaaaagggcaggacagcacgaagccttgtggggaccttgggtggctgatgaagatgagtgtctggcacgtgtgcatatttatggatggggtatgcatactgcttggagcccagtaggtaaaaagccccacttagagctggacttctgtctctctccttccctccctccagggatagcactcctgtccctgtggttcttgggccgtcagagcgggggccctttttgtccaaatccttttgtggcaggcaaagccagcttctcctccccgagtgggcccctccccattgggtgatccctaggccctgacccctcctacctgactcccagaaactggggctgctccccaggggcactggtctctgtctccatcttgaggctgtcgatgtgggcgatggagatgaccgtggcagccacgtaccaggggagccccataaaggagcacaaagccatgasgatgcccacccagaacaggtccagatggtagccggcagccttctgcaggagcggggttgggggagggagaagtttctggggagccagttcctcctggatgcaaccattctgtggaacatggttcaaggaccccctgccttccagaagatactgaaggggcctgaggtgctccttgcaaggattgcagaggtgggtgtgtcctgccaccccatctgaaagggtgaactgcctaaggggtatgggtcatagaagagagggatgttcaagcttggagaggccctgggtttgggtctctggggagaagggcccagaaggtggccacagggtctttgcggttcctgaggggccccagctgggacaggccacacctaaagtggtccagacctggatgggggagggggtgacccgagtcttctcaggctcacaggctgggtggggagttgcagagaccaggaaggctaaggaagttcctctgcctcagtgttctaggctgagcccctgtcaggatctgctgattctcataagaactcgaggtcactttgggaaagacagagagcctgtgcccagtggcccagcctagtttggtcctggtcctcagaaagtcactccagccctggtggccttacccacatctggaggtcacatttccccctcaacacaccaagtgggaactctagtctctgtcctcatattttcctggcccaaagtactgaaagaagcatcatgtccttccttcgctctttctgactttgtgggaagaaagaggttatgcctctgctcctagtaccggccttaccttcagtttgttctccttccggttgacaatgacggcagtgatctgctggtccatgaagatcaggatggtcaccagcagggcgggcaggatgcttgctgggtatacccaccacgggttcttcccaaagggggccacgaaccagcctcggtcaggccgygttggctgagtgggagcaaacagagaggggccctttcctctctcccttgtcccagggcacttgtcgcctggcctgctgtcccacctcctcaactttccctgactttgggtacttttcaagtgcaatcttttcccttaaacaccttaggtagctgcaactttagactaaattcagacatgggaaggagcatgcatgcagacagtgtctgtaaaactaagraggtaatttgctgcaacagccctggggtttgtcaggaaacatggaggtgaaggtcagagggcagccaggagagagagcacagtcacctgctgcaaataacaaacagcaggaatgaggcccagcagaaaagaataaagaaatgggtgggcccagggccagctgcttctgcctctcctgagtcacctgtctgggagcattatagaattgtctgtaaaatgctgaacatcagttcagtcctgcatgttcagaatgaggagaatatataaaaagactttgtctcaaaaaacaaacaaacaaacaacaacaaaaaaaaccttaaagacagggagggtaagttctagaatctggactccctactctggtgagatcgttggtgctcttttttttttctttctttctttctttttttttttgtttttgagacagagtcttgttmtgttacccaggctgcagtgcagtggcgtgatctccgctcactgcaagctctgcctcccggattcacgccattctcctgcctcagcctcccgagtagctgggactacaagcgcccgccaccacgcccggctaattttttagtatctgtagtagagatggggtttcaccgttacccaagatggtctcaatctcctcacctcatgatccgcccacctcggcctcccaaagttctgggattataggcgtgagccaccgcacctggccggttggtgctcttatgagggagtagggctgrgtttagctacaagcatatgtcaccagttctaactagtgggtaatttctaagcagtggttctcaaacttgagcatactccaagtcacctgaagggcttgttaaaatgcagattgctggtcccaccccccagcttttctgattccacaggtggggccgagaaattgcatttccaacgagttccctgtgactgtgatgccatgatattggtctgaggaccacactttgagaatcactgttctaagggatcagtttcaatggatcccatttggcccagcttatagattgctagaggtcagggaactggagacactcaaataggaatcaagaggcttctgctgggttggagggtgaattccagtgccttcctcacctcgtgactatagatcaggatttcctggtgaatatgttacccctccccgccctacctcaaaggactggctcctgggagcctgtgttcaggaaaggtggcacacagagaactaaaatggtctcttggccaagaggagaagagagtttgatcagcacagaggggaaagaatctgcagctggtaggcaggcagactggatgcccagagcgagggaaaggggcaaaccttgatgacactgggcacatgcagcttgggagtttctaggccaaaacaggcatcgattccacagaacatcaggatggagaaaacaatggaaaagtcagccaccagggcccggacctgcagacaggagatgagcaagtaaaagaagtgagtaaagcacccacccagctccaggcagccccagtcctccggcagcaaagaggtgaactattacagtctgggctctgaaggcagcagaactaggctcaaatccaggctctgctccttgctaactgtgtgagcttggggaagcgtgtcatctctccaagactcaatttccttctctgtaaaatggagatgatggtagtatctccctcaaaggtgtaagtgaactgtgacacatttagagtgcttggcatatggtggtcaatgtgggakctgttatgatccatatggccatggcagccactgctgaagatgtgttctggtatgacagtctgaactggggcacccagcaggtatgatgagggcaagggctggactctgaagcaaaccttagttcctacaagcctgtgacaggttgttgtaccccacctgggctaggagggaggctccccaattccactggggatcattggctacactcagaccttttgtccaccaagagtctcttgttccgctgtttctcaagaggcccttcctaggccaggttctgaacctggaggcccttcctagaccaagttctgaacctgaccttcctgcccattctgaatcaatgtcctccgacctcccctccaaaccaactctatgtccagaagtctcaggacagatggtcccccaacgtctaccctgtggcctttttaatatcttttcaaagaaggcaatttgaagggcaggggcaggtgacagtacattgacttcattccctgcatcccccttttctctttaaatttgttattaacataacatatgtaattggttaaaaacccacatagtggaaaatacttatgaggaaaagcaaagtctcccacctccccttttctcaatccagccccgccttccagatctatccactatgtctgcttgattttacttgttccagaggttccctccatgtcattaactaatatgcatatactttaatattttcatttactaatttaagggattatctattgataagaatttacctttacttacactgtgcctcctgtcctttccttattcctaatctttgatagttaattttaagctcctatgggtttcctttgtactttcaagtgataataattaaacatctccttccattagctttggctaatatctctcattctccatcttgcaaggtgaggaccactgcctctatcctcctaccacctctctcctcctcccctcttccttcctgtcacacctccactttgacctttccattgtcgaagctgagaacaatcatttcttgttccgtaaacacatggcttgtgtgttttatctgtaagtcaattccaaaagttgaaaattagtaacagctttatattatcatgatcatataaatattagtcacagcagaaccaagtagtgtgctgggtttatacttccttttctataatattcctagcatatacatcaaaaccatatgaatgcttattaagttaaaccacatgaacttgactttttttgtaggttgaaacagtcaaatatgggcaacttcatatggtccaacctaatcagagagtgtcagttgctctccaaattggatgtatctgtctacattcccacctactgctttccatctccaacatctggtgtcccaagaccttcatctgtctaccaatctgatgagtataaaatggtgtggcctcattcctctctgcaaccggaaattccagaaggcaactgagcaattttttttttttttttttgagacagagtctctctctgtcgcccaggctggagtgcagtggcgcaatctttgctcacggcaagctctgcctcccgggttcatgccattctcctgcctcagcctcccaagtagctgggactacaggcgcccaccacaacgcccggccaattttttgtatttttagtagagacggggattcaccatgttagccaggatggtctcgatctcctgccttcgtgatccgcctgcctgggcctcccaaagtgctgggattacaggcgtgagccactgtgcctggcccaactgagcaatttttaagtaatgtgacggaaaaaatgttgttggcacaagaatttcatgccacatgaattacttttcatcctgtaggcaacagatagatactctcagatacagtgactgcttgagaatttttacataagaggagattgagggatgtgctctggactggaagtgggcaggaaggaagagaacttgtcttgatggtgcatttgtgttgtaagcaaactatttttttactcagtttatatactgtgaagcttcctaaagcaccttttatttagtctttagaaaatctgggaaaaattcaactatttatttcaaagattttatcattatgattagtagcagtagcagctgtaatacttagttaagatggctttaggagactgctaatggagtttacggtgggaaagagttgcttaaattcttccgagtaccccccaccccacggcacagttactgcttatgtatgcaagtgctgttttcataaatcttttattccagccacaaacaggtagaaaataaaatttaaaacagcagttagggctgggtgcggtggctcacacctgtaatcccagcactttgggaggctgaggtggggggatcacctgaggtaaggagttcaagaccagcctggccagcatggtgaaaccccgtctcaactaaaattacaaaaattagccgggtgtggtggcaggcgcctgtagtcccagctatttgggaggctgaggcaggagaatcacttgaacccgggaggcggaggttgcagtgagccgagatcatgccatttcactcccacctgggtgacagagtgagactctgtctcaaaaataataataataataaaataataataacatagcagttagcatttacgacggtataaaaaaatcaagtacctaggaataactctaacaaaaaatgttcaagacttaaagatcaaaatgtataaaacattatggagagaaagaagaccaaaataaatgaagtatactgtattcataaatcagaaaaactcaaaatttgaaagacgttaattcttcccaaacagaggcaaagataatcccatcaaaattccaacaagttttcattttggtgaaatttaagatgattctaaaattcatgtggaaatgcaaagggccaagaaaatattatataaaaaggacaaaaggggagagcttgggagacaaagatataaagacttataagctacagaaatgaagactgtgatactgatatataaataaactagtgaaacagaataaagaacccagaaacagaccctgtcatataggaatatttgatatatggcaaaggaagtattgcaaagcaatggagaaagaatagtctttaaaaaatactggaacaattgactatataaaatcacaaagaaacactgtctcacagtacacatcagaatcaattctgatggattgtagatctaacatgaaaggaaaaacaatgaagcttttagaaggtaacatacaagaatatctgctgtccaatatttgccttgaggaaagtttgatatattcaattacaataaaactaagaatttctgttaatcaaaagatgccattaaggatgtaaaaagaaaaaaacagtcacagagtgggagaagattttgcaacacatataatcacaaaaacatttctacccagaatatataacaaactcttgcaaatcagaaaggcagacaacccaaaatgtgcaagagatttcaacagacacttccaaaaagaaaggcaactgggcatgtggccaataaacacaggaatagctgtattttcaacttcattagtcatcagggaaatgaaaaatttaaaaaacacaatgagatactactatagacaaagactaaagataaaagcctgacaataccaagtgttgtcaaggggaccagccaacaagggaacacagttctctctgacttaacttgaaaaaccccagtgggccagtgctcgcatggagtccatcctgtcggtggaccagaaccctctctgggggactcagcagctgtctgactgcaggtcccctcctaactgcagggtgagcttaccttggtaggaaaatagcrgctgaatttgaacttcttcagggtcagggtcatggagtatgtcccaaagaaaaggatgaaggacatgagcgccaggtctgggataaacttgcaggaattcccaagcaggcgcccrccgtagctcagacactccttcttgctcagcagggaccagtccaacgctgtgaggttaaggaggttgtacttggagaccaagcacaggagagaatgggtcagcatcttcctgatgagtcagctgtgtccttcccactgcagtccccaggcagccagcataccttcccaccctctgagggaccccagccccccagagtgatgttcctggggacgggctggttcaaggaatgacaagctccctaggaagattaggagctcacatgtgtttcttcattgtgttctaggatgcactgctgtgctagcaagtaggaaaagtgcagaggcaggatgcctggctcccatcaaccaaccacaggtcctgtggacgcctccttcctggagtgtctcatctttattctctcccctccatcccctctgtcacaccctttcatatatgggggatcacctcccttgtcagtcccctcttgggtcatttcagccattccccaccttggtgtctcagatgcctaaaatccaaggcatacacaacagtgaatttttatatataaatttatttatatatacatatataaatttatatatatatatatataaatgtgtactgtgagacacactctgatgtgtactgtgagacagtgttccaagccccaccctcaccccatcttagctggcctagcccacccactagcctctgcacaggttttgtgcttttcctctcttgcccttctgtctatgctgttccttcagtctggaatgtgcttttctctgctgagccaactttttcccaaccttgaagaccagatcgcattctacttcctctttgaggcttttcttggcctctccagcagcctcctttcctgccttcaagattgatgtacacatttggcctatatttaatgcatggtacattctgcttatgctgtcccataacttttcaggttcttctctacaaatatattaaaaacaaatttgaggacaggttctgtgttggtttcttagatgtcttttttagccttcagtgcacatggccccttgcatataatagggattcagaaataggcactgactgattctgttctttctctctcaaaatttgatacttggccagcctgggcaacatagtgagaccttgtctctacaaaaaacttaaaaattagccaggcacagtggctgatgcctgtagtcccagctactcgagaggctgaggcaggaagatcacttgagctcaggaatttgaggctgcagtgatgatacgatcacaccactacattccagcctgggyaacagagcaagaccccatctcaaaaaaaaaaaaaaccctaatctttgaaaaatattaagttaaattgccaactaggatgtgtgtaggcagagcagtcaattgcctaggcaggaataacttaagaagcaaccttggagacagtaaaagctcacaaatgtcccccaagtcctaccaggtgctaccttcatctggaattgaacttctatcattaagccacttaggctgggatgctggctcctgaagaccactgtcattactgggaaaggcagaccataccttaggccccagagactaaggtgtgcaaaggacacattagattcattgaggaagaaacactaataaactctctggggctggagagtggcactgctrgaaattgggggtcctaggcagaaagagaaggaagaaggcagaaaaatgaatggcaggctttgcttacagctttgtgaggctctatttaccatccctcatctctacttccccttcctttgtgtgcgtgtcatattattattattattattattattattattattgagacagggtctcgctctgtcaccgaggctggagtgcagtggtgcgatcttggctcaccacaacctctgcctcctgggttcaaacaattcttgtgcctcagcctcttgagtagctgggattacaggtgtgtaccactacacccagctcgtatcatattattaatacacatgagggggccaggcgcggtggctcacgcctgtaatcccagcactttgggaggccgaggccggcagatcacttgaagtcaggagttcaaaaccagcttggccaacatggtgaaaccccgtctctactaaaaatacaaaaaattagctgggcgtgatggtgcgtgcctgtaatcccagctactcaggaggctgtggcaggagaattgcttgaacctgggagatggaggttgcggtgagccaagatcacgccactgctctccagcctgggcaacacagtgagaccctgtctcaaaaaaaaaaaaaaaacgcacaaaaaaacatggatttaacagaatgaggcatgtttttaagtgggatgtttacagtatatacctaagaaaaaagtgttcatttacaaagctctgcaggtgaccctgacgtgcagctggagttgacctctgcaagtctgggaggccataagttggtctcatttccaaaatcttttctccctcctcctacaaacaaaagcactcaaatgtctaacataagaggaaaggacttaccagagaagcgttggtgtctggtgccaatggggctgaagcattgaacacggttgtattcactgtggatgagcacatgacacggggcagggtcagcagctgtggggmtgggagctgcattcccaaccccttcccatctccttccagttccttagagccaaggcctggcttccattgtgagggcagctccctctccaccttcctcactttgccccagttagggaagggctggtgggacagagcmtgggccacagctctgacagaccagmtgggccaggacagcacctgcctgaccacgaacagctggttttaaaaactgaaataaggaatctggagccaagacaaagtgctaagacaaactggaggataacgtgccttgtgaatcttcaccggccactgggcttttagacttaaaaatgttcaaagaacttactctatgccatgccctatgccaagcctttacatatattcatttgtttaattcccagatcttcaccaagtatgcccactttacagatgaggtaactgaggcccagagaggttatgtaattcatccaaggtcacacagttcatactcggagccatgatcccatcccagaaaggctggcccagagcctataaacttcccagctctacaccatgaacttccctgccctgttcayctccacagatacgtcccttcccttccagcctctttttttgcccaggctggagtgcagtggcgtgatcttagctcactgcaatctctacctcccaggttcaagtgattctcgtgtctcaccctcccgagtagctgggactacagatgtgtgccaccatgcctggttaattttttgtatttttagtagagataaggtttcaccatgttggccaggctggtcttgaactcctgacctcaagtgatctgcctatctcagcctcccaaagtgctgggattacaggcatgagtcactgcacccagcccatatgtgctttttattaaaggtcagctaggcctgaaataacttgttgctttgrtatcttttctaatctgccaaatgcaagttgaggaaagttaaaccaaagtccaggtcctgaagcagaatcgggaacccaaaggtgctgctctcagcggctctctctgcattccttgctgggtacttccctaccctggcctcagtgtccctaactgcatgtggatcacatgacggtctacagggagagtttcaaggaaccactgttgcccgtctctcctttccatgtggacccttctgctcccccgttctgcagtctgtccttcctttgctcctcattcacagggccaggctcccctgggatgtggccacccataggaagtcaggctttggaggcctgctgccctctctcttcttcctgaactgctacgttgctcactcccaggcctgctgacgctgggtggctaaggaattccatcttgacccagggcagaatattcctagaagctctaccaacccagaggtttgttaggattgttctgaggaaggcttcatttattagaaattggggttctattgcctttcctcacatcagtgaccaaaagaacatgatgtgcaattaatgatggagacagagaagccgggcaggaaggctggctcagggcttctcattcaaatgctagagaactcctggctgacgcttgagcctggggagttcagatgtctttttcactacccaatgtcttcagaccacctttgatgtcttctgcttatgcttatcaattcttttatatcgagaactctgtagggtttatctgaaagccacttgagatgaatatgaaagaaatataacatggaaaatttcagaaagggtccaagtatcaaacattttaaaattccagtgtttacaaagtggtactcacttgggattgaaagcagccaaatcagtgtgtgcagcattcataaatagaatacaaatcagttacaatggaagcaaaagcaaattgaaagagagtgcccccaaacaagcttttatgatgaagagtgacaaagagtgagagtatactatagtaagactgggcttcrcagtaaaactaggaatatgggcccattactaagtaggtggcccatggaccgggaaagaaaccctccacagttctcccccctcatcccagtctcctaaatgtgtagaattttcctttccatgttatcttaatcaaaactaacttgttctagttctagttcctttactttctgtgaagaaactgaaattttaatcttactggggtttagtggtcaataacggcccattattactaacagttcaatagagcaatggttctcaaacttaagagtgcatcagaatcaattggaagattcaatatacatctgcttggaccctactccagagttctttcgcttgtttgttcgttccttccttccttccctcactccctccccccttccttccctccctccttccctttctttcctttcctttcttttctttccttccttttctttctctttctttctttctcctttctctctcccttccttctttttctttcccctttctttctctttcttttttctctctttcctcctcttctcttctctcttcttcttcttcttcctcctcctcctcctccttgctctcgctctccttttctttctttcttagaaatagagacagggtctggctatgttgtccaggctggtctcaaactcctgggctcaagtgaaattcctgtctcagccttctgactagctgggactacaggtgtgcaccactgtgcccagccagagtttccgattcagcaggtctggggtaggaggctacgaatttgtatttctaacaagttccctgatgctgctggtccagggacgacattttgagaaccatgacaatagcatgaccccaaagaatgaggtgacatcaggcacctgggcaaagccagaggggaagctatttgggaacaggtggcttcattatgtccctcataatgcaccttatatgatcctatggcccttgttcctagagcaccccgggtttgttttttcctgtgtatagatgattctcagaatggccaaagtggccaggcacggtggctcacycctgagttcccagcactttgggaggccagggcargcagatcacgaggtcaagagatcgaaaccatcctggccaaaatggtgaaaccctgtctgtactaaaaatacaaaaattagctgggtgtggtggtgcacacttgtaatcccagctacttgggaggctgaggcaggagaatcgcttgaacccaggaggcagaggttgcagtgagccgagatcgcgccattgcactccagcctgggcgacagagtcagactctgtctcaaaaaaataaataaaataaaaataaacagaatttggattttttctaaaagagatcaaggatgtgtgcttctagaagctatgtttgtgtaaaatttacgtcaatgcaacactgaatctacagtctataagatacaagcacgtaggagggccctgatggggcttccccacagaggcaggatttgctccagggcagaatgaaaagggcctgcctgcaggtaggatcccctctgggcaagcaacatgccttggctcagaacaaagggtagcatcacctgtcattagattttagtggaataactcaaaattaatgacagaaaaaaagaaagaaaaaagtctggacttctttacaaaatcagtgcagtcacagagagaaggggttataatcaaaactgaactctctgaaggcaggacatctttatcttccacaaggcctaaagtagggcatacaataattgtgcagcaaatattttcgattgacttatgattttttttacccrtagtaatgtattaaggggctgaacccactatccacttatttccttcaactcaatcggggtatagatttggaaaccccacaggagtcccaggagaccaccagggcccgcattgagacccctcttttacagccagggaaactgaggcttggcatgaccttgggtggtctctggacctcagtttgctctctgtgagtccagccttggtgcttggagatgtgtgcatagacctcctgctcctgctctgcagcaccctgggcactctgggcacatcccactgaaagctcttaggggcatgatcatgactatggaggaggctcagatgctatgggaagccctaatttacagatgacaggtgttttggccagaaagtaactccacaggagtggcactgggtgttaccaggttgaccccatctgtacagggatcctttttacaatatccttggcagatggacatccagagagtgtccaagtaacttgctaccaaccaagggggccgagaactcccatggtggttaacgcccaccattgtaggttctttcctaaattcagccagcatctggcttcctggagcttctgctccctgttcctcattcagctctacatcctgtggtttcagagggtgaacacagctcctttgtgacatgacagtccttctctcataactctcatattcataagaggctgaataagccccggttctccaactgttctcagatggcatggatgacagagcctccactctggacatgtttccatctgtgtggatgtccatccctcaggtgtggtctcaccttacacggtatgtggccacacgggcagctctgtcttggggagagctcatcgtatcatgacttgatggagctgggcgggacttcaggcaccatcagttctatctctggcctgcagcaggaacccctgagtggcactcctgataggtgtggcctccacattaccccacactgaggcaaagcatgccttactccttcctaggatatccctgtgccctcctgatgacaaccctgtgactcttattagagctactgtccccttggtttccttccaaacactgggttcaagaccctgtatttgctctcttggaactgtaagcccttggctgaatggcccctccccagcagtagaagtagagagctgtggtgaaggatcagggggccggtggggtaggtgagggcccacggcatgtctggggttaccggtcacctgtgtcaggggcgacacactcgcacttgtaggtagtgatgaagtttggcttgaagtccatattgatagggtagtacttgaaggcaccgatcatcttcttgatggcatcgtagatgaagatgaagctgataagggtggagaagccctcctcggtgaagcgggtgatatatttgatgataaagctggcatctgtggccactaggataaggcactggacagctgagtgtaggccaatccagaggcggaactccatgtagtccaggccattgcctctggaaggcagaggggaggtgaggggcctccagcccagggctcctggctgtgcttgactcctcagactcatccttaagtggcttatctgtcctcctgtggcactgatgccctcccagggactgtgaaagactggggacagggacaattcttgggcagagttgtctgatctttgagatttcatgggggtccagtgttcatctttataagaacttttttttttttttgagaaagagtctctctctgtcacccagtctggagtgcaatggcgtgatcttggctcactgcaacctctgcctccctggttcaagtgattctcctgcctcagcctcctaagtagctgggattacaggcacccgccgccacgcctggctgatttttgtatttttagtagagacggggttttaccatgttggccaggctggtctcaaattcctgacctcaggtgatccgcccgccccagcctcccaaagtgctgggattgcaggtgtgagccaccacgcccggccaaaaaaaaattttttttaaagatcttatggaggaggcaggaaggtgccaagacatctcagtgctcacagttggtaacagacaccagagtgagtgaaaaacagggaattttggaagaacagggttggagcagcccttggaaatggtctggtccaaaccctcatgttgtagaggaggcaactgagcctggagtagtgatgggagctgcctgggtctgggtgtaaccttctgaccttcagcccaagacttcatacactatactgcctatcaagtcaccattgctcacaaactgagtggtgtgaattttctcctcttgtcgtggctggtccctatgggctgtgccaatatgcactaagatgtcttaaaggcaggtagctggcaggagtcaggaggggccacctggtagcccttcccatagttaaagatggctttggcaccaccgcaccaccacctacccttgggacctattcccctgccctagccccagcatactgccccaaatgcgagagcaggcactgggggccaccaagggacacctacttgctgaagtcgaagaggagcttctcaaagatgaggatgggccccgtgctgctgagaatgatgagaggctgtcccgagaagaggcagaacaaggagccagccatggcagtgcccaggaagctctccatcactccctgggggyacaaggaatgtgtggttcagcataggaaggagaagcggtctctccacacaggctgcagccccagcgatctctccacgggcccaggccacagtgtttatccttcgttctgggccctttcctccctaaatcctgttctccatctcctacaccctccacaacttgccaccatggccattgtcactctgtttaattccatctagataaaggtaccatgtgacttccttctggcacccagggcctagaaaacagtggatgtgcttttctctgtgtccattctactcccagaggacagcccatttatccatctgattattcattcatctaaacatctgtttggtgcttttagaggtcagatcattcatttattcaaagtccgctgagtgtctgctgtgtaccaggcattgtgaaaggtattgagaacccatcactgaacaagataacatatcttcattccagtgggagacacaggtaagtaaccaggcaattcccatatagcagggtttctcaacctcggcacaatggacattttgggmtagatgattctttgctgtggagggtctgtcctgtgtattgtagtgtgtttagtagcatccacagcctctacacattagataccagtaggaaccctcctcccagttataacaatgaaaactgtctctagatattgttaaatgtctcctggggtgaaaattgtccctggttgagagccactgccaagaggtgtgctgggataggtttagggtgccacaggagcacgcagtagaggtaaagatgtagtcaggaaggcctccctagaagtagataagtggaagctgagatccaaaaaatgagcagagaattggccaggggaatagggttaagtggagtgataagaaacagtgtcccaggaagagggaatagtgtctaaaaggtctggagctgaaaaacagcatgtacttgaagaaccaaaagatgatcaggattgatggaaaacagaatgtagaatggttggggagggtaggaatgctgagaaagagaatgctgggagatgaggcgtgagagccaggtagggccatgtggtgagggccacatggggcagctgggacttatgagtcaaggataatgcttagtttccggtgtagacagctgggtgaaccacggtatcacctgctgtgctggggaagggcagggagcagcacgtcaggagggaagataagggacgcaatgtcagctgtgtgaactggkggatcctgaggggcagccatggggaatcctgaggggcagccatgtggacatgcccaaaaggcagcttgacaaatgggtcttctccttggggtactgagctttccaatggctctactttgaaggcctccattggagaagacccttgcctaggagattggcaggtgtctgctgagctgttttccccagggaggcctgagttgttgtcatggcaacagcttaccatccttctaaaaatgtcttaactccaaactaagaattcaaggttagtttttaaaaagtgtggggagaaggccacaattagcactccattaattgtgctgattaaattcactccagcatcagtgggaaaagtaccaaataacacagcagatgattccccttaacggtttgacctatttaaataatcattaagtttggtctttagtaatgagatttagcttcagatcttttaatattgtcttattatattattattacttgaagcgtaaaggattacaaatagtgatggcctcaacctggatggtagatgaaaccttggttttgggattacaggatgaagcttcctgctgccaccaggtggcggcagatcttacttttacactcagggcaccggctcgcacacacctgataattgtcggtggcatcccccagaagcccaccaaaggtgatcgcgttggtgatacagccgaggtagatgaataggatggcagagatggactgaatgtggaagccatcatagaagtcacttgggaaccagggcaacttcctcttgatatccagacacaggccaccgaagaacctgctcaagacaggcccaggggctgctttctcaccactaacaccagtgcaggggcagggctatttacaagaacttgcagagtctggggcgaggaaaggaacttgaccagggtggatggggcaaagatctttccaccagaacatttagggccagggatgaattcctgtaggactgagtttgtggttggcaccacccacattgggaagggtggacatagagggttttggagagggaaagtctgatgggaatatgtcctggggtagacctaacattccatggagaatggaagtcctggggtccacagatggtggtcctcctcacatccctgaccatctgcagggtgcctgctcttggtgaacacaggagtgtctaactttcggtgacagaagcatcccagattataacagattcattaagaacagatcctaaaccttataactggttggtatttgtttgttttttgattttgctatctggaacagctgagtggaagattttaggtttggagacactgtttactgggattgctattcccatagcccctaatgcagtccttagcatggagcagagtttctcaacctcagttctgctgatattttggactggatactcctttgctgcaggggctgtcccatgcactgcaggatgtttagcagctacctactagatgcgagtagcatctcccctctccggttgtgacaagcaaaaatgtctctggacattgccaaattccctgggctcgggggtagggggactaaggagggccaaagctgcttacagtgagaaccactggtataaagccaagggcatataaaacatgacttcattctcaaagtcatgatttatatgtagattttcaaggccacatcctttcctaaatctagatcaacctgaatgactccaagagctggaaaagaaacccaggccaggagaactttctcttattttctttaaaaaaaaaaaaagtttttgaataggtaaattaagttttaaaaaaggtactgttattgagttgtgtccccccaaaagatatattaaggtcctaacatctatgtaacacctatgcaaatgtaatccagtttagattaagtcattatggtgggccctattccaacatgactggggtccatacacaaagaggaaagtgctctgtgaagacagacacacaggaggccatgtggtggagaggyagagccgggggtgatgcggctgccagccaggaacaccaaggactgctggccaccaccagaagccaggaggaggccaggaaggattccacctggagcctcagggagcacggtggtcctgccaacacctgctgtggaactcctggcctccagaactgcaggagagtaaccttctgtggttttaagccacctagtttgtggtactttgttacagcagacccaggaaacaggcaccaaaggatatctaagagaaaagtttgggttcctctcctcttgtatgggtctcaaattcccctctcctgaggcaaccttttggggatccatgatggggttcaagggctctgggagggaaagaaggcaggggtgacctcgagtgggcactacagaccatggttgggaaaagtccctagagggcagctgagaagggagaagtctaaaggacagcagggtcactgggaggcctggggtggrcaccttcctgtccagataagttcctccccgatttcatgcatggctggcatctctccatcatccccgctgcttgttccgccggccccgccactgccagccccgccgccactgccaccaccaccaccacctccattgcctcctccaggagctccgccgcctcctcccacagagccattcatctggcccagctctgctagggagaacacagatttcctggaagagaagggggatgaaggagagtgggtcccccagagcacccctcacctctccaaccaaaattatgaaatatcttaaaagacagacaaaaatgcagaaaattgtctaacaatatccacacgcaggtcacctagattttacaaatgttcacatttagccatatttgtttctgatatatcttattatttttaaacttattttaaacattattttgagacagggtcaaactctgttgcccaggctggagtacagtggcatgatcacagctcactgcagccttgacctcctgggctcaatcaatcctcctgcctcagcctccagagtagcagggactataggtgcatgccaccatgcccagttaatttgatttttgttttgtagagacaagatctcactatgttgcccaggctggtttcaaactcctgggctcaagtgatccacctgcctcagcatcccaaagtgttgagattacaggcatgagccactatgctgagcctcagatgtattttaaagagaaataaaatgataccgacagagttgaagcctcctttttctctccctactgcccattctcatacacacctcttgtcagcagagggcaccttcttggggggctcaatccggatatttgggtcccattctccaggaggaaggacgatgacctcatccagaaattcatcaattcctgcgatcagatcttcccgattgcgggctttgtaggccacgtcactgaagagctggcgaggagagaggagggagaaaagaawgatcgggtctgtttctgaaatgcctgggagcatatcacatctagtttttaaaggaatccctttgaaccacatctcccactgccaactcactctcagtttttggaatgagactatagtacattggtaaaatatggcacaatgggacacagcaggcactgggggaagacagcctctcttggatctgaaggccaggtctccatattcttgcttgtaggacttcggttaagttacttaacctttctgttttcagttttccacacatcatacatattagaaaacctttgtagagcccagtccaaggagctcagatatttcacaaccattttttacttccagcccttcgcccttggaggctcaggcygtgttcttcacactgtctccagagtgtgctttctgacttacagattcgatgggactatgctcacatttaaccctttcccatttaggcaaaaaaaaaaagtgcagctcactgccagcactcatttaattttacataracacactctttgaggccgaagcaaatctgactgattttcaatgtgaaaatgcaatataaaaattattcttagaattatttctaaaaagaactaacattggaatcattggaatgatcagaatcatctattttggaaacactggattcatcaaatgaatcttaggccaaaaactgttcgagaatgatgttagcatcactcgtaggaatgctagttttctaggatttgatattttcaatgattgagagttagtgtattttgtaaatggaaatgccacaactaaaaacagaatgctttaagtagaatgatgtcttttgtttccaaagtcaacatataagagcaatgcaaaaataataataaaagtgagacatttcgtggggaaaagttatctcagggtaaagcctgcagccgcaagcaccgccagtgagtattcttggcacaaayggaaaaagagttaaagtcctctaggctccccatcactctggggacagagtgtgactcagctctgcttacaggctctgtgtagtctctggctcacctctccagtattacctcctgcccttgaagctcttacactgagcctatatcaaaccacctccatccagcttctctgagcctgatccatttcctttgtttggaatgcttgcctcacagcctggtgctgggtctaccttcctcctgctcctccttagctttaaagccccctcatctgtgaagccctccttgaccccctgggcagctagcacatggttagttttacaattatcaatctgtccctcacacttgattggttctcctaaaggacaatgactattccctgattctcataatctttagcatcctatgtagtgcctggtacacagtaggtgctcaaatgtgctggctggataagttaatgaatgaaggtgcagtgcttggtgcaggagctgtaaaattcaggagtacaagcttctggttaccacttacatcatctaccatgagggttgcaatggcacggccaatttcattgtaggattttgctctcccagaaggtcccagtagtataaacagaaatctgcaaagaagatggaggaggagacagagaagattaaggaagaggagcatgaaagtgagaaggaaaaacagaagcaagtgaagagaattctctggccctgaacagtatgcattttttttttttttttgagacagggtcttgctccatcacccaggctgcatggagtgcagtggcgcaatcttggctcactgcaacctccacctcctaggctcaagtgatcctcccacctcagcctcctgagtagctgggactacaggcgtgtaccaccaagcccggctaattttttgtattttcagtagatacagggtttcaccatgctgcccaggctggtctccaactcctgggctcgagcaattcacccgccttggcctcccagagtgctgggattagaggaatgagccactgcgctgggcccattcttaacttttttacttccctccatggaaccctatgtttgctttggaggaacatttcctcttcccctcccatgaggctcccccttgagcatcctcacctttgtcttgctgcccaagcttacctgacaacttctctcctagttgttgcctccttctcttttattatttattatttttattttttttctgagacgcagtcttgctctgttgcccaggctggggtgcaatagcatgatctcggctcactgcaacctctgcctcccgggttcaagtgattctcctgcctcagcctcccgagkagctgggattacaggcgcgtaccaccacacctggctaatttttttgtatttttagtagagacggggtttcaccttgttggccaggctggtctcgaactcctgacctcatgatctgcccaccttggcatcccaaagtgctgggattacaggcgtgagccaccgcacctggcctcttttgttattatttttaataaactctaaaactcttccctagtcagaagatttcccttcccagcagcctccacgtttagaggtgcctttgagaacactaacagtcaacagcactgcttgctgactgcactgctgactggctacctgagagtggcgtggggacaggtttcaayggctctcacctggtggggacaggcacctcggtcactcctcccagcatggccgactggatgaggcgcacraacgcgatgaatggctggtctaggaagtccacctcgcccacgagcacgttggacgcttctgagtccttggggatcttcttcatgaatttgtttttccgctggacagggaggggaaacgagatagccaaggagactcccacctgctctcactccctcactccccttcagactgctttgaggcctaacttgaaaaaaattctcccaatgttgccaagagactgaaagaatwaataagtactcctccgattctgcagatggggagactgaatgtaggttaaccccaggcaccattaagccttgtagatgggaaggaactggcaacgactttccttgactaagacattccttgacggatgaaaacggctccactgagatgtgggttgaggggtcagagaagagccccggggttgccggacatcaggcctggatggcctccttcaggctgagcagatgggagtctcagtgcttctacctcagccacccagacctcccctctccaccttcacttttggtagctgtggggaggaggaggcctgttctgatggtcagagtaaacaggccttattttccctttgccaccagcttcctggctcacaggaattcctggaccagtctccaagtctgtgggagacttccatgcccccacattacccccaggggacctcccaaggaaattcatcacttctggaattttccagcagagactatcaaggtggcctctctccartctctctggctagtgtcacttcatgggaggaaggtcacacaggcagagccagtggggtctgatgtgagaggtactggagacaagccctccacccaaatgtattcccactctctgcgtttataacttcctgagtcctcttttatgctgaagataccccagggatggttactttcaagctcttcttagtccttaacgtcttagaatgaattcctttttcagattgctttccctctgggcagcaagggcatggacagacaagagacagagataattttgtcggaagatggaggggagcagttggggtagcggcaggactgggtgcagtccacagtcgctgacacagtgggaaagcgcctgggggtagaggacagctctgaagagagcgcctgtgaacatcacaattttcctaccaatcccccttctactgcagtctttcccgcgggcacaggcctgtttctcacagcctcagtgaagacacagcttccttgtgcctcttcctgtccctgtggaggggtcagctatgggcatggatatggtcaacaggtcctgccattttgtccccacagctgtttcccaattcgactcatgtgggggcatcatacacactgggctgggtggcctaccagcacgaggaggggctcgtgagcaatggcactacccttataatcgtttaaatccaatcagacaaaaaaaaaataaccctccacaaccacctgggcaaccatcagcagccccaaggatcctaacatagtgagaaaaagcaggaattgacaggaacaccggagtccccaagactcaaaaagtccctttgtctcaggcatggtcagctgattactaagcagcgttcttcagggtggagggctgggtgtaacagggcagccaccgtctccgagcatcaggcagggagggggtccagggaaggggaggagatacgggctgggcaggagcaccctggagaaagaggcttcggaagcagcaatgcttcagggtgtcccaacaaacccacttgtttttgttgttgttttgatttgttttgagacaagagtctcactctgtcgtaaaggctggagtgcagtggcaccatcttggctcactgcaacctcctcctcctgggttcaagcagttctcgtgcctgtctggcacatgcctgggactacaggcatgtgccaccacgcccggctaatttttgtatttttgatcgagatagggtttctccatgttggccaggctggtctcaaactcctggcctcratccatcagcctcagcctcccaaactgctggaattacaggtgtgtgccaccacacctggccatccaaccaacccacttgtaatacagaagataagagaaatttaaccagggagttggtccttccttacacgttgtgacatgtttggtaagaaggccagggttgtggcatcccagaaatgggagcatgctagtgttccaaccaaccctggcttgcccaaagcctggatgtgggcttgtataaccagggccctgctgactccacttcctgaacccttggggactccaatctggctctgcactgcagagtcactgcagcacaacgatgctgtctgaatctactctctgttcactgggaatctgccagctgagggcaggcatggagtttagctttgcacaaatcaatgatgaagaaagagcctgcagagcaaatgcctctgggcttgcacctgaagagcacccaatagcagagaccactgatgctgcaaataccgagaagcagcatcaagtatcagcaaggagaaccagatgctggcgctaggtgatgggttccaatccccaaatcaagaaagcactgtctggtgaaagggacagctagtgttattattaccactcacacattcattaaaacaggttataaaaaacttttactaggtaatgctttcttatcacagttgcactgtctgtatgcatgagtaaaagtggttttcctctccaaataatgttccagaatactgactagttcctaaattacttccaarttaagggctctggagttagactgcctaggtcaaatcaaagttctgtctttcagctgtatagactttggtgtgttatttaactgctgtaagcctcagtgttctctcatgagtaaaatgggaatgaaaatagtgcctttgtgattcacagaaaatgcctggcacagtgtagtgcatgtggtgtggagcttaaatattgatkgattttgttactgttgttattaatttatttgtgcccgggacactgacatgaggggctgactttgtttttgccttccaccaaacttaggggtggctggaaggcctggaggtcacccaagctcctgaaggctcctcgccaagtctcaggtttcctttgtcatctttcttcctactcctggggagatagacaaggggaccatggggcctcctgtccttgaggtatgcaggagttggaattaagggggcctcctctgggcttccccaaggggcacagtcacaggattctggggctgtgggccttagaactggacccaatttgtttgcagaattctgatctcatcacgagggtttcagcccagttcatgggagaccacaggaagaagatgcactattggacagtctaattaactaccactgttctcgccacagggagattcttttctgtctctctgccagccccartccctatcccatctttaaaggtgcttgtggatcacaggatagatgaagccatgtgtgctggtcttctctctccaacaaatcccaagctcaaggacagctggcgcctcatttaatcatgttctctgtcccacacccccagggcctgacacagagccagcacctgggactccgtcattccccgactactggcctwggcaaagtcccccaggcagcccagagtccccactggggatcttcctggaactcccactcctttgtaggagtggaactctgcccataggggatccctgctcctgaaaccaaagactttttcctgccctggccctccattgcagctaagtgcaggggttttactacctggtctgtgtttggggtgagagaaatgtcattcatgcttctgctctgggcatgacctaggagaaaaggaaaagaagatccatcaggggaagccaggctcttgcaggtccctttcctatgggccctactcatgtacctctcccatgttcataacmaaagcaaactccctcccccttaatcctgcagtccccttaaactagcatcctctcactttccttctgttcaatggctgctttcctgaaagaggtgttagactccagtttccactgtttccttctccctcctcaatctaccacactctagtctctactcctccaccccaacgtcttggatgtcaccaggctgtctactctgggtgtggctctgcaccaggcccggataggaggagggacacagacgcattattaggtgaggttccatgtgtcacttagcttggaatttgctggagggggagcagtttcacctctgtcctccatgaccggtgagagtcttcaaacaygggctggggatttaggctggcagagggaaggaaggtgggcttcccatgagaacagtgatagccaattatttgaactgcccaatagttccttcctctgttaagagagagaaagccagctctcctctcccactagcccaatctggtggacaccctcagacctatcgtgtctcggctattggcctgtgccactcctggtgtccagaatgctgctcctcttggctctcctcctctcatttctgtcccaggatcctctcctgcttggacatcccagggccttgtctttgctctcatcccctccaggtgcctcagcctctccgctggtcaatcgctcccactcctgttgtttccaacacccatttgggctgaggatgcccaggatggatctttagtctgactcctcttctgagctgcagactccttggagcagtcccctctggcacctcaaatgcaactctttacctgcccccaaatcactttcctcatggacacattccactcaatgcccctccctcccatccaccagccctttagacagaaatctaggagcagccttgggccctccctcttcctcacctcctacttcccaccagtacttcaattccacctctgtcccttcctctccattctggaatgcaggctcagtctctgccttccaatgttgccccttctagattattcctactcagacagaaatccgatcacagcatgctcctgcttcaagcttcccaggggttcccattatcttcagaataaaacccgggttcttttgctgggtgcacaaggccctctttgatttgactctctcttccctttaactcctgcacttcctgtgaactggactaatgtttttattttcatagctccagctccttctcttccatcccccaacctcctatttgttttgtttgtttagaaccccctcttcctcctccttgctcctggaaaacttctatttatgctccaagactcagtcagtgtctcctcctctctgatccttcccctgtgcgctgtgttctgcatgctgggccacctcatggcgggtgcccaccttgaatatgacctggttcacacaaagctgcaatcatccattcgtgcctcttgtcccagtggttcccacccctaagcagtgtcagtagggaggtgacctcatatacaatgataactgagtggaaggtcttcccgaagccactctgtacccactgaacactgccactgggcatccctatgtggcataacaargctggggagactaagaggacttgggtcatcaggacagagagagaagactgcagcaaatgcctgctgtgcccaaggccacaggcaggggctgcattgcccccaagtcactccttgggcctggacaggggtacagcactgggctgaacttgttaacatcttggcattttagtaaaagtacctgaaggaaaatagtccttcactgctttttctttttcacttcactttctaagttcgctcctttctttyccccagctcgcctgtctgtgtatccctgacgaggtgcatgtaaaacctgtctgtcacctctcacctcaaacccacaccccgccccctaccagccattcccagaaaaaaggggccgtgactctgcccacatttcttctccatggtggcatgagactgccacccagtgatgggaatgctgcctgactgaactgaaggaaaggaccttgcctgtttttgattccatttccaggaaagcttttcaccaaaaaacagggttaatgtcagtttgatgaagatgaaggtacagactaagataaaaacacctagaatatgggagtgggtattgattacaccaggatgtgactgacagcctcatttttcagaggaatgacttgaatattatggtagtaaatgaggccctgagagcagcctgggtttagagtgaaagttaggctcctcctgatgcatgccctgagaattcttggcagatcctgggctttgtctcccccacctatggcaatgyggccatgtcacagctgccacagcctgaataaagctgccacagagcggcagagcacacactcacacagacgtccgtaatttgcactctgccgcatccgcaggtcttccgtggagtggtrtagaytcgggccagcaccagggctccgggcaggactgcgatctgggaggagaatcagaagggacttggcttcgacagccttgctggtgtagcgaagcctcttgggttagttcactttaactaaataaaactgggtggcaagacatgtctcttccccttctgggaagaaattctttttttttttttttttttaatttaagcaagtcaatagtctgaacaagattacaggctgggcacgatggctcacgcctgtaatcccagcactttgggaggctgaggtgggtggatgacctgaggtcaggagtttgagaccagcctggccaacatggtgaaaccctgtatctactaaaatacaaaaaatagccaggcatggtggtgggcacctgtaatcccagctacttgggaggctgaggcaggagaatcacttgaatccaggaggcagagtttgcagtgagctgagatcgcgccattgcactccagcctgggtgacagagtgagactccgtctcaaaaaaaaaaaaaagaacaagattagagagaatatctgtactgttgaaagtgagagagatacacagtgcattaaatgggcacaaggtgtagtagactgcttgggttcatccctgattccaccacttaatggctttgtgaccttaggcaagttacttaaactctctgtgcctcaggcgtctcatctgtaaaatggagacaagaaccgtacctacacgccacagcatttttgtgaggatgaagtgagttaaaacaggaagagcactcagaatagtgcccagaatgtagttaagtgctgagtatgtatctgttgctattatggtatgttaaacacttcccgttgttttgggagcgattttttgagacaaggacttgctctgttgcccaggctggagtgcaatggcacgatctctgctcactgcaacctccgtctcctgggttcaagcgatcctcccatctcagcctcctgattagctgggactacaggtgtgtgccaccacacttggctaattttttgtaaggcggggtttatgccatggggtttaagccatgaggtttatgtatttcttgtagagatggggtttatgccatgtcacccaggctggtcgcaaactcctgagctcaagcaatccacccaccttggactctcaaagtgctgggattacaggtgtgggccaccatgtccggcccacttcccatttttaagtaattcatttaaagaggttcctcaatgtttttaatgtagcaactttgctctggttactgtgtttgtctgacaggctcagtagggctagtgtccctgggcatctaggctgggatactgatagtggaatgttggagatttgagatgtgtacatgcaacaagccactctctctaaatggccccaggtcctgctaatcagagtgacatcagccaccagatctacaagccctggcactcttgagataagcccagccccttctaccaccctgatgtgttccattttctgctgaggctcttgacctctctagggggtttgatgtgaaacttttgggtcctttccatagcaagccatctctaccagcatttcccaatgctgtgtgacataagaatctcttggggtgcattctaacttctctttttctaggccataccccagaacaattgactccaactctccaaggtggggcccaggcattaggacacatctcaagccccaaagtgatctgccacatgcagccctggctgggaaccaactctctccctagaaattgttctgctctggtggtgggaacaacacgggagtgtggctggggtccccacaggcctgccagagaaggaggctgagggatccccagaacatcagaatttctccagaaactcccagcccctaaggtgggctcacccgggtaccagggcctgatactggccctgcatgtcccatgcctaccagcgtaaggcctgactcacttgtggtggagactgacttcccaatgtcagctaaggagcggtggatgggcttcttggtttggtggcggtgcctcctcaggaggacgtaactgaccctctcccggagctctggccgcaggagaccatcctcaatctgcttctcaatgacatcatctgtgtggaaaacatacacacctcatccctgtgggacagaacagctccagggtatggaagtcttcagtttcacctgttattagtgggattaaatgtggcagagggggtgtggaagtactcctggctttgccactagctgtggaaaactgggcacatcaccaactcttggcctcctcctgttcaagggcacgtgtgtgtgtgtgtgtgtgtgtgtgtgtgtgtctgctctttctgtcaatgttcttatgaaaagtgaaataaacagtacatatgaaactgccccaggaggcacaaaagtactgtgttcaatggttttagtcctaaaatgaactctttttagaaaagtattttgggcaaaatacttctggcaaaatccaatgtgctagaacaaaactcacaaaaatttttaggggtgttaaggcaagccaactcctcccttcgacacaccactaaatgacagctaatttcctamagatgaatgatgacccattttaccctgaaaagaaacaggttgtcatggcaagaggtatctctgactatgcaagaggccctctccccttttaccacatttctggatggcattttggaggatggtcttttcctctctactggaggtctacatggtactgaaacttggagtgactatgatcctgccctgggagcaacagagtcaaagctggtctctgcagaatcaggtgtcagagacgggccgtcacacagacttgarggcaggcatgaggtcaggggagctgccctggtttgcagggaccacaggagagatgcacacagtggcccctgcctcacctatgatctgtggtaaggagccactgtccaaatccagcagcaccgtccccgtctgcaggcaggtacggagctcgaagaggctgtgcagggatagtgtggacacgtggggcttgctccagcgttcgccgccttcctctaccttttcttcaaactttatccacctggaagggtaaggatggggctcagtgtggccagggccctcaggaggaggcctcacctgggtctccccaaaagaggggtgtcatgtgggttcatgctatgtatgtggttgtggtgttggtcccagactcacaggcagaggatctcttggggatcccctcatttgtcccccactcctcctgatactgtcatgtgaaggaaagtggcatccagagaagtatacaggggcatgagggatcttctgggagtgatgkaaatgttctaaaattggattatggtgacagttgcacaattccatacattttctaaaaatcatttaccagtacacttacaattagagaattttaagttattctagaacaataaagctgtttttttaaaaagcctcaactggaacctgattatctcaggctgttcacacatgagtgttcagtgtggtttgctgggagcaggaaaaatgttccctgacgaaaagtatttctccctgagttcccctgcaaggtctgaggtttccatgcttttcactctttttgcctctgaaagttcaggtaaaaattcacatgccatccagggaaggaaagaaattaaaccaaggatgtgtagggatctgtcctttctagaagacttggaatcatgggctgggtgttcaagtagaaaggcctcagatagtgccaggggagcaaggagtcctggccggagacacctagctcccctttgtaagatgtcaaccacaaatgcatgggtagctccaatctattgcaactgaaatcccaagggaggacttttggaccatgactatctaattctaaagttcctctaaaaaaggtaaatgtaggagaatggtgaggaaagttcaaaaatgaagagaaatggggatggggcatgccttagcacatatagaaacttgcggagaagcttcagtaattaaagcggtgtgattccaggccagatatagacaagggatcagtggcacaagagtccagaaacagacctgtatatccatgggaattcaggttttttgttggtttttttgagacagagtctcccccaggctggagtgcagtggcatgattttggctcactgcagcctcgaccacctgtgctcaggtgatcttcccaactcagcctcccaagtagctgggactacatgcatgcaccatcacgcttggctaatttttgtattttttgtagagatggggtttcatcatgttgcccaggctggtctcgaactcctgggcttaagtgatcagcccaccttggcctcccaaagttctagaatcacagtcgtgagccaccacgcccagtcacggaattaggattttgatgaaggagttgtttaaaagacaaccaacctaaaaatagaaagttaaatccctacttttcaccaaacacaatactaaattcttcatagattaaagtctaaagataaaaataaatctataagcaaaaatgcaaatatactagaagagaatataggagagtattcttatattcttggagaatattgtggagaaagacttcctaaacaaggtataaaaccataaaggaaaaaaatggacagatttgattgcacaaaactaaaataaatgaaaacttctatatagtaaaataacatataaatcaagttcaaagaaaagtaatgtactgagaaaaatatctgcaacaaagaaagcatcaaaatactaatatttataacaatgctcctttgaattaataagaaattaaccaattaactcaaattatccaatagaaagtaaacaatcctgagaagaaatgaagatggccaataaacatatgaaaagatgctcaaccttaccagtaatcatggacttttaaattactacaaatgaaataacattcttcattttttaatactggcaaaagttaaaaagattgacaacttcctgtgtcagtgaaaacatggggaggtggcctctcatctgctgcaggtgtaatgacacagccttcctggtgtgggcagcctgtttcaacattcagtgtgcatgccttttgacccagtggttcgatttctaggaaacgatcacaggaatataattacactgccacaccctgtaatatgtatacaaggacgctcgatgaagctttgtctgttaggccaaagaactggaaaccaccaggttttcagtagaagcatgattacatcaattctgtatgtccatgttgtggaatatcccccagaaataaataaaaaatatgtgggtgaactcacatactgacaggacggacactaccatcccattttataaaaaagaaaaacacacttgtgtgtgtgcacacatgtgtctggagaaagcaaaagttttggagggatccatgtcaaatggttaacaatgattactttgagcagaggagtaggattgttgttggggcgggatttaagactttcactttattggggcgaattagtgtagcaagagtgcagtctggttaggctgggtgaggtggctcacgcctgtgattccagcactttgggaggcccaggtgggtggatcgcctgtgctcaggagtttgagaccagcctgggcaacatggtgaaaccctgactctaccaaaaaacccaaaaaattagctgggcatggtggcacacagctgtggtcccagcttcttgggaggatcacttgagcctggaaggcagaggttgcagtgagccgagatggcaccactgcactccagcctgggtaacagagtgagagtccgtctacattttttttttttttaaaaaagagcacagtctatgaagcaacactattaggttttgaataacagctccatcatttactagctgaaaatctcgagtaagttacttaatctctcatcacctttgatttcttcagtaataataataatgtacagcaattagagcagtgcctagcacacaagatacactctgttaatgttagctattaagttaaaaataaagaatattacttttgtaattttaggaacaataaaaaaagaagaaagcaaagtcattcaaagctcctccaaccaggaggcatcatgctgatgtcttgatggttgatattttggtaactgccattctagatctcctcgtgcatgcatgcacatatgcctgtgtttgcattaactgtacattaatggcaccacaaggaccttaagggtatagtatctaatggacatcctttcatctctattagtattaacatcattctgaagtccttctagtattccactgtctgaatgtaccataattgataggaacagttctcaactggtagacattcagattatttctaattattctttattattaattaaggctggttggaacatccttggttcctgctccacaatttctttaggataaactctcagaagtggaattactgtgtctgcacatttttacatttataacaagcattaccaaactgttttccagaaagcttatgtcagtgcccactgccaccaatgagatcttacatttccctaaagtctcccagactttggtattttcattctttttcacctttgttcatttggtarttgaaaaattatctcacatttgcactcttctgattactagtgagattgaacatcttttccttcatcagatttcctcttcacgtaactgtatattttgcattatctatgtttaacaccttcattccatacatttatttgagayaagttaaccaggcacctggtgggatcctggggaatcagatggacacagaatggggagatctaattagagaaggactgggaggtgaagacctgaaacatgggggctggagccagagaccaggcagacaagttgtagctgacctttttgtggagaaatctgtttgggaaatatcatttaaattatggcagatccaagactatgtgatatcgaaagtaagatgtttctaaaaggtatattaacataagagtttacaaggaatagaccaaaggataagttcaaaatttttttttttttgagacggagtttcactctcatcgcccaggctggagtgcaatggtgcaagcttggctcactgcaacctctgcctccgtggttcaagtgatctcctgtttcagcctcctgagtagctgggattacaggtgcctgccaccaggcccggctgtttgttttttgtttgtttgtttgtttgtttgtttgttttttagtagagacagggtttcattatgttggtcaggctggtctcaaattcctgacctcaggtggtccacccacctccgcctctaaaagtgctgggattacaggcgtgagccaccgcgcccggccagtccaaatgttttagttgagaggatgctcaacttttcttcctgaggatcgacctcctattcagcttgccttttattgttttttttttctcaaaaataatacaaaagataaactgaactgtcaccctgctcccaaagactcttttgctactccatggtcttacccacccacctaaaggtgtgatgtggcccagtgcatggggccagttgagtgggttgctgtcttcactgtctcacaaacatcctaggccagacagtctcaggcagctctctcccctgacatcccattcttcagtcttctgcccatacaaatgcaactccacctgaaggagtgataagagcaawgcttcctctttgaaacatcctctactaactccagatagcagatagcaaagacatgcagtcctctccacctctcaggacttcaactatttgtactgtgttaggcatacaccaaacattaaccccatagacacacagacaagggcgataacccacatgagaatagcctgcataaacactaaattacttgtctccaattttaagccaatgccagaactagactctgctaccagaatccagaaaatttgatttaagaaattccggaatatgagaccatttaactagggacaccgctctagtcccctctataactattttgggaatccagatgttgaaccattaagcttgctacctggaacttaattttgtgttttcaatggctacagctagaaatttagctcactttcaccttgaatggaaaaggaaacatggaggaccaaagatccatagcagtggttttcaaccttggctgtccattagaataacttggagagatttataaaaataccaatgcctggggctgggcgcggtggctcatgcctgtaatcccagcactttgggaggcagaggcaggcggatcacgaggtcaggagatcgagaccatcctggctaacatggtgaaaccctgtctctactaaaaatacaaaaaattagccaggcgtggtggcaggcgcttgtagtcccagctactcaggaggctgaggcaggagaatggcgtgaacccgggaggcggagcttgcagtgagcagagatcatgccactgcactccaacctggatgacagagcgagactccgtctcaaaacaaaacaaaacaaaacaaaaaccaatgcctggatggttaccccaccaggagggtgaccctgccatggaaactcccgggttatctgactgcaccctgtgggttcaggagcccctgctctgtaggtacatagaatggtgtgacttagggatagttcaacttatatggggtcccaacgcaggcaaacgtagctcacatggatctgattctcattatacagcaggacatggcctctttcccttagaatggctccaagaacactagctgaaagggtctcctttctagcacagtcatgctatgctttagtttctctgattttataactgaagtccatttacagtacatattctactacaccagtgtgcctcaaactctaatgtgcatggggatcttgtcaaaatgcagatcctcattgagcaggtctggaatgaggtcaaagattctacatttctaataagctcctaggtgtgctcatgctgctggtctgcagatcacctctgagatcatgtagaatgtcctctttcctctctgttttccactgcccagcgagaatgccccttcctccacaaagcctctgccagttattctgcttatttctcctataacaccctaggatggttctcaacctgaagcactttagaaaccactgttctaggacagtgattcttaagcttgcttgcatataagaataccctagatgcctttaaaatcttcatgtctcagtcatatcctagaccagttgacatcagaataaaaacgggtgggatccaggcaactctgtgctccagactatcctaggtaaagtttctaacttcttaggctcagagcctaaaataattaattaattcaggctcagtgcctaaattaataattaattgtagccaatcatgttttatgattgttttggtatataacaaatgccaaatatacattaagctttttgaagacaggtgccatttcttcctctctggtgtccccttatggtctcctgcccagatcaattgcattaaatgcttgctcccttctgcttgagggtagcaagacctcactgatcactttgggtgagatctcgctatgaggaaatgactggggaaaaaaagcttaaaacycattttgtttaagtatatttaaaaatactcagaagccgggcatggtggctcacacttgtaatcccagcgctctgggaggctgaggtgggaggattgcttgagacctgcctgagaaacaaagcaagactccactatacaaaaaataaaataattagccaggtgtggtggcatatgcctgtagtcccagctactcaggaggctgaggtaggaggattaagtccaggagtttgaggctgcagtgagctgtgatcgcaccactgcaatgaagctkaagtgacagagaaagaccctatctctaaaaagaaagaaagaggccttatcttttagagacataatgaaatatttacagatggaatgatgtggtgtctgggatttgtgtcaacctgacctagcatgtgtgtctgtgtgtctggggtagtaggtgggggacagagaaacaagaattgctatgagttagctgttaactgttgaagctgggtgatgggcaggtgggggttcattctgctatatactacttttgtataaatttgaattttccataataaaatccttaaacattctccagaatgaataaaggaatggcctctgtaaaaagcctctggtcaaagccaagtttaaaaacttgcaaaagcctgataataaggttcatgtgtaatcccaaacaactcattgcaaagtgaactgtgtaccatggttggcttcaaaaagtggggtattagagttggggaagcaggtcaagtggaaagaaaatctccacgttctccttcattatccagcaaagctttaacttttagggattttgcccaagcttgggtgtagacccccaactctgcatgccagggtgggcaccaggtgccccgctcctgactggaatgtagctaaaaggaaccttgaaatgtcacttgtcacagaaagcagctctctgtcacacaaagcagggccagaactgaggccttttctgtgcctagtaactcggtcagagatataattagaggacattgctgttcaattaataacaagagcaggagaaagcatcatggcgctagctaccaggtacagtcaaggcttccaatgctcaaaccacaggatgggagaagaggaggttctccttcaaggaggatctggaaagggctgaaaaccaagagacctctattctagttgtctcctcagatggaaacttcgtaactcccactgatcctgctgggctagagtaagtatcagcagttttcaatggctgcattaggatcatctgggagctttttacaaattctaaaacccaggctgaatctcagactaattacatcagaatctcaggggactgacaatcagacatcaatattttttaaaaggaagacacagatccttgagatgataaaacaacaggctgcccattatgtgtagttagataagagtaaaatctggagaatatacataaacattgtgattgaagagaagcttctatctatactattttgaatatcattataattaaatagtgtcttggttagtttgtttgcaaaatcccccctaggacattctaatttaaaaaatgtaatctcccaatgtatgtaacctttaatgctaaggctatgttgcctccaaacatttgttttaagaattacatttgtgtgaatttgtttctttcatgaagtttactcagctaaaatttgtaaagtatatatccctgtggtcactctatctatgtggcctcaccaactttattctgtaactctcccaccccgccccattacccaaaagcttgacttctgtgtattagttacaaagcatcaagacatgtttgtgctttctgcctaaggcctgtaatacattttgtaactccaacaaattcatttcttaaaagtaagaaatgtaagttttccttcaatatccagcaaagttttttaacttcatatgagtcatatcaggatactgaatttcccaacagatactgaagaccagtattaattcacttagaagcccgttaagaattttcctagagatgtctgaggaatcatcagatactcccctggttcagtctttgacagaggcactaaaaaatgatctgtggaaggaagatttttcaaaaggggaacacctgaggccgggcctggtggctcacgcctataatcccagcactttgggaggccaaggcaggcagatcccttgaggtcaggagttttgagaccagcctggccaacatggcaaaaccctgtctgtactaaaaatacaaagattagccaggcgtggttgtgcatgcctgtaatcccagctactcccagccaagcactatgctaagcacttaacatgtattatctcatctaatccttaaatctatctcacgaggtaggtctgtgactattctcattgtacaggtgaggagactgagacccttagaggatgaggagcctgcccaaggtggctgaggcaggagaatcacttgagcccagcaggcggaagttacagtgagctgagatggtgccactgcactctagcctgggcaacagagcaagactctgtctcaaaaaaacgggagaaacacctaagcaaattctggcccattcttacaatttatttggctaattcatgctacataaaatcacrtgcatgaaaatatgtatgtgagatagtacaacaagttgtttctacaacggattatgactttgcataccatgtatatgttaataaaccaaacttggcagtaaatttgaaagattataaagtataaaagactgagggggcaggcatgggtcaagggtcagcacacatatggagaagttcagaagctaccagaaggggctgatgagcaccagaaaggcctcacaggcctcttggggcacccaccccggtccaggctcagaaattttatctttttagtgtcccaaagatgattaggtccagtgacactgtctaatgctaaccaagatcacaaaggctgatgcataaacctgaaggccaatttatttaatttacagtgagatttacaatcgttataggggtttgttatgttcatcctctagcctttgcattctctcctyatgggcagatatacagggtaagccaaattatcaccaaaaagttgctgaatatagaatcagaatgagttaatcattagttaagtgattccagtgtttaatagacttaggatgatctttcatctctactcatgagatatgtctaggactaggatcagattgatagggccttctgtcttagattgttctgcaatgaaccccacttcctcccatggctgactgattccctttgaatgaaagtctttccttttggtggcctaggaacctccgctgagggcctttggtgatgcagtacagtttgggcattacaggagaaacactccttcccagacagtgatgaactgcagtggcacagctggtggtgatggggcagaggtgtggcattcgagggagctgtggtgaatggaatgggggtggcctctgctcccaagctcatgcatttggtgaagggtccatcctcctgcacaccatgtcctcattcagggttgaaggagagcccacagctaagtgaatgtcatcagacaaagttactgaaaaattctgaatgggctccttcaaggagaggcttctggaaccaaaacctctctgagggccacttgtctgtgtatccaggaagtccctgtaattgccccatgggactgtcatctacgcagtggtctgcctccctcagagtctgctggtacctcccttcactgcctctcaggagaggccctctcctcacctaggcactctcttccacctctgctattctgggccaagttcaaaagtcacctctccttcccagttgggaagacaatgccttcccaagggccaaggttgaggagacctctctttcctctaactcgcatcacactttttatcatttatcacataacacttcctaatcacgacaacagctaaagcttactgagggctttctatgtgccaggcactatgctaagcacttaacaggtattatctcatttaatccttaaatctgtctcatgaggtaggtctgtgactatttcattgtacaggtgaggagactgagacccttagaggatgaggagcctgcccaaggtcatgcagctyataagagacagggtttgaaggcatgtctttagattctagagcctgttctcaccactttgcacataccaccctgggttttagttagctgtgtgtatgagcacatgcctgctttataccagattggggttgaaatatcatgtctcatgggctccaagcaccccacagcctgtttttgtayggccagctagctaagcatgktttttatatatttaaagcattgtaaagaaggagaaagagtaggcagaagagagaaaggagaggagaaggagagaaaaagagaagaggagcggggagaggaggggaaataaaaggacaggggaagagatcatctgtgcacaaaaagcctaaaatattttctgtctggccattaactgaacatgtttgctgatacctgtactagatcataagctctttaagaacagattcatattttactcattttaattctcccacaggacctaacacaacatcccctcaactatttttggaatgaaagaagaaaggtgtggataaaacaacctctccaaagctctcctagactcagaagttagagcttccacctttccgctgctctagggattgatgtagtgctgcagttacatcagcagatctccatggacagagatggggtgtggtctctctctccttcaagaggaagatgagtttgagtttgtaaaattgcaccacctatactctcataggcaacttgaagaattctgaaagttctggttggtattagaggcagaactgtggccaaaggattgcttacgttaagtgtatatcttcattactacaggtatgaaagacatatttggggtgtctgctctccctgtcttccatggggatgtgctctctaggatatagcgagtcctccccatacctcctacctctgatctgggtcccagtgatagggcaatcaaagttggacagatcagattctccatgaagaatttggaatcgctgtgggatggtcccttgagtagggtggatgtgaacatggaagctgaggattggccaaaggcagggacaagcagaagaagctggttgcagaagagtaaagaagatgccctgagagaagcagagaccagaagcagagagaaagaggacaggccagcttcccagacccagcccttgagagatcatgcccctggggactatgaagtcatcccagtgtcccagtgatgctccctccatttgtatgagttagcctgagtgggcttctgttacttgtagccccaaacctcctgacgatgacagtggcatttctctccccttgggcatcgcaaacagtccccaacagctcactcaagattaggctgtgggagccagagatggagatgctgggtggggggctcttgactctcgtgtaaagtactgctgccggccaggagcagtggctcacgcctgtaatcccagcactttgggaggctgaggcgggtggatcacctgaggccaggagtttgagaacagcctggcaacatggtgagactctatctctactaaaaacgcaaaaactagtcaggcatggtggtgggcgcctgtaatcccagctactcgggaggctgaggcaggagaatcgcttgaacccaggaggcgtaggttgcagtgagctgatattgtgccactgcactccagcatgggtgacagggcgagactccgtctcagagactgaaaaataaaaaaaaaaataaagtactgttgccaaagggcttttaggcaggactcttcctttggcatctctggagtctgatggctgtgatcctaacaagacaggagatataaccaccaaaatcaatgtgtagatcttgttttgattctaagttgtataaaccaacagaaatatgatatttttgagacagtaagagaaactgaatctagactagataaccaattatagtaaggaatttttctcaattttattaggaaatataacggcattgtgtttacaatgaagtctaattcacaaagatgtgtactgaaatgtttacaacattcaggattgcctttaaaataccccagcaaaagcaaacaacaaaaaaaaaatccccaaaagcaaacaaaaaaagtggtggagatagataaatatgaaactttgatgaagctgggtgatggggaccattctctctactttttgtgtttgaaatttttcataataaaaagtttaaatatatatttggatatataaaaatatacatgaataggtaaatcaagtaggggttttgacatgaaggtggtctgatggtggggttattccccttctgacagctgcaactgagtgagctatccagggatgactttggttgggggaggtgtttgctcctgcagaccagctccaagggttctgaggagctgccagccagttgtgccctatctgggaagagcttcctgagtgctccagtccctcccatctctcctcacttaattagccttccaatctcactcactggccaactaatctgattgtactatcctgggtcaaccgcgtgatggccttgtgtcactgcctggctgtccccatgggtgtggacttgtgcttcccctgtctgattgcaggactttgaaggtctcttttgcagctccaccctggaataactgtaagttatcctaagtccctgagggatgaaagcccctagcatagccctcattctgtgttacactgccagctgtgagagcactggatggaacccagggcctctgagacttcagggaaccttttacctggggcttgatccaggttctgattcatataaaaatccctttttcctacttcaccaacataagcctcaagtgtcagtgttggactagcatagagagagggaaggaccaagttagatactggacataaaagcagctggataatgacaaagagtataattattcagaacactagatcagcagaaggtggaagtcaaacaaccttaaaaatcttcatctgaccataaatctccatgtgtgactccactgcaataaaacaagagagcgatggctgctagcctgcagctgcttacctggctcatgtataccagccatctgcagctcctacagtcgcttttccaccccacctgtctcctcaaaccacagaccggcctggaattccctcaactccctgctaggagcccctccacctgtgcccagggccgccttgctccatccagcagcctccctcagcttcttttccctttaaatgactctcttttccctggacacttcttgtaagcctacgatgtgctcagacttcgctgaccctcaaaaacaaaaggatctcccttggcccatgttctccttaagaggcttccttcactcctgcccttcatggacaagcatcttggaagaactgtcaggtgaacccagctttttacttttaactcttctcaacttactgccctctggcttctgccctacccctcctcagactgcgggagtaggtccatcctgcggatgcgcttcagttcttgcggtacttcttatcccctcccttcatcttgaatgtctctcagcccttgatttccaggacaaagccctccttccattcccctcctaacctcctggttgccccttctcagtctctttcgtgggttcctcttcctctgcccatcctgcaaatactgaagttcctaggggctctgttytgggctctcttctcacttcacagacctcaggggcaaccttatccttttctgtgggcttgatttccacctagatgctgatgcctcacaaatttatgcttctctactgaactccagacacggtggccacatgatgacccctggacatctccacttggagtttcctcaaatagaacctgtccaaaatggaactcattatcaactgcccccaaaacaaaatttaaaaatatccaatgtaataaaactttactactacatttgtgttttctaagctgctaccatgaggtactcactagctcaggttggaattctgggtgtctccctgactatctgtccccacgtgccatctgttatcaagtcttgtcaattgtaccttttaaattttgtctcaatctaccccttctctctatccctactgccagcatctctcccttggaccagcctcttaactagccaagtcttgcccccttttatccattctccacactaaagtgagatgaactctcttaaggatatgcacgattctgtccttttcccacctagaacccttctgtggtcctctgaagctctcagcaccaagttccaacactgcaacatggctggcatagaatctgcatcatcagccctgccattccctgcctcctattctacagtccagccacaggaaacctgtgccttttcctctatgtgtctgtttgccctattccagaggcctcttcccccttccctaccctctcctggctaactctgacccatccttcaggtctcawtgtgaacatctcttcctcctagaagccttccttgacccctcctgcctggattagatgcccctatgctctgctttcacagtgcccccattaccaaatgcccccttatttgcctcagtgtccaattagactgagagcccaagagagcaggggcagcatctgccatrttccatttttatatctctagcaggctcagggcttgcagataataaatattagttgatgaatgaaccaagtttgttgatttctgcactgggagctcagcatcctactctccttcaaactgagtgggcagctctggctccactggaaggttgattccagatgggtggtgagaccagagggctggggatgcctactgccccatactaagatgggaaatgatgttaagagggcattatacaggattttttttttttttttgagacagagtttcactcttgttgcccaggctggagtgcaatggcacgatctyggctccctgcaacctccgcctcccaggttcaagcaattctcctgcctcagcctcctgagtagctggkattacaggcacccaccaccatgcctggttaatttttttgtatttttagtagagatggggtttcactatattggccaggctggtcttgaactcctgacctcaggtgatccacctgcttcagcctcccaaagtgctgggattacaggcatgagccactgtgcctggactatacaggatcttaatgagggtgatttcagggttgaaacagatagttcagctttctccatcctgtatggagtgagagcatccctgcctatgtgcatagaaccattcagggcttttgaaaacatactgatctggtttgacccaacaactgacccacttctcctgcccttcccggtcactgcaggaacattctcagagcatgtgtctcataagaatcttctggcaggttcgtgtttatggtctgctctgagttgagaccagaagcagcttggatttggaatttgctttcacagctcttgggaggcgctaagctctggttatttctgagtaaccccaaagggccctccacacttgggtgggttccaacccaggtcattctccttcccagcccctccacttgcagtcaggcagaggtgggcatgagagaggatagaattctgggtaaatagtttgctcacagtcaggtggtcgcccccacccaatctgatccagccctcccttcaggcaaggtcattatcagcaaacagccagctgcatttccctcatgggaatgctagagacagagttaataaaaatctatcttattaacagcctgacctaccagcattgatcacattagaaatgacgctgcacacacagtccccattatgtgcatggtgctaggctcagcagagctcaaaaagccatttaaatccctccaggagtgactcctccaagggcctgaaacatcccccaaactaataactcccgacaaagcactgccagggaaaattccttgcggatttgagattttcactctgttaatctcctaactcaataaagcaaacactccctgcagcaaattaaatacttttattaaagcgtcccctccccgattctctttgacatgggcattgtggaccataaccgtcttggagcctgagtgtctgtgtgaggggctgtcccctactccctatcattttctcctgttactctaagaaggcccagaacccattatgatttactgattcttagattctcaaaacatctgagatctctagcttccctgagtggctccactggcctgtcaactgaagaaactgctatttttttgtgggggtgacaagcctcaaacagctctgacccaagcacctctaaccttgtagtttgcctggaggagggcccagcaaaactgttcaggcccatggtgggcttcttggctgatggtcaaacccttcttctgacttcactaggggcttgctggtcataccttggagagttatctggaaaccagatggggttagctgtagagagtagaaaagggtggagcagaagtcgagaaagctactctcttcccacattttcctgtccgcaagctggccttcaagctactcctctttgggatctgcctagaattgggttcgaccactttaacttctagtcattgctttcttctcactgctggttggagccaggttatcctgaggtcctgatggcctttcttccaggacctcctcagatgccatcttcagaaagcctgctttgcagggaaacctaccactttgcagatggtaactgccagacccctttatgttttaggagaagcccccttctagaaacatcctcatctacagtttcttggttccttcactgggtctggagtgcagagggctttgtgaatccacactctgagagaatagagacagtgtggtttgcctttggtgatagtcaggtctctgggggccataaggccttcttggcaagggctccacgggtgtgtgtgataggccctcgtggagggtctggtcctggcaaccatggctagggcttctggatgcagaccctgtccagggtgtggagaaggcaccttccccttcctgggcctctgagaaggccctgcccagatttcctcctctctatttgctcactctgggcaggagaggccctcgttcagggcgggcagtggcttcaggccctggcccctcagaggtgttaagacataataacccagggtgggtcctggtcatttgaaatgtcccccttccctgtcratcttggataggcatcctgggctctgcagctctccccatgtatctctgaccccaacagaattgcttccagacctatgttcttccctggaagtcaaaacagtcactggaagttagagacagaaagagaaagggctgagaaaatgaggaaaggaagacaaagtccattatccctcaagtgggaagtcagacaggcctggactggaatccatattcagccacctacatgctctgacccctggtgagctacttgctccccttcacctcagtttcctatctataaaatagggataatgaaaattccacccactcagggtcactgtgcaacttgcaggagacaagccgtgaatcgatcagcaccgtaagtgttcaaagaacggcatcataggaagagattcaatggcttccacacagggaccgggcccagatgtggagctggggatttgttcctctctgaggcccgcagggacttatttactagtacacccagtggcttttcttccagatacatggtacgtggagtggggaaaacctgggggtgtccaaacctgtgccttctggctctgcacagcaactacccaggctagtgagggagatgagcgagggaagagcccaggccatggttgggggcagctgtcaggctctgggtgtcacagtggcccccatgcagagacagacctgggcacggttgagtctatgcactctcaacttgggcataattgcccccaagggggcaaaaactgtttcttcgaggartgaaaatattttagatattacaatggtttgtggtactctagagctacactcgacctgacaaatcttattcctttttttttttttttttgagacagagtctcactctgttgtccaggttggagtgtaatggcacaatcatggctcactgcagcctcaacttcccctggctcaggtgatctcccacctcatcttttcaagtagctgagactacaggtgtgtgccaccacgcctagctaattttctatttttatttttatttttgtagagacgaggtcttcctatgttgtccaggctggtcttgaactcctgggctcaagcaatctgcctgtcttggcctctcaaaatgttggcattacaggcatgagccactgtgcctagcccttattccttatttctttttttttttttttttttttttttgagacggagtctcgctctgtcgcccaggtcggactgcggactgcagtggcgcaatctcggctcactgcaagctccgcttcccgggttcacgccattctcctgcctcagcctcccgagtagctgggactacaggcgcccgccaccgcgcccggctaattttttttttgtatttttagtagagacggggtttcaccttgttagccaggatggtctcgatctcctgacctcatgatccacccgcctcggcctcccaaagtgctgggattacaggcgtgagccaccgcgcccggcctattccttatttctaatgaaagaaattaaatattaatttaataaagttgatttaaatcaaattaaattcttctcctgggggcagagtggcatcatgtaaagaaggtggagaaatatcggcagtctgtcttcctgtccgaaggtccctcccgctgcctcttaccatagccttccttccccttgggctcttgggagcattgggcactgctgaacagtccagttaagtcccaaggcccctttgtcacaggcactggggatatgagcagtgccaaccattcttaccctgcccctcccttggctcctgcgacttctccgtgcggctcccctccagtttctgctctccgtatatatggagtgctctctgctccacacgcttttctccatggctccaactctgcagccccaaactctgccagatagccctctccatctggatttttcccaccattcagacttgatgtgcctggcacaccttctccttcctccaagaagccctcgctgtctaccccagcctgcttgttactttcccttttacagcatttaccttgaaccattttatattaaagaacatcctgggtaaaaaagtgagaccttatcactacaaaaaataaaaataattagctggatgcagtggcatgtgactgaagtaccagctacttgggaggctgaagcgggaggatcacttgagcccaggagtttgagcctgcgtgcagtaagctatgattaccctactgcactgaagcctgggcgacataatgagaccctgtctctggaaaaacaacaacaacgagaagaatgcagttgacccctgaacaacatggattttgaactgcatgggcccacttacacaggttttcttcaaccaaatggggtcaaaaatacagtattcatgggatgcaaaacctgcatatatgggccattgtttcatataggtagttccacagggccaactgggagacttgaatatatgcggattttgccatcagcaggcrgtcctggaaccagtgccctatggatatggagggacaatggtatatgcccttgtattactctcagagtttcatggatgactgttctatcttcccacttgaactttaatttatttgaggatgaagaggaattcataaggttctgtttgctccttagttctggacaccaaggaaggcagctgggagggtctttgtggaccaggaarctctcaargtacaaggtgccacttcccaccaggagggtcaggcaagcccaggctgtgtgagactgaagtgcccacctccctcgtggggcccygcctcacctggctgactccttccactccatctggtctccgtcatgctgcagagtatccatctctgtaaagagggtggggttgggagcctcatcttcctcccccaggatgtcctggagctgctcagcagctggggaccctgcaaaagaggggcagcaggtctgctgagtgtcccatggaaggcaggaggaccacaaggccaacagaaatggagtaggaggcaagcacaagggaaaagtattttctaattctgtaaaactaagtccagctcctgggtgatgctggcctcctgtaaccatgaatcagaggtgggcgagatactctttaagataaaagagatgaaaagatttagtctgcattcagatccagggtcttgcagctggcagtgaagaatgatgggaaatggtcgaagccagggcagtagcaagaaccagaactgaagagagaagtgagaagcactctgacccaacttcagcttaccacccgagggggttcttcttcccaccgggccccaagcaagccatcctccaacactggtcttgaaaaggcagtcagccatgcaaaaggacagcttgcacacccttgtaccatgtgggcccactttcttcctgggcaagatggcagtccatttcctgaggccccagcctgctttccagctgcccattggaagtcacttcctgggtgtctcccaggcacctcaaaactcgacattcctctcccaaacacacttcacctgtgttctttctctctttttctttcttttccttccttccttacttttcttcatctctctctctctccagtgaatacctactatgtgccaaataaagctatgaagaagacctatgtgtccttgctctcttgagcatgtcctctagtgatagagacagagaataaacaagtcaacaaatccataaatgaccatttcaatcataagttgtctaaaataaacaaaatgaccaggggagctacagtagatagcatggtcacaaaaggactctctgaggaggggacactggagctgtgacttgaaaaatgagaacgagccactctgcagatctggaggaagagtgctctgcatgttccagacaccctgtggtggaaacgtgctggtgagtgtggttcagcacgtgagcaagggacagagagatggcatgatgtcaaagtggtgaccaatgccatgactaaaggcatccctgcccaccccactgcacaggctagacaccctggagtcatcattacctcacctcccttcccctcatcttcacactcatattgaaattttcaggaaccccactgccctgccccgacgcaatctctcgttcactgtctcctgggcctcatcaggtcttcccttcctccagcctgtttcctcagttcatcattcccttctgtcctcacttatttcttcatggacctctactcttttcttcatcacatcctccattctttccccttgacttcccaatcaaaccagccaggcaatgcccaaacaagaattcactggcccagtctcctctgcaggtgtgtctgagggcttgggctgggggatggctggggtggggatggcagcacggagtggtagtgtggtggaatcaaatagaatcccaatccagctagacaagggtgtgagtctcggggctgccacttattcacaagcgaactcagttgagtgagcaggactgctgggaggaatacaacaggtaagagaatgaaatgcctgacacagggcttggaaggtaacagctgcttagcccctcaccaccaacacccacayccaggcccatgagccccactgtaagggtttcccctcagcaagtctcaagtgcggcatccttccatgcatccttgtcagcgccctcactgtgtccctcaaggctgtccctaacctttgctcctctcttcaagcttcttgattcaactcctaccccacttcaccaagagaataaaggcctccaggcatgaaatccatcaacatcctttcttccatcccctcaactctttcagatccttatttcatcagctagtctttcttcacctggatcttcaacttccctctctccaccctctttctctcagcctagaaacagctcttcctacccaagacaggttccctgaccctgcctgtctccttagctctcctgcttgccttcttctttcttttacccatacttcctaaagtagtggtctgtgctcatggtctccatctcctccttgcccaatcagttcccggcctgctgccactggctcagcccccaccacgctaargacattgacaaaggcagaggtttcaaactgacagttcaaaggtgtgtttaattcaggcctcgcagagtatgaaattttttgaaagtattgctaagataaagaattgtaagatttcatatagaaatccagatctctgacttttcttgaaaagtcagatgttctgatcactgtgcccacgttcctgcttggcaacaatccatgagagttgatgatggtgccttcttaggtaaacatatgctttttagtttgccacagtccccactacttcttactggtgtcccgttaatctcacttattgccatgcacccaaattcacaacccctgccctcagatccctcttgttattttaattgtcaaaccaataagctaataaaatcaatcaaaccaacagcactgagaagctatggtctggcttatctctctggaacttcagaggtgatcatcgccgctctgaactgaaatgtgacttatggctcttataacgtggcagtttcttgatattttccctctttgaagattctctctcaatatctttccctagttcctcttgcctggctaacacttaaatcttgatcttgcccaggattctgcttcatcttgttctctcttctctctccacactccttctgggctagctcacgttatttgtggtgtcattttataaatgaggtcacccttgtgtccaggcaatacacccatgtgtattgaacattccaactgacaattggactgctccttytggaagctcggcagccttctcaagtcaacctcaacatattcaaaacagctctgcatcccttctcccatcaacccagccctgctctcctctgtttttattaatagcacctctagccacctacccatctagacaatgctggactcattcctgaagctccttctttttcacaattcatgtccaactggacactaatgtctttcatttgcttcataaacattttttggctctctccttttttccccacccattgccaccatcttggttctggctctcatcatctgctcctatcactgcaatagccacctactgttgccattgcctctggttgtcccatttaatcccattccctatgtagcagtagagtgtgcttttaaaacatttcaaacatgttcacacaatgggctcctgggagtcatggttctctttgaatagcaccataaaacactatacatatgagttagaaatcattttactagcagaacacactattatctacagaactcatggactcatgtatttaaatgaattttaaatttctcaatttttctattactttttttttttgagacagagtctcactcttttgcttaggctggagtgcagtggcacaatcttggctcactgcaacctccaccacctgggttcaagtgatcctcccacttcagcctccagagcagctgggagtactagctcatgtcaccatgcctggctaatttttgtattttctgtagagacgaggtttcaccatgttgcccaggctggtctcgaactcctgagctcaagaaatccacctgcttcagcctcctaaagtgccaggattaaaggtatgagccactggacccagcctattacttttaacttacatcctttccattgtcttattgattgctggcgcttgctagcagacaccaaatgtttaaagaaattttatagacaaaaaaccaacaattgagaaaataaccttattttttcttaaaattgagaaaactgtgactgcttgattctgaggggccataccaattctccctggsatcagaaatcagtaactactcttttaaaatgtagatttgatgtaccttggaggatggcatgaaaaagaaaataaaatataaaataaaataaaatgtagatttgattatgttattcaccagttgaaaaactttcaatgtctctctattgcctaaagcctaggggtcagtgacatggctcaaaccacccctcataatatagccctaacctgcctttctaggttctagcatgtccctcacccagccaccccgaccccagccacagcagaccacatccctgaagaggagggcatgctactccttgggcccctgtgcctgccattccmtaagtctggaatcccctttccccttcaaggccagacaagaaggcaaataaatggacaggtcctggagagaggagacaggcagagagcaggatgcaaaccagttctgcctggggcattacctgctccctggaacagctgagcgctggggtccctggctgtcgatgctgcctctggccccagcctgcttccgctgctgcctccctggctgctacttccacaggtcctcttcttcacacaacaaactcacttttgtttccagttaagcaccaggggaggtgtggggagagaagaaggggggtttgaggggagaaaaagagagagagaaaaggaatgtgtgaaggactggggaggtggagagagaggctatatgtagagagaatataggtgtggtaagtgtaagtgtgagaaagattatgcaaaagtgtttgagagagaaaagctacactgagttaattaaagatctgagagagagagagacagagagagagacagagaagtgagagagagagagagagagagagagagaagtgagcaagagagagagagaagtgagagggtgagagagaaatctcaggtgcactagagagagaaaggctcagtggctgcwgcagaacctcaagcaggaagccgggtctccacagcagcaggggtggtggcagctgaggacctgtgagaggactggcaaaactgcccctttacccccttccccatgagtgcttcctatgtgcctgtggtctctaggagagcccaggatcctctctgcaggcccctttataaaggcaggggtaggatgtgctgtgagattccccagggcctccttaggagccttggtggcaggtgagctggctggagaggaacctagcagggcccttcctctccaccacacagccccaaaggtggagtggggttgctggaggggagtgtttgctgtggggtctcacactgaccaagcagtgctcgataatgtgctatgtagctggtttctttcctccccaactttaaacccaaactcctgatacacttcctgttcctccacctctcaggcaaagtgccaagtgtcaccactcggcaggtgttttctgagagcccacggacagtggaagctcgtcacttcagagtgtgaggtaaactccactggggaattattttgctcttctgagaaactcctaatctcctgggtttggtttaacaagtgcttactgagtacttagaatgtgccaaggttgattggaggtcactgagtggtggctgctccagggagttacaaaccctgaattcactaagtcttagagctgggagggagcttagtgatggtcaagtccaaacccttcatttcacggatgagaaaaccaagacccagtttaccccataggccccctaggccccaacacaggttagcagagcctgggggagaacagacatctgacattctccccctacactgccccattgaggctggctccactggtgacattttcatacctgaggctcgaggatcaagtacgcccattttattattttatttttagagacagggtcttgctatgttttgcaaggctggttttgaactcctgtgctcagacaatccttccgcctcagcctcccatagtgttgggattacaggtgtgagccatcacacgtggccacaagtatgcccgttttaaagctgagaaaacagaagcagaggacaccaggccctgcctgagggtcccaggctctgcagcttccactgcactgtggctgaggttgacccagctccttctgagtggccacagcaggccacaccaagtcaggccctgtgggtggcctcaatacccaaaaaaagatggccaaggatcccaaaaagaccctctttattcatgtggtgttttaagagcccagacctgggctcaactccagactctgctattactagcagtaggatcctggcaagacatcaagctcccactgagccttagtttcctcatctatgaagcggtaataatcacgcccccctcactggactgtggcagggattcaatgagataatacatgtaatgtgactggctggcacagcactcgtgtacaccagtcactcaataggtgatattgctattattgttgatgccagcaggtgagatgcttcctctgttactaccagttaccagcctgttccctctaaacattccaagggcccaatccttctcagcttctagactccatgctcctcccatgctacctctggccctccatcccaggcccctacgctgtctctgcccctcccttctgcccacagaaggtttagctcaccacatgctgggccactgggtcagggtttctctaatgccctgcggatcccacatgtgtgcagcacgtcagaagttaatccacataatgagaaatgccacaggtaatagcccctctgttctatagctaacagcaagagtcacaaagtgccagcccaactataggaatggattctaacagcagttgctgggagaaacataacctccatggggaccgcttcaggaggcacactaaagccacacaaagaatcatgcttttactgggtggggactgacttagcacaaaatgatctagtggcctgcaaactagcaagcagtgtggacttcaactcttagtaaagatctgggagccattatggccatctggaagtcaacatcaggacacgatcctggggtcctcagctctgggcaagtcctttcagacattctctctctcatcggctccctgatgggtggctacacggtcagctttgtgaggtcagggcctatcttgttcacatcgcactgctggcccctgacatgggttcacacagcatgtgtactcaatgcatatttgctgggtgaatggatttgactgcctgacactcgggagtatatttgctgaggctggcctcagcaagagaggagccaagaacaaggaaatggagctgagggtgaagcagagggggcagggatggggggattcgggtgactccaggccactgactattggggactgggagagggaacccaaaggagccaaaaccattcttgccarctgtgtgaagtaggtcttggaggccctgagtcctagtttcatgggcaataacattctttttctagaaggctgtatacaaactccaagtgtgccctctgagagaggaagaggagagaatctgctgacttgctgtgttcacgggaatccttcctggggtgggtggctttggaatgtctgcccagcccatgtcccctcctcccataaggatgaccctgggcagctgtatttgtgtgacatgtgacctgtgctcctggccacaatgaattggagcaggaatggttcattggacacctgtcccaagcctgtgaattttgaattgggtctctgagttagctgggcctttcctgatggtttctgggagacagagctggtaaatggaagaggcagaaagggctgggctgcaaagagaggaagcagcctagaggcraagctgtgggaaagggctgtgtacacccagagagggggctgagaaggcactgcgctcacccacttgagcccggctcttcgttttgctttgggactgtgagaaactcctttgttcttgtaatataaacaatctctccccacaccccttctctctctgcttccccaagccagttcaaataggtttctggcattgtgataaaattaccttcttaatcatgagtcccctttgtatgaaattctagagtgtggagatttttttctgagtaccttcttgaaaaccataagtgtaaaggttataaaagaatgttgagtcactgtcataagaatagttagattaagcctagtcatgtgaaaagtaaaagagcggggagtaaaaaaaggcagggcaggcctaaagaaagaaagagaggcaaaggaaacactccgtgaccttggataagggaggaagctcagctgggtcagaggggctggcagagcctggcatgtgcatggccagccccccaaaagtgcttgtggatggagccaaggctggagaaggcctaagtatgttgggggtcaggggagactcagtcaaggctagctgagaaattcaggtaagagatccctccgtctttcccatctgagtyccctacgccactctggacctaccaggcctgggaagggcaacaacctcagtgtgaaatcagaaaggycccgagcattataagacccaacagcaaaaagagaacaacgacatccatctcattggcgcacaagggaaggagaatcagacgtttctggaaaaccaaaagggtaaaaggcaattattactcatgatttaagatttaaaaatgtcaccaagagtcttcaatttgcatgttgtccttattgttctgttttggtagatataaatgcagtataatgaagaagctgtcatttaaaatcaaactgaacagttgctctgctttttccttccaagccaagaggggtatggagcctaatgatatcagtaggaagttgaatcttgatcccgcttctttcatctgacagaggccagtggggacggagaaaggagagaagaaaatttaaaggcctctcagttttttggattttttttttttttttgagacacagtcttgctctgtcgcccagtgtactgacgcaatctcagctaactacaacctccgcctccagtgttcaagcaattcttgtgcctcagcctcctgagtacctgggattacaggtgtctgccaccacgcccggctaatttttatatttttagtagaaactgggttcgccatgttggccagactggtctcaaactcctggcctcaagtgatccgcctgcctcagcctctcgaagtgctgggattacaggtgtgagccaccatgcctggccctctttcagttcttttatgctgcataagcgctagactgatagatggtctttgtgtttagttcaacacattatgagtccagttgggtgaaaatgggctctgagctaaggtgagagagaccgaggtaaatcatatgacaggtaaagtgagtggagtgagtgtgtgtgtgttggagagggggcgctgaggagagggggctcagaaaccgagaagcaaggagatacgaggagactcaggagggcagtgatggggggtgggagttgccaaaaatatggtaggaaggtgaaactacagaggaaggtggccaaggggaaaccttcagtggccagaggatttttaagaacagggatatctaatatctcattttaaaaattgagtatctcggccaggtgcagtggctcatgcctataattccaggactttgggaggccgaagtgggtggatcatttgaggtcaggagttcaagaccagcctggccaacatggtgaaaccccgcctctgataaaaatacaaaaattagccaggtgtggtggcgggtgcctgtagtcccagctactcgggaggcagaggcaagagaattgcttgaatctgggaggcagaggttgcagtgagcagagatcataccactgcactccagcctgggcaatagagggagactccttctcaaaaacaaaaaacacaaaacaaaacaaaaaagaaaaagaaaaaattgagtatctctacaaagtaaaccccctccatggttctgaaccttcaacaaagcctgctgctcacctatgtgccttaaacgaccaattttgaggaaaccacagcagggcagaactccatacctgggctttcctggaggtgaaagcagagaacagatgccaaaggtgaagcactgtgagactgagtccaccaagcagggacttggagccagggcaacgctgagactagaagcctttggaaattcacagacatttaagcaaaggtgtgggcctattctagaatgtggcgaggaggctggagtctattttagttaaccacatcgaataaggttataaaaactttatattaggattttcattggttcacttgcaaattcaggctctcaacccatttccccttaaggtcttaaggtcactaactcaagattctctcctggtagggttttttgcttgagttttgtttttgttttttaggagaacagccctcttggctagggagggaatgcagtatatgttgaaaattcggggcgatcttggttttaaggtgttaaagggcaagaagagagtggtgtagaaacagacttccttgaggtaattttaatttgtcttccttccccagccccagggttggggggagcataaaaggtctagaatgatctttatcctttctcctttttcttcctccttttctcttttctcacttctcccctcttcaccacttccttcaagatccaaattaagtagacaaaggtgaggaagccaccccaattttaaagtttcaaaccctaaaagaaagccaattgtcggccaggcactgtggctcacgtctgtaatcctagcactttgggaggccgaggcaggtggatcacttgagtcacttgaggtcaggagtttgaaaccagcctggccaacatggtgaaacccgtctctactaaaaatacaaaaaaaaaaaaaaaaaaaaaaattagctaggtgtggtggcacatgcctgtaatcccagctactcaggaggctgaggcaggagaattgcttgaacctggagcggaggttgtagtgagccgagatcgtgccactgccctccagcttgggtgacggagcaagactctgtctcaaaaaaaaaaaaaaaaaaaagaaagccagttgtctttgctcccatgtttgaaacgtggcctgcctcagggactccttagtgcaggagatgttttagagataaacttattttctatcctaacccttggctcctttcttatcagaaaagaaagacaacatgaaacatgtctttggtcctaaggctttggaaccttgtgaggttccagtgtcttaatagaaagcctttctctcctttacttctcatcttagggtaattttgatcttttggtgatcccagcgctgctcaatacctggcaaatagatgaaggcttgaatatttttcacactccttccatcagaaggatctcataagcttctcagtaccaacgagggcagccaaatcaaacaaatgcccactttagaggaaaaagatttgggcgtggtgctcttaaattgggttaatgtgtataaagtgaaccaactatatgttaagtgcctaccatgcaccatgcaccatgtgaggtatctaatatctatttatctctcatttaacaactcgtagcaatctggcatgaacaaccatgcagtttgcctaggaccgatctggttttagcactgaaagtccttcctccctcatcctgggacaagtctcagtcctgggcagactgaaacaattggccaccctgcaacaatctttcactctccagatgagaatactgagactccagggtctacacaccccagttgggcttgactgaccttgtttctcttaaactggctccagttcttattagcagcctagaaaagtggaagtgcaaccacatttctaaagctgcttctaatcctctttctcctaatggcctctcaagaggttttcacagccagaaaacacattttttccccccagggtagaaaccctggctcctactgactttcaccacagcttgatgattctattcatcatatgagttctgcttcagtcaaaattgattggctactaagtattgacttcctaaattattaatatattcacattgggggaaggtgtggtaaggagggagagagagaaaataaataaaccaactgctatggcctattatttcctacctatctattcctttcaacatgaggcaatttggctacttgaaaggacatcattatcagccagggtccaatatggtgactgaccaatgacatcttataaaggaaagcaatgtagtgaaagggcaagcacagtctttggagtcaatagatctgtttttatttcccacattcactgattaacatctgcattatgctacatctctttgaatcttagtttcacaatctgaagatggggataataatatctcccttttactgttggtgtgaggattaattgagaagatgtaattccagatttcaagctatattacaaagctatagtaatctaaacagtatggtactggcattaagacaggcacgtggaccaagggaatataatagaaagcacagaaacatgcacacatacatggtcaactagtatctgacaagagtggtaagaatacacaaggtgaaaagattagtctctccaataaatggtgttgagaagactggatatccacgtgcagaagaataaaattggaccccatcttatgccactgacaaaaaattaacttgaaatggattaaaggcttaaatgtaagacctcaaaacataaaagtgctaaaggaaaacaggagaaaagttgtttaacattggtcttggcagtgatttcttttggatatggcaccaaaagcacaggtaacaaaagcaaaaataaactagtgcaacaatatcatatgaaaaggcttctgcatggcaaaggaaacaatcaacaaaatgaaaaggcaacccacagaatgggagaaaagatttgcaagccatatatctgataagggcttcatacccaaaatatataaggaactcatacaactcaatagcaaaaagaaaaaaatcctatttttaaatgggcaaaggaagccagatacagtggcatgtgcctgttgtcccagtgcctcaggaagctgaggcaagaggatagcttgataccaggagttcaagtccagcctgggcaacacagtgagacccttaaaaaaaggccaaggatctgaatagatgtttttctaaagaagacatatgatatggtttggctgtgtcaccacccaaatctcatcttgaattgtagctcctataatccccatgtgtcatgggagggacctggtggyaggtaatttaatcatgagggtgggtttttcccatgttctcatgatagtgaataaatctcgccaggcgcagtggctcatgcctgtaatcccagcactttgggaggccgaggaaggcagatcacctgaggctgggagttcaagaccagcctgaccaacatggagaaaccccatctctactaaaaacacaaaaattagctgggtgtggtggtgcatgcatgtaatcccagatactcggsaggctgagrcaggagaattgcttgaacccgggaggcagaggttgcggtgagctgagattgygccattgcactccatcctgggcaataagagygaaactccatctcaataaataaataaatttcatgagacctgatggttttataaagagcagttcccctgcacattctctcttgcgtgctgccatgtaaaacatgcctttgctcctccttcaccttctgccgtgattgtgagccctccccaaccatgtggaactgtgagtccatcaagcctctttttctttataaattacccagtctcagttatgtctttgttagcagcgtgagaatggactaatacaacaaagaaatagccaataggtatatgaaaaagtgctcaccatcactaatcatcagggaaatgcaaattaaaaccaaaaccatagtgagatgtcaccccatacctgttagaatggctacaaaaagcaaaagataactagtatgggcaagaaagtggagaaaagggaacacttgtgcactgttggtgggaatgtaaattggtacagccattatggaaaataatatggaagttcctcaaaacataaaagtagaactagtatatgatccaacaaccccatctctgggtatacacccaaaggaagccaaatcagtatcttgaaaagatacccacgtgcccatgttcactgcagcattattcacaatagccaaaacagaaacaacctgcatgtccactgacagatgaagggataaagaaaatgtggcatatacaaatatatacaatggaatattattcagccataaaaaagaaggaaattctgccatttgtttcaacatggaagaaccgggagggcatgacgctaagtgaaataagccagaactattgcatgttctcatttatatgtggaatctgaaaaagttgaactcatagaaacagagggcagaacagtgtttaccaggggtcggatgtggaagatggggagatgttggtcaaagataaaaatattccagggatctaatgtactgcatggtgactatagttaataatactgtattgcatacttgaaatttgcttagagagatcttaagtgttcttaccatacactcgcacaaaggtaactatgagtggtgatgaaggtgttaaccaatttgattgtggtaatcatctcacaatgtgtatgtatatcaaatcatgttttataccttaaacatgtataattttgtcaattatacttcaataaagctagaaaagagaaatgtatgaatttccttttccttaattctcccagctgccttttctagctaatttttacctatcatttaagactcatgacaggtgtcacctgctccaggaagcctgtgctgccccctctgccaccactcaccacctaggcctatgtgctcctgtttctcctcctatagtttcctgtgcagacctccatcaacgcacctcccaccaatttatgcttatctgtttgtgggtctgtcatctccaggtgcaagatattttctccaaggagctctgacatgatccagagagcaactttgcagcaaggggctgctttccatgtagcgcatggagccagtasaagaaggacaaggatgcctgggctggcctctttcctgcccctgacctgctgtgggaatgaggaccagcagttacttgggcctcaactagagttaaagcagggacttcacagggttctgtaagctaaatgtggttcaaggaagcatcaaatttctttaggatagtgtattttttaaccaggtacactggaacttaatagaaaagtacagacacccaagccccattcacayctaacacgtcaggcagctggattgtgtatttcaaaactgtcctggaggttaggaaccttgcagcatatattaaagccaccctcgtgggtctctgtggaaggaataaaagtcagctacctggcctttgtttcaactttatagttatgattattaatattatacatttagttaaaaatgatattgaactatcattctcagggggctttcacaggtaccaagccccttcacatatactgtcttattggatctttgccattattctgtaaggcaggaactgaaggggtctctgctcaatcctccatctgcatagtgtgcctgaccctcaggcccagacacatctagccaccctgcctggcccaggcccctcatactctgcaggatgcccctgttctctgaagtgggagttcctgctgggctatgcagccagaccagctgggccccctgcctaggtgtctggatggatttacagaacagacaggacactcagagaggaaaaacatatgtggtcaggtgtcctacagcaaagagaagtgggagattcagacaattatccagatgaggcaggtaaaatgattctggcgctgttttattttgacttctgcagggcattggcactatccctgagatgtggcaagagcaaggtttatatctgtatcacacatacaatgcccattttgcttagaagtgaaagactgagggttgagacttccactccgtgaagaacagcagaaaccaactcaatgcccatgggctgcagaaaaatcactgtggttggtgactttgttaccaggctttgtggcttccttaaaccggagtgtctggaactggggtctggaatgtattctcaggggtagaaaggttttacttgaacttttaaattttgcttccattttgataatcttaaaaatattccttttattagatggaacagcaaaatttgggttataattcataattggaagatatttttatggaataaaaccctaattagttagattatttctcaaattggaatatgtggcttcctggggccctacaaatatacaaatgcattttcatgggtacacaagactttattttccctttaaaaggggtttttactttactccagcttatgagacatggcctacaattccctgtcctcctaggctctcccattctccctttcctactccacagccctgtcgggaacaagccagtaacacacacacatagtataggaagagcagacggtgaaggaaatgcaccaatatatttggtacaaatatgccaaaagggctggacgtggtggctcatgcctgtaatcccagcactttgggaggctgaagcaggtagatcacttgatgtcaggagttcgagaccagcctgcccaacatggtgaaaccctgtttctactaaaaatacaaaaattagctgggcgtggtggtacgtgcctgtaatcccagctactcgcgaggctgaggcacgagaatcacttgaacctgggaggcagaggttgtagtgagccgagatcgcgccacttaactctagcctgggcaacagaatgagactgcgtctcaaaaatatatatatgccaaagcgttctacattctttttcctttggtttgcatttaaaatcagtgtccacttaactgaacaagacaccaccaaagcaatgtcaaatccaccatctataactacttctgtgatgttctatgtcacctcttctaaactctttgagcagagggcaccaaatctaaactgctttcttcttctctggctcaggaaggacccagcagactccaccttccaaggacgacctcaatcctgaatgtaggagaggtggtgaggtgacaggggaacatctcagagaccatgtcagtatgtgtgaggcatccagaacccacacgggggcaagaggtcttcccagcaggcttgctttcctcttggtctctgatgttcccactcctgagcaggactgtgtgtgtgtgtgtgtgtgtgtgtgtgtgcatgtggaagtgtttttttgtgtgtgtgtggtgtgtgtctgtgtatgcctgtgcatgtggtgtgtgtgtgcgtgtgtgtgtgtgtgtgtgttgtattttaactatagcccatctcttacactggactcctccaaaggatttaccattaccccatctcctacaaaggcacatttactctgtaaaagccacaggccctggtcaacctaatgccaatgatgggggttgtagagggctctgcagggttgggggtagctcccatggcctgtgagagcaggtgcatcaggtctcctgccaggatactaagatgcagtcactgcctctgacactccttggaaggtatagatggtataataaaccaacttttccacactcaagacagtgagctatatatagtagaaaccaaattcatactgtttattaggcaggtttgggatatgctgagagtgaaatcacgtccccagaaacatcagtaaagtcacagtaaaatgtcacatttgtgctctaaggattccagtcctttttactcctcttaagattgatcattttctttccataggaaagagcaaaagactgatttttaattagcccagaactattttctgaaggagcagaggaaggcctgggggctttgttgtcctggaagaaagcttcctaggtgtcttgcaagctaccgtgcagggtgactacacaattctgtaccaggtctttcagctccagtgaggagagagggtggagctaatgtaacaagaacttcaatttactgagcacaatgcctcatacaaaacaagcatgtccattattattattttttttttttttttgagacggagtctcgctctgtcgcccaggctggagtgcagtggcgggatctcggctcactgcaagctccgcctcccgggttcacgccattctcctgcctcagcctcccaagtagctgggactacaggcacccgccactacgcccggctaattttttgtatttttagtagagacggggtttcaccgttttagccgggatggtctcgatctcctgacctcgtgatccgcccacctcggcctcccaaagtgctgggattacaggcgtgagccaccgcgcccggccgcatgtccattattggttcttagggcaatgaccgtatggtccttggaatttggaaatgagggaaataattctgagaatcaaaccatgaaatcaacatagaatggatcagagtcgaggtctcaaagtccccagagaaagacagggtgtcagtctgaccaaaagtgtcagtgagcaggaaggttggccaacaatggaagcagagcagagggggccagagaggttaggctgagccatgtggagcgttacccacattctccagaaaatcccccctgccctgctgggtcccatctggacacaccagcaggatngctccccagaatgtacccctcaaggaactcacgagtcctgctgataagatccatgctgctgtcctggctgcttgccccactccctgggccagtcagttcctgctgtggctggtctggccgcaggccccagtggactttttgcaggcctgaaagatgtcccttctggtcagtttttctttgagggtaagtgggtactggaagcccaatgtggataggagggcattctgtggacacggcacaaaagacagsggaggcagggttactgaaaattggcattttttcataatattcatcagttacaaagagattgggctgcagaascaaaatggaagacatggagtgccaggatggggtcattgccctgaggcttgggtttgaccaagttccattaatgaaccaaatcaacagttgctggagggaataccctcagtgctataattagaattctgttagaatgagcagaactcccattcccccgttcttgcttgtccggaacagtgattactggatatggcttatgacacgtggttaaggggaaagtccctcagtgggtcacagatgtagttcaaaatgccaagtgccctctttgattgttatgagaaagtcatatgcatttctactgagagccatttttactaacaatcaaggactacatagactacttatcagaaaagtgagttattgagggtttcacaaagctggctttgtaaactaaaatttctaagaactaaagttaccaagagccctaattcagaatcccactaataagcctgattactattgaaacccagggtaatgggcaaagcacacagaggtagctggaattccctcacctctcagataggacattgctatcagtttaacatcagtgttgtcttaagtcaacaatttttaaaataattaatagatttttaggacagtttaagatttacagaattattgagcagacagcacacagagttcaatatacctacctcgaccctaatcctacctctgcccctacagctttccctattattaacatcttacattagtgtggtgcatttgttataattaatgagccaatactgacacattattattaactatatagtttacattaaagtttactcttctattgtatagatacttctatgggttttgacaaatgcataaggacatacatctacaattatatatcatatagaatagcttcactactctaaatatcctgtatttcacctcttcatcccaccccttcctccctccaactcccttttctttcctttttttttttttttttttttgagacggagtcttgccctgtcgcccaggctggaatgcagtggcacaatcttggctcactgcaacctccccttcccaggttcaagcaattctcctgcctcagcctcccaagtagctgggattacaggcacgcaccaccatgcctggctaattttttgtatctttagtagaaacagggtttcgccatgttagccaggctggtctcgaactcctgaccttgtgatccacccgccttggcctcccaaagtgccggtattataggcgtgagccaccgtgcctggctccaaccccctttttacttactatctctacaattttgccttttccaaaatatcacagagttggaattgacagagcaggagcattgccatcttgttggacaagcactgccattctaaagttcaccttgatcaaaaaccacctaaatccaaagggcatcagcctaatggctaaggtgagcatgaccataagccacaaataacatctccaactagaaacattcaaaacccctccctgaccagagacatgccagccctgagataacctcccctctggccagagagatgttagccccaggataactgcctctctgaccagagacattccaacaccaccaaaacttcttccccaaacagaaacattccaagcttgtggtaagttctcttaccctaaaataaatagtcttagtctgtaagagagagcgcttctgacccaaatcggccagaaacccctctcaggtttattctccaaagtaaaactgtctttgactgccgagccacttttcgtgtttctttcctttctttcactcttacaggaatcatatattatgaagccttttcatattggctctttcaactagcaatatacatttaagcttcctccatgtgttttcaaggtttgatagttcatttcttttttttttttttaacctctgaactttttattggcctcctgctccccaaagggtaccctgcttctgctggcttaatgtctcagaactttggtgtcattattctcagacaccactttgccatccactatccagtgggtagtgttcttttggatgatttgcatggagttgctgctgtccagggcatcaccaagattgaagtccttgccatcttccagcaggcagtggtaggtggtgatctcagcctccagcttgagcttgatgttcagcagggccttgtactcctgggcctggcactgtccctctgcctgggtctgtgccagctctgattccaggtgcagcaggatcccattgagctgctccatctgcagggtgtagtgggcctccacctccctcaggctgtttcccaagctgaccttcagatttctcatggagtccaggtcaatctccaaggactggactgtacgtctcagtttcatgagcatcatctcagcagctccaaccttggcagactgcatggtgaccactgtggtgctctcctccatctgctgagagcagtacttgtctggctcctctcggctcttctgaggcagctaatcatattgggcccagatgtctgccatgatcttatcaacgtcctaagatttggggacatgtacctccatggtcaacccagagctggtaatctgggcttgtaggtcttttacttcctcttcgtggttcttcttcatgaagagcagctcctcgagagcctcgatctctgtctccagctacagccgagtgacactggtgtcatcaatgaccttgtggagcccacggatgtcgctctctacagactagcgcatggccagctctgtctcatagttgactctaaagtcattggcagcaagatgggcactgtcgatctgcacaatgtgggcattgtccacagtatttgcgaagatctgagcgctcatgtcctcaatggtcttgaagtaatggctccagtctctgacctggggtcccttcttctccaggtgctcccggattttgctctccagcttcctgttatcagtctccaggctcctcactgtccaggtaggaggccaggaggtcgttcaggctttgcatgatctctttctcgttctggatgcctctcattctggccagacccccagccatccccatggccaggcccccagaccccatgccaccctggaagctggtggagcaggacacagagatccaggaaccagagcccccggcacctgcatagacactggccacactgctgaccagccaggcgccgtagctgggtggctggacagagcccagggaccagtagttggaggagaaggtggaacgagtggtgaagctcatgctgtccggggaggagagtgagaggaaaggactcaggctttgctgatgacctcatttctttctatctctgaacaatattccaccgatcaatgtactgtagtttgttcatccattctcctattgaaggacatcttggtggcctccagttttggtgataatgaatagtgcagctctaaacattcatatgtaggcttctatgtgaacataattttcaactcagttgggtacatacctaggaacatgatcgctggttcggacgacaagactatgatcagctttgtaagaaactgccataccatcttccaaagtggttatatcgtttgcattcccaccagcaatggaagagcatttcctattgctttgcatcctcatcagcatttggtattggcagttttttaaaaaatagccattctaataggtgttagtggatcttattgttttaattttaaattcccaactgacatatgacatttagaatctttttatatgcttatttgccatctgtatatcttctttgatgaggtgtttgctcatatcttttgtccattattaaattgggttgtttccttattgagttttaaaagttcttttggtattttcagatgcaagtcttttatcagatacatgccttttgcaaatattttctcctggtctgtgggttttcttttcattctcttaaatgtctttcacagagcagaagttttcaattttaacagagtccagcttatcattttttttttttcatcaattgtgcttttagggttgtatctaaaaactcatcaccagacctaaggtcacctagattttctcatatgttatcttctagaagttttgtagttttgcattatacatttaggtttaagatccactctgagatgattttttgaaaggtgtaaggactatgtctgaattttttttttttttgagacagagtcttactctgtcatccagactggagtgcagtggtatgatcatggctcactgaagctttgacctcctgtgctcaagcaatcctcccacctcagcctccagaatagctgagatcacaggcatgcatcaccacacccagctatttttttttttttaatttttagtagtctcaaaatctctatgttgcccaggctggtcttgaactcctgggctcaaacaatcctcccgccttggcctcccaaagtgctgggattacaggcatgagccattacacctggcctggattcatttttttttttaaacatatgaatgtccagttattccatcaccatttgctgaaaatattattcttcttccattaaattgcctttgtgtctttgtcaaagatcagctgattatatttgtgtgggtccatttctgggctatttattctgttccactgatcaatttgtctgttcttttgacaatatcacacttgattgtagtagctttacagtaagtyttgaagttgagtagtgtcagttcttcaactttgtactttttcagtgttatgttgtctattctgggtcttttgccttaccatatacactttagaatcaatatgtcagcatccaaaaaaataacttgctaagatttttattgggattatattgcatctatagatcaagttggggagaactgacaacaatgttgaattttcctacgcatgaacatgaaatttttttttttttttttgagacagagtctcactctgtcacccaggctgaagtgtagtggcgccatctcagctcactgcaagctctgcctcccgggttcacgccattctcctgcctcagggtcctgagtaactgggactacaggtgcccaccaccacgcccggctaatttttttttttgtatttttttagtagagacggggtttcaccgtgttagccaggatggtcttcatctcctgacctcgtgatctgcctgcctcggcctcccaaagtgctgggattacaggcatgagccaccgtgcctggccaaaatattttttcatttacttagatctttgatttctttcattacttttatagtttttctcatgtagatcctgtatacattttgttagatttatgtctaaaayttttggtgctagtgtatcatgtcttaaatttcaaattccaatggctggtatatagaaaagcaactgtcttttgtatcctaagactttacatcctgagaccttgttacagtcacttattagttatgggagttgtttggtaaattctttgggattttctgcatagacagttatatcatctgtgaacaaagatgttttatttcttctttcccaaactatatacatttatttcctttccttgtcttattgcattagctagaatttccagtatgatattgaaaagggctggtgaaaggggatctctttgctttgttcctgatcttagcaggaaagttttcagtttctcatcattaagtatgatgttagctataggttttttgtagattttttaaaaatcaagttgaggaaatttccctctattcctagtttactgcaagtttttattatgaataggtgttggattttgtcaaatgctttttctgcatctattgacattattgtgtgatttttctyctttggcctattgatatgatgaattatcttaattgacttttgaatactaaaccagccttaaatacctgggataaatccttttgggtcatggtgtataattatttttacacattgttgaatttgatctgctagcattttgttgaggatttttgcatatatattcataagggacattggtgtgtagtttttcttcttgtcatgcctttatctcattttgtattgggataatgctgacttcatgggattagttagaaagcattccttctgcttctattttctggaagagattgtagacaactgatatcctttcttccttaaatgtttggtagaattcactagtgaaatcatgaaggcctgttgctctttttttttttttggtaagttgttaattattattatctattacttctttaatagtaataggcctgttcaaattatttatttctcctgtgtgagttttagtagtttgtgtctttcaataaattagtccatttcacctaagttatcaaatttgtaggcacagagttgctcataatattcctttattatccttttaatgtccatggaatcaataatgatcacctttcatttctgatattaatgtatgtcttctcycttttttccttggttagcctggctaaagattcatcaattttattaatctttttaagagatagcttcagtttcattgattttctctattgtttcctatttctaatttcactgatttctgctctatttggtattatcccttttttcttcttgctttaggattattttgcaattccttctcttgtttcctaatatgggagcttaggttgttgcttttagatctttcttcttttctaatatatgcatttaatgttattcattttcctctaagcactgcttttgctgcatcccacaaattttgataagttgaattttcattttcatttagtccaaaatatttttaaaattttcttaagacttcttctttgactactcatatattatttagaagtgtattgtttaatctctaaatatgttgggattttccagtaatctttctgttattgatttttagtttaattccaatgtggtgttacagcatactctgcatgacttctgttcctttaaatttgttcaggtgtgttttatgtcccagaatgtggtctgtcttggtggatattctacatgagcttgagaagaatgtgcattctgctattgttggacgaagtattctataaatgtcaattaaatccaggtgatttatatgctgttcctttcaactatatcgttactgattttctgcctgccggatctgtcaattactggtagatgggtattgaagtccacaactataatcactgatttgtctgttcgtcttcagttttgtcatttttttgcctcatgtattttgatgctctgctgttaggtacatacatgttaaggactattatgttttcctgaagaattgacccttttatcatgatgcaatgccctcccttatccctgttaaagagatgttctttgctcttaattcttctttgtctgaaattaagatacctattcttgctttcttttgattagtgttatcatggtatatcttcctccctccctttacttctaatccatctgtatctatatctatacctatctatctatatctctatatgtgtgtgtgtatatgtgtgtgtgtgtgtgtgtgtgtgtgtgtatatgcattttttttgagacagagtcttgctctgtgcagcctccacctgctgggttcaactgatttcctgactcagcctcccgagtagttgggattacaggtgcatgccaccatgcctggctaatttatgtatttgtagtagagacagggtttcaccatgttggccaggctggtctcaaactcttgacctcaagtgatcttccaatctcagcctcccaaagtatggggattacaggtgtgagccatcgcacctggcctgtgtctttatatttaatgtaggtttcttgtcacatagttgggtcttgttttttgatcctgcctaacatcctctgccttttaattgatatgtttagaccattcatatttgaagtaattattggctgggtgcagtggctcatgcctgtaatctcagcactttgggaggctgaggtgagtggatcacttgaggccaggagttcaagaccagcttggccaacatggcgaaatctcatctctactaaaaatataaaaaataaaccagcgtggtggtgggcacctatagtcccagctactcgggaggctgaggcatgagaattgcctgaacctgggaggcagaggttgcagtgagctaagatgcaccactgcactccagcctgagtgacagagcaacacttcatctctaaataaataaataaagtgattattgagatcagtgrattaatatctaccatgtttacaacaattttgtgtttgtggcacttgtcctttttttttttttaatcttccccctttttggtctttttttttttttttttaagaaacagggtcttgctgtgttgcccaggctggcctcaaactcctagcctcaaacaatcctcctgcctctgtctcctgggtagcttggactataggcacatgccactatgcccagctcctcctctggttttaactgagcactttatatgattctgttttctctcatctctgagtgtataaattatatcccttaaaaaattctagtgtttgccctagactttgcaatatacagttagaactaatctatgtccactttcaaataacgctatactgtttctcagctgaactatggagaagcatgtctaagccttttagagagaagttgaatatgctttagagagatgttgaatatgctttagacagatgttttatgagtctactctggttggtgcattcctaggtactaggggtcaggttacttggatgtcagtgtccaaatctgtctaaagtcccagctcaccccactgcatgctcttctggatcccattctctcctggatgtaacagggatgaagaaaacgaagtggagattcttatgaagtatggcctcacttcctagggcacgggtgtcagaatgactagtttcccttcttcctcctctcacctccccacatcatggtggaacttcccttccctatactgcattgtttaagcaagctgcaatttgagataagcagtagacactagcacttagaggtaagtagttccactctaagggcttagyatatttgggtcttccaacagcaagttcctattctccacccttgaggccaggaatggaaatgaaaagaagcaggtatatcagaaaggccccaacccaagaggcagctgccctaggtgctccctggcttgtcctttacttgatctgtggccatcctgcttctctgggactcggtgaactcatctgtaatgtgggaatgaaaatcctttctctaccaaactggcttctgaaaagatagaatgggatcatgtataagaacatgattatgcaaattgtaagggactatacacaggaagagtatatttattatagaaatcagaggagatggctgtcaaaaaactattttactttctgttctgaatctaaattgtcccatyttttcttggcttctatcataatcaaaagagcatggtgatttagctggtgaactgtggggagtggcttgccctcccccaagtctacattctcctctgtggctctacaagacctctcctctcacggtaagtatcttgcagtttggctcaggacatgtgccaagttctcctagcaactctttagggcatttttcttgcttgacagctccagagtggctctacacattctgcagctcaccgagcctctaggtgggcagcgaggttggtattttccttcaagtggggctggggtaacgatggcagtagccgcccatctgattgccttttcataagccccatggcttcttctctgtagtgtgtaggaggctttgggcagctaaagtcagcaattctggagcaacagaaatacctgccacctcaacatcctcttgcactggttttaattgtgctgtcagtttgggaatctattaatataaaatgttgatatttggcatttattatggtttgcagatcttgtaaaattaggtgagttacattttgtgttggggaagctatattctaatccacataggcaaagtggcagtttcctgtctccagcttgaccatgcagtcacctggggataccatgaaggctggtcccaccagcctcaaggagacactgtggatgagtcaggaaaagggacctgctccctagactctcctgctgaaagagctgtcataaagacattcagagaattctcagtgcctcctgagatttgcatcaagtcctcaaagtgacctcacctttctgatccggaaatctcctcctgtggttagtgtggtccagctttcctaccccagccttctcctccttcaccttcatgactataaagtaaaaggaacacagcctcaaaatgtatacattaaaaagggtaggatttcaaggagaaatggtcaaatccacagtcataatgggagattttaatacagataaaaaactaagacaaaaggacatataactgggtgcagtggctcacacctgtaatcccagcactttgggaggctgaggcgggtggatcacctgaggtcaggagttcgagaccagcctggccaatacagtgaaactgcatctctaataaaaatacaaaaattagccagatgtggtggcattcacctataatcccagctgctaggaaggctgaggcaagagaatctcttgaacccgggaggtggaggttgcaatgagctgagattgcaccactgcataccagccgggggaacagagcaagactctgtcttacgaaaagaaaaaaaaaaaaaaaaaaggacatataaacaaattgaagaataatttccaacaagcagagaacacacttctttttcaagtacaaatgacacatttacaaagagagcacatatactacgtcacagaaaagcctctgaaaagtaaatttattatgcttatataataatatatataaaagtaatatattatgcatatatatatgcgccaggtgtgatggtgtgctgtagtgctaagctacttgggaggctgaggcgggagaatcatacaagcccagaagtttgaggctgcagtgagccataatgattgtgccactgcattacagcctgggtgacagagtgagactctatctctacgaaaaagaaaaaacaaaagcaatctatgcttttgtttttaagtaaacaacactaggactgaaaaagggacataaaatatagttgagaatttaaaaattataattccattaaaaaattcatgccaattaattttaaaacttaaataataagaatagttaacattgctatgtgccagaagtgctttgcatgtatgatttaattgaatcttatcaacaatcctatgacataaataacattattattcccattttacaaatgaggaaacccagacacagagagcttaaatgactacccacatggaaaaacaaatctggacaatctgtttctggaactatagccctcagccacaaggctaatacatggatacttctctacaaaaacaatagaagtatcaaaattgacttttaaaaaaattagaaaacctaaattaaccaataacaattaaaatgattgtaggaaagacaccacaatcagtcatgtattgataattattgaagctaggttatgctacaaaagagttgtwaaaaaaaaaaaaaaaaaaaaaaraaagagttgtaaactaaaaataaaatcctaagcctccccaccaactgaacagactccctcttggccaaggggatcccagagatacattaaaaaccaaaatcctggccaagacaggataggaggtcagacacacctggttatatcatctcccttttgcagtgtagacataactgaccagcatttatgttaaaattgagaataagactgacagaacagaccctttatggcaataaggtaccaaactgtaaacaagacctaaagccaggccaggcaagggttaagttatacacgcctacacttgaagaataaactgtgtcctaactgccacacggtttttcttttcctctagcagctaagcaagcactggccttgagacaagcaatattagaacaatttgcagcacatctaccagcagatgctgactaaccaaccccctgctccataagccataactatagctttgattggacaaaagactgastttagtaactccctcctgataagaagatcatgaaccatggactggttctggtcagtttacagaggctgtgcacttgaacgcatttgtgtcctacaaagaccttctaacgtataatgcctaatgtaatacatttaaatgttatggctccatcccaaggtgaacatgggcatgygtaatatgcatgtttgttcaatacacatgcatcaggaccaccttcatgaatattcatagatcctcctgtaacctactgaatatgcatgtttagccaacccagtcaacttaaattcctgcctttcccctcctccttcgaagtgcctgtctctgatctaaccctgaggctatggttcccatcctgtaacatggccaccttgcaggctgtaaccctttacaagaaataaagtcttctctccaaatgcatagatcatgtgatctttaagttaacagggtcatcatcatttattttacttttgttgtgtttgaaaatttttctataatgcaaagaaaaataaacaccaggaacagatagttttttttttaaatgttttatctgaaccttcaaggattagacagcctctacatatacaaaatgtttctcaaagatagaaataggacatcagaggcaatagggatatctcaagaccatgatgcagagcgggctgaacacaggggagatggtggaaaatcttcataaggagttctgaggttaaatcctcaggtctctcctctaggctcyagtctcctataatgccctttctactcagaatatggaggggccctgtaggagactaaagccaggacagaagatccctggacagctgagggcaaaaaggagtaatttcactggggaaacaaaaaggagttaagtaaatgcagttagcccctcagccctttgcctgctggactcctagaaccctaatgaagtttaggccctccaggcaggacattggagaacttccagattccaacattttggggacctctgacaaaatggcaagggctgcatccaattgcccactgtaagtctatcattcaacaagtccagcctggccacatggcagctgtttggcagctccacttcaaaacatgaacagccagccaagaatcaccagaatgacagataccaaaacaaacaggaaaagaaaaagtccaaggaaacaggagcaatgtaggcagccaaagaaaccattaaaactatgtagtagcaaatgtcacaaaagcaaaaatagacaaatggcacttaattaaactaaaaagcttctacacagcaaaataaacaatgaacaaagtaaacagacaacctacagaatgaaaaaaaaatattgcacactgcgcatgtgacaaagagctaatatctagaatctgtgaggaattcaaacaactcaaaaagaaaaaaacaaataaccccattaaaaagtgggcaaaggacatgaacagatatttgacaaaagaagacacataaatggccaacaaacatgtaaaaaatgctcaatattgctaatcatcagagaaatgcaaattaaaaccacaatgagataccatcttacaccagccagaatggctattattaaaaagtctaggcctggcgaggtggctcatgcctgtaatcccagcactttgggaggcagaggtgggggggatggcctgaggtcaggagttcaagaccagcttggctaacatggtgaaaccccgtatctactaaaaatacaaaaattagccaggtgtggtggtgcatgcctgtaatcccagatactcaggaggctgaggcacaagaatcacttgaacccagaaggcagaggttgcagaccgagattgtgccactgcactccagcctgggcgacagagtgagactctgtctcacaaaaaaaaaaaaaagtgtccaaaaataacagatgttggcgaggccgcagagaaaacatgcactgtcggtgggaatgtaaattagtacaacctttatggaaaacagtatggaggattctcaaagaactaaaaataaaactaccatttgattcagcaatcccactgctggtatatgcccaaaggaaaagaatcattatattaaaaaagataccagcacttgtatgtttattgcagcactattcacaatagcaaagatatggaatcaacctaagtgtaatcaatggaggattggataaggaaatgtaatatatacattacattatatatatataatggaatgctaatcagtcatagaaaatgaaatcatgtcttttgcatcaacatggatgaaactggaggccattaccctcagtgaaataactcagaaacagaaagacaaattctgtatgttctcacttataagtgggagctaacaattcgtacacatggacatgtagagtgaaataacagacactggagactccaaaaggtaggagggtaggaagggggtgagggttgaaaagtgacctattgctacactgttcactattcgggtgatgagtacactaaactcaaacttcaccacaatgaaatatatgcatgtaagaaacctgaatttgtactccctaaatatatattttaaaacatttaggttctttaaaaaactatgtagctggtgctcgctttagtagcacatatactaaaactggaataataaaagataagcatgacccctgtacaaagattacaaaacaaagacaaaaacaaagatagttaatatcttcaaggagattgtcataggtttgtttaatatagttgctttcttggcatccagtttttggcctgacataagttgtttgaaacccaattagttgtactcctttggcctagttaaaacttcccctccctatatgattgtttgcaatatagtgcattctctctctttttctctctctctctctccccattcactgattgaacatcctactgcgtcttgacttcccatcagccacccctaacctctttgagatctgtaaataataaatttcttctgttttatgcattttggtttcatttggtctcacctgaccatctaaaccttactctcctcctggttagagctctcctagaaagtggctatcttggtttctggctactctccagagacagctctcaagaccaaattagaggaaatcacaacagagacaagaaaagacattgtattcatgacgacaagaaaagcagaatgctataaacctatgaacctataagtttttaaagaataagacagaacttttcgaaattaaaaataccttagaagaaaattttcaataaaagacttggaacataaatttgaaggagtatatcagataatagaacacaaataaaaagagattaaacaaatactatgacaaaacaagaaaaccagaggatcaatccaggaggcccaaacatcaaaataataggagttcccaaaagagagataaaaaaatagtggagagaaaattaccaatgaaataacatgagaataccttccagaactgaaagatctggaagaattttctgattgaaagaactttcgatcagctcagaaaaaattaatttttaaaaaatccactccaagtcacatcattatgaagcattaggacttcatggataaagaaatcttaaaagcttccagaaaaaaataagtcatctaccaagaatcygaaacaagaattgatatcagatttctcaatcactacagtggaagctacaagacaatgaagtcatgcttccaaaagtgagacaaaattatttccaacctagaattccagtcccaatcaagctatcaatcaagtgggagggtagaataggggcattttcagacataaactatctcaaaaatttaccttcgatgcacctttttttcaggaagtgactgaaggaggaactctagcaagatgaaggacttgcactaagaaagaaattaagtctgggaaacgggattcaccacaaaagataggcaaaggaaagtcaccggagaagaaccctgcagcagtccagagagcaacaggcacatcttagagcaggctctggacaggatgtcttcaggaaaaaaacctggatctgaaaaatggtcttgatgtgtttgactgttgcaagaggatacaaaaactttgtcaagaatagtcatagaaaggaaaagtaatcatggtacactatactcaactgtgagcaatatttacacagtcataataaatcaagtgagtgttaattttcctgaaaacagcaatagaaacagggttgatattccaccgatacgcattggtatggctgctatttatgattggtgtccatttttagtgatcaggtattcatttgggttggtcaatgtcagtgccatgttggttgttaaatattttgaatatcaccactggatgtaactatttggggagtataaaacacctgtggaggatgctgctagttacttccctgatgcccattcccctttctgctctgactttctgacttctgctccagccacagtagcactatggccaactaaaaagaaacacttccctcagacacccttcagctctctctggctgaagagctacaggagaaagaacctgaggaaggagtcccttcctagataaagcattttcagaagaaagcctcttcacttttccttcttcttccttcctggatagagttgccaggtttagcaaatgaaactacagtttgcccagttaaatttgaatttcagataacaacaaataactttgagtatatgttcagcacaatatttgggatatacttctactaaaaattatgtgttgacaaaggtgacccagatgtggttactgaaaaccacacctgggtcatctgacaaaggactctgggaaagtaagtttttactgggaaaataatattgagtctgtcagtaagggaaaaagggagaatgcgcattgggtagtcatctagcatgtctcctacactgtccaacaaccattccctcttctgcttgcctatttacaaaactttattttgttcaggtagagacacagggcccttgattgccagtagtcaccttccctaggctcaggcatgagctgggatctatataaaccattcacggtattctggttgcccttagccagtcactgagtttaggaatagtcatgtgaccctattctagccaatgagatttaggtggaagtccattgggtaagactttcaggaaagcttttattttcctaattgaaagtgacacagttggaatgcacagtttgtcctttaccctcctgctttcttgcacggaccttgagactttgagataaagcagccatcttgcaacaatgaggtgacaggtatgaagaccaaaggcacaggctaagaacaaggcagaaggataagacaaatctgggttcctgagaatatcactgagctctggactgcttattgctggatttcctgttatctgaaaaaaaaaaaaaatctctatatttaaactgctagccaagttttatgttacttttagctgaggccttcctaactgacacataatggatgactatggacagttgaaattaatgaactagatttttatgtattaacatgtataaatctcaaaaacataatgagaacaaaaggaagttgtaaaagaaaatgatattatttacataaaactttaaaacaaacaaaacactaccaatattgattatagttacatttataagtaataaaatcataaaattatgtagaggaatgatacacaccaacttcaggttacttctggggaaggataaggttaatgatgcttgatgatctttggtattttggatagatgatagatatacatgtagatatgaaacgaatatgataaaatgttaacatctgttaattctggacagtaatatatcaatatttgtcatattgtacacatttgaggtattttattattaaatttttaaaagtatttttaaaaataactaagaggtctccccaacactatgagataatagtctcaggcaaaatgggtcaactgagcactctgcacagaaaatatctgggaaaaaaactcctcacactttgctagatcattatgaaattttagaacagtgactatgaagaaaagaaagatcccaaaaacttctagagtaaaacaatcagaaacaggtcacctgtcaatgaatagaaatcagactagcagaagactcctcctcagcaagttaaataagagaagataatgggcagggtgcggtgtctcacacctgtaatcccagcactttgggaggctaaggcgggtggatcacctgaggtcaggagttcaagaccagcctggccaacatggtgaatccccgtctcttattaaaaatacaaaacttagccgggtgtggtggcacatgcttgtaatcccagctacttgggaggctgagacacgacaatcatttgaacccaggaggtggaggttgcagtgagctgagattgtgccactgcattccacctaggtgacagagtgagactctgtctcaaaaaaaagagagagagaagataatgagcaaagccacccaaaatccaagggagaatgtttccaacctaacattctccacccagccaaactaccagtccagagtaggggtagaagacatttccagacatgtaaaaaatcattttacttctctttcataacttcctaggaagttctttaaaaaagttacccatcattaatcaagaaggagaagacaatgagatgcaggagagagtggataaaatcagaataatgaagagcagtccccagatgacagctgtgtcctcaaaaatcaatcagtcctcaaaagagctagaaaatgaggctttggaacgagccactcagggaaaaaatgaaatgtaaaagatttgatacactcttggggattttagaacaactcaagaaagtgacagaaaatgcaaagaaaaaagacagcaatgagaaataccagggaaaaattaaaactctgcaaggaataaaatgtgatcatggcatgtaatcatgagtataaacactgatttttgaatgaactaaaaatggtgatgatattctacattgggaggataaaaaagagatgtctgtggttgtaagatagttaaatattcacttgtaagtggctaatatctaacttcaataaatagcaggaataattattactatcattattattaaaaggtagccaggagaaaaagctaaaagaattcctagtggttatctttgggaagtggaactgtggcatatggaggaagctggaatggagttccattgctttttatggaaagctcttacatgtgttaattgatttttaaattatagcttttttattttaaacgttttaaagtaaataatttaatatgccatgtgttcctactttatgtgataattgtatccttgaaaattaatggttaaatctatttgttcaaagtgaatcatgtttaaaatacttagcagaattacacaacaaagaaccctttaaggcagtggttctcaaacttgagcgtgcatcataatacctagaaggctgctttctgtttgttttcttggagttggggtctcgctttgtcgcccaggctggagttcaatggcgcaatcacagcttactgcagcctccaacctctgggctcaagcaatccttccatctcagtctccaaagtaggtgggattacacgtgtgagcagctccagaaagcttgttaaaatagattgctgggtctcatccccagagtgcctgattccatagctctaggttggggcctggaaatgtacatttccaacaagttcccagttgctgctgatgatgctgatccagggaccacatttaaaacctctattttaagaaagtaactcccaatttatattttttattaaattgggtcagttggtgatttttaaaaagctgatatcttcctactccagtatggtgtgaagagtacagagaagctgagtaacagattttttttcccatagacaaccaccttcaaatgtcttagggggagactccatgtctccccaagcctctgaaggaaaggccatgtgacccaggctggtcaaacacaccccattccagccacagagactggttcaggaatgatcccatgtccttaactgggccaatcagaattcttcccaggacatttctgcttgattcatccaaaaactctgctcactctggcactgctaagctgataagcttggaagttactattttgcctgtcacatggagggaagcattcaagaaaagtagagaaacagagtccagataacactgtgactccctgagtcagttaattttgaactgtccttctcagttgtgttgagctgttaaattcactttattttttctcatgtttgagttgggcttctcatgtttgcaatcacaagtgcctgactaatgaaaatgaaatagagctttccaacatgattttaaaatgtgttatttcctatttgaagtactatggattctcagattggaaaagaaagtttgttggaaaaataatgaaatgcctgcttgtcactgacaaatgacaatacatatgcaaacacagatgagaactctacaaactatagaagtatggagctataatgtagctataatattcaggtagatgcataccttccagttctggactagctaagaccattcctgcttcatgtcctctgtgctagatcccaacttctcacaacttgagagaagctccctcccaggaatatgcagaagtagaagaacccaaactccctgagatgatcttcaaaggagtccatccatctgaagctgagtgttggccctggggaagtgtttggattagctctgctctgactggcaactatactgcccaccataaaagtcccagcctaattcatgcaacagaatttctacctccagcatttcatataatgtgtattagttgaatgtcaggtattttgctttcatcatcttattgaatcctcactataattcagtgaggtatataattttcacccacattttatagatgagtaaatgaagactaagagttaagtgatttgtcctggatcacagaaccagccatggtggagccagggttcaaactggattctttttgattctcaaacctaaggaaagaaggaagaaggaagggaagggaggggaggggagggggaaaggggaaggggaaggggaagggaaggggaaaggaaaggaaaggaaaggaggggaggaggaagggagaaggaagggagaaggaaggagggagaaagacgaaagagaaataaagatgtgagaaacagagggggcctggtatgggttactgacagtcttccacttctgggttccaggcccttcctgaggcctggctgaactccggtccacaagacttccctggtattataataagtccctccttggtaaaaaggcatttgatgtttaaaaaaataaaaaaattttaaaaaccctcttttctcttcaactagcttcagctgatttgagttacttgtatccaaagagtactaaccagtacaatcatccactacaatatcttgccaaaggaattgtgctagcaacacatcagcctctggcatgcagcaaatgaaaggacctgtaacaccagtctcttccctgcccaactagctcactgttattcccccatccatctttagatcatagatcgccttggtgttgagcatggctttacagtaagggaacacacaaaattctcttctgtcctgagtcaaaagtcactttccatttcattgcccctaccactagcctgaaatcacatctgggatccctgagaatccaaaaccctactgacaaaatcaacacttgggccacgtgcagtggctcacgcctgtaatcccagcactttgggaggacgaggcgggcagatcacgaggtcaggagttcgattccagcatggccaacatggtgaaaccctgtctctactaaaaatacaaaaattagccgagtgtggtggtgcacgcctgtaatcctagctactcgggaggctgaggcacagcaattgcttgaatccaggaggcagaggttgcagtgagctgagatggcaccactgcactcaaaaacaaaaacaaacaaacaaacaaaacaccttaagcctgtaagaccaaggatcagagtgctatcctagcaaacagacacacaggggtccttgcccaagcagactgcatgcccaaagcagcaaggwggtggtgacacagctagctttaaagatgtatgacacgttttagtcatcagagcccttgtgatagaatcatctggtgtttaggtgcccaccccttccctatccacaaggacacatcaattcaatccaacaaatccttattgagtatccactttgttccagatatttgcactagacactgggaacagaacaaaatagtttcattactagggaagaagagtaaagcatagtaatgaatccttaagattagacatccatgtctctgggaaaaaaggtaactagtaaaaaggttgtgccacattcactggtcagcttttggggagcttttctttccaccccatattttaagccacttgaccttgatatctaagaactctagaccagccaacatggtgtctgatgcacccttctgacagcccagagtatttcagaaaaggacttccccaagggcttatctgggattattttgtgaactgaatcgacaagaatgacacggggtcatgctgggctttagaaagctaagctagaagccagggaaaggctaccctctcaacccctagcttgtccattgcctcggggccctgcagactgaaacacccacgcatgctccaggagagaaaggacaaaacaaacaaatatccctaagaaaactagcagtagcaaaaccaggtaccgtatccaaaacctaaaaacaaaaatgtgtaatgaaaggagactagccattattctgtttctatcctgagatgctacattagcagatataatttattttcccatggttttctgggaaagaggtaagtctcagggtttttgctacttcataagtatttcagccagtctaacacatttgacaaagacaacagaaatttacgtactagaagagaaagattcagttctattagatgagaacaagatagaactaacttaccatggtgtcagacagaacaagtttcctgtcatttctgttamtttggagtggttttgcacccaaaaacctcaaggccagggtgataaaaacagtataatttttaaaggaaaaccaaatatcctatactcatttggaagatttgcccagctttcctggtattctcctcttcagtgtgtgtgaagcttactcttaaatactctgtgttcatgctatgaaacacattttcccttatctgcatagctctgtctactttctctgaagcttccagctgcaaacttacctttgtgttcttagctctggaaaccaggatccaaatcccagggaggccagaaccacttgctctgttcctgttgggtggcaagaagggctctctgtggtttccaggctgaacagtatttggggcattggagattgacttctgaggctcagtggcggccagccatgtgaccaaggtggggggagggacgctcctgcagggtcagggatggatgcctggttgactgacagaccagggtatagcagggtctgaatagagctggccatgatcataggcagatgcctttgctctaaatttcttcttgaattttaacttggtgatctttttatggcagtggtatattccagccttgattctgaaatgctattttatctccctgcatagtttttaacccagattctttttggattctgtcttggagggatgttagagctggaagagaacttgaagaatccagccttatctcaaggttgcccactttatataatgaaaaattgaggcccagagaggggcagtggcatttccaggaacctacagatacgtgggcctgttgttatgtactggcatgaccccagttggctcaaaattacagctcactttaatgtctccaacttttaagttgttagagctttgaggactgctgagatgttgataaaggatcttatcacattgcaagtacctaaatgttcagctgtcagattagggcatggcttggaaatagtggcagtctgtacttgtggtcaatgagtttacataaacatgtgtacttatttttaggcatctctaacccaatctttgtaaaatgctccaaggtgaccttttcggagagatcaggtgacaccaaaagctagagacattttttttttaacctcaaagaccttgaagacctctctagactacagccatgcaggtaggctcctagttcacacctgtcactccagccaaaaggatggctgctggctctctgctgacaaaaggagaggtggtaggaatgatggagaaaatgatagaggcagaggtgttggttgtagaagtagcagtaaaacggtggcaatgtagatgaaggtgtaaagtgtaggtgaagttatgaagtacagatgcaggtgatgaggtataaatggagatgtggggtatagatagaggtgtgaggtgtagatggaggtaatgaaatgtagataaagatagtaaattggccgggtgtggtggctcacgcccgtaatcccagcactttgggaggctgaggcgggcagatcacctgagttcaggagttcgagaccagcctgaccaacatggagaaaccccatctccactaaaaatacaaaattagccagatgtggtggtacatgcctgtaatcccagctactcaggaggctgaggcaggagaattgcttgaacccaggaggcggaggttgcagtgagccaagatagtgccactgcactccagcctgggcaacacggcgaggctccatctcaaacaaacaaacaaacaaacaaacaaacatggtgaggtgtagatggaggtggtgtgaggtgtaaatggaggtgtgaggtgtagacagagatgatgaggttcatgtagagagaggtggtgagatgtatatggtggtatggggtatagatggaggttctgaggtattgacggtggtgtaaggtggagatggtgaggtgtatatggaagtgatcagatgtagatggaagtgtgaggtgtagatggggggtgaagtgtagatggaaatgtgatatgtgaatggaggtggtgaggtttacatggaagtgatgagatgtagatggaggtggtaagttgtagacagaggtgtgaggtggagatggagatggtgaggtagtgtatggtggtgtgaagtatagatggaggtatgaggtatacatggtgatgaggtgtggacaagggtggtgaggtgtagatggtgatggtgaggtatagaaggaggtgtgtggcgtaggtataggtggtgagagataggtgagggtggtgaggtgtagatggtggtcgtgaggtgtagatggaggtggtgatatctagatggaggtagcgaggtctagatggaggtgtgtgatataggtgtaggtgatgaggtataggtgagggtggtgaggtgtagatggtgatggtgatgtctagatggaggtgatgaggtctagatggaggagtgtggtgtaggtgtaggtggtgaggtataggtgagggtggtgaggtctagatggtggtgaggtctagatggagatgtgtggtttaggtgtaggtggtgagatacaggtgagggtggtgaggtgtagatggtggtggtgaggtctagatggagatgtgtggtttaggtgtaggtggtgagatataggtgagggtggtgaggtgtagatggtggtggtgaggtctagatggaggtggtgaggtctagatggaggtgtatggtgtaagtgtaggtggtgaggtataggtgaggttggtgaggtatagatggtggtggtgaggtctagatggaggtggtgatgtcagatggaggtggtgaggtctagatgggggtggtgaggtctagatggaggtgtgtggtttaggtgtaggtggtgaggtataggtgagggtggtgaggtctagatggtggtggcagtgaggtctatatggaggtgctgatgtctacatggaggtggtgaggtctagatggaggcagtgaggtctagatggaggcggtgaggtctagatggaggtgtatggtgtaggtgtaggtggtgaggtataggaggtggtgaggtctagatgtgggtggtgaggtctagatggaggtgtgtggtttaggtgtaggtggtgagttataggtgagggtggtgaggtgtagatggtggtggtgaggtctagatggaggtggtgatgtctagaaggaggtggtgaggtctagatggaggtgtgtggtttaggtgtaggtggtgaggtataggtgagggtggtgaggtgtagatggtgatagtgacgtatagatggtggtggtgaggtgtagatggaggaggtgaggtctagatggacgtggtgaggtctaaatggaggtagtgaggtctagatggaggtgtgtggtttaggtgtgggtggtgaggtataggtgagggtggtgaggtctagatggtggtggtgaggtctagatggaggtggtaatgtctagatggaggtggtgacgtctagatggaggtgtgtggtttaggtgtaggtggtgaggtataggtgagggtagtgaggtgtagatggtagtggtgaggtgtggatgagggtgtgatgtgtagatagaggtggcaaggtgtagatggaggatgtggaggcagtgatagtgatgaaggaaggagttagaaggccttgtgcatgaagaaatagaagattgttgttgctattatgctgataaatgtggaagaacctgtcctcctttgattacacatgtgaaatggtgaaatttcaccattaggagtctggagacccttattctttcagagccatggtacctttgggaaatcacctctctgggcctcagtgttcttggagcagagtttgctctattaaatggcatttgtcagggggaaatctacctctctccctccaagcacttttgcctcaccttataaagtgggaacttctgtccttgctgcagccttgagaaaagtactctccacttactgctctacctctaaactcatgctatctagcagaggatgagtggttcgtgtgcttggagaattggagcacataaaatgggcatatgtcatgactcaggttcttctggatttcctccttctgggaacagcctcctcagagaaggcctgtgcttccctcctctcctcttcttttcaacctgccctaggaagggcaggttcttgcgttgtgggataggggagtcttccagttctgggtagataagtttcattctgagggaaagaattaggaagcccaactgtacattcaaaaccacattctccaatcagctttagctgtcataaatttattttagttccagctgctggacttctatatcttatttctcatttgattctaagcacagaggggttgtgaacaagtctcattctcaaagtccagcactgaagaattagtaaaagagtccacatagactgggttggactcaaggatctcttaagtttctttgaaactctactgccctacgattctatgtgtctaagtgaaattatcgctgaagcaaaataaacatacattgacagttctggtcagatgttgggactcttaatggataacttcccaagctctgactcccttctttcctgcttttcaactgcatgaagacctttgatcttcaggcatcttcctcttctccccatataccagctcctcatggcttcatttacttccccttctggtctggacatcataatgaatcctttcctctcttctctcattgatactcataacctcttattcctgccctgccaatctcttgggcaaaatcagtccattcgttaactttttcctcctgcacaaagtactcttttgtctctggaaaaagcctgtcttcagtgggagagagaaaagccaatacacagaatggcagaggggtgtccatttgtgtgtgtgtgtgtgtgtgtgcgtgtgtgtgcgcatgtatgtgcatgaaagagagagagagatgaggagggagagaaagacctagtcctgtgatgtgtatggccaacctcatccctgcccttccctgtggtttagttttgtaagccaaaaaatgttgagagaagatatggytaccccttttctctctgctccctgtcctctggcctccttccatgttacagccaaggacatgccaagccagccactcagctgtggcactgaagtaaatgcttgggggatactgtcaactcttcctcaccaccagagtggtaacagctgaggctcatgcactggtcttggggaaagggaaagaactggccccagtgttcctcagccacaggtgtcttcccctgggcacatctggcaatgtctggatctattttggttatactggagggaaggtcactactggagggagagtacttctggcctctagtgggtagtggtcagaaatgctgctaacgtcctacaaggatggcccccacaacaaaaaaattatctgaccccaactatcaatggtgccatgatcaagaaatcctggattagggcattcagtctctggttctaggctctcactcaggcaaaaggagcactcaacataggcccacctcactcgccagggatctgccaggagagggagctaaagattcttagtacagttggccctctatatccacaggttcctaacccaaggagtcaacaaacagcagatcaaaaatatttgaaaaaataaaaataaataacaatacaacaataaaaaataatactcccaaaatacagtataaaaaactatttacatagcatttacattgtattaggtattcgaagtaatctagagatgatttaagataaacagaggattgcataggtcacattttatgtgaaggacttgagcatcttcagattatgatatctacgggtggtcctggcaccaatcccttgcagatgctgagggatgactgtttgacctctgtgcctccattttcttcagatacctggtggacagtgatggctgctcactgggacggattcccttccatctcctggctaaatgccatctgaaccctacctgggtttgacatctgaaaggatttaggtaggtctgacctaggaccatggcatgggggcaaaattctttgaagaaaatagcagcttcctaccctggaaaggcctgcgggacttaggcccttgttaatgggactaaggattcatttgggggccctggcaggcttatctagaacctttacccacaagaagttccccacaggctgggcagtactcaccacagtatgtgcaatttttggcttccagattgtttgtgccaagctttggcaggtggtacaatattggctgccccagattcttgtctgctttagctgtttctgaaccatgtccagggttgagaagggaacatactgtgatggtgtcagcactctgcaggaaggtgaaaaaaggtgagagatatgttaaagagaagctgagacattgtaagaggccaagcccaggtgatgctgtggaggagttctctttcttcaccacccctatctacttcccaatcgctgctgtggcctatggactcggctcactctacagcagccacgacgcaagtcttgctgttcctctaacaccccaggctcattcccacctcaggacctttgcacttactgtttccctaatcttcagcctgacttgctacctcgtgtattcaactatttggtcaaatgccatctacccaagaaaaccttccctgaccagcccatctaaaatgcccctctctggtcattaactctgctttatttgtctaaatggcatttctatccaaaaccacagtatgtgtttattcatttgttcactttttgtctgttcctccaatatggcagaaagtttgtcttattcactgatgtatctctgatacctagaatagagcctggctcataaatgattgggtccaaatcctgactcaactaactgtggcatcttggacaacttcttttttttttcactgcaatttcctcaactgaaaaaaaatgcgaataataattatatctacctcaatggttatctgaatcaatgtgaaaccttaggtcaatgtctggcccacagggaatagttagtattaactaataatattattataattattacaccctcaggaagaagctcacatgtgtatcctgaggaggcggggagggggatgagcagtattcctagcagcttgcaggagcagagagtcttttttgcttctccaggaaccaagtcctgttctcccgtcttgcctgctctctgctgccctctggaggtctgcagtggagtcaggcagggagctgattcagggacgccacagattatgtatcctccacttcctatgggatagctgctatcattcccattttacagatgaggaaaccacttctcacagttgtaagtaacttgcccaaagtcatgtgatctcctgctcttaatcacatgatgaagaatgagacattgctggatgacagtctctctacttaagcaagctagagcccacggaggcatcttgggccttggcagagctgccactggagccatcatttggcacacactattgggaatcattgaggccacagaggaaatgtgggtacctaggaactcgttcttcagacagatccccaaatggacccagaaacagcatgcagccaagcaagggctggccccttccttcccctctccccaggctgtacttccttagccaaaggacagttctctgatcacctcagccaacctgagctaccctggaaagctacttctcaccctgtgcccctgtgcctctctctcagagcgtatgtcactggctgggccaaatgatcttcatgtcaacctaaaataagagggctatggaaagacatagcctctagagacatctgggagctgattaactaataagaacctggagacaccagcactgtctgatcaaaagatacaatggaggaaaagatttcattttcaataaaaacaaaaaccctaaaacatctagaaataaactcgcctagaaatgcatgttttatatgaggacacgtggcaaaactttgctaagaaacacataataagacatcatatttctggatgggaaaactgaatagggcaaatatgcttaagttcagacatttatatatattttaaatacaattccaagggcattttgaatgaaaatgaccaaaaaatcatggctaaagtatgagcttagaatgtactgagtttttactatgtgctaggctcagggctgacagctttacataccttacctcaattaatcctcacagcaacctcaagaggtcatttcatttatttatttatttattgtggagacagcattctcactctgtcacctaggctagagtgcagtggcactatcacagctcactacagccttgacctcccaggctcaagcgattctcctgcctcagcctcccaaatatctgggactataggcaggtgccacaccataccaggctactttttaattttttgtagagatgaggtctcaatatgttgcccaggctkgtcttgaactcctgggctcaagcaatcctcccacctcagcctcccaaagtgctgggattacaggagtaagccaccacgcctggctgaggtcattattaatatttatgaaagacaggttggggaagtgattaagagcaggagatcacatgactttgggcaagttacaactgtgagaagtggtttcctcatctgtaaaatgggaatgatagcagctatcccataggtttatgatgagtattaaatgaggtaacatacatgaaacattgagagcagtgcttggcaagtagaagcactgatatgaactactattatcctcatttacagacgaaaaaactaaagcttagagaggataacataatttgcccaagttcacacagctgataactggctgccctggcctgggggatgggaatagggagtcttgcctacaagatctgaaaaattataaaatcataatagttaaaacaggaagcacatcttgtataagatatttttatatgccttgcaagattatgttctgaaatattagccaatgccttctccagcctgatactcccyttacctctctcccttccctgcctcaaatagccaggccattctatgctcattgctgcagggaaggtgtgtgaaaacagaaagaagaggtaaggagcctctttccttaggggaatagaagagacttctggcctagacctagaccaaagtgtgggagaaaatggtcatgagaaagatcaaggcattccctgcccctcactcatatccaagaataattccccagggcaaggacaaaggctggagggaagttgagaaacattgactttgctaggtcctggaggctgaggtcccaatccccgctccctggactgagccccacagagaaagcagcatccctcacaatctgtggatctgagagcagggaacagaacagctgctgggtgtatctaggccaagaggaccccaggcaagctccctgagtgaggctgcttgaagaggtggagagrgactttgacctccacaataacctgcaggcaccaacgacccaggaccagatgggacaaggatagatgacatgaagggcaggaccctttgtaggtcactgagagtctagaaccctgcactccaccccaccccaaacccaaaatggaaactgcaaaggaaactcagaactgactgggattaagggtcagcacctttttaaagagcggggctcaagtacagatgaaggagaattttataaacaaactaatttttttacacacttgagtttatgggccgaaactggtattctaaaggataaagttttaagaaaatagtgttagggaaatgcactgtttaaaaaatccatttagaagagaagcttgggcagcggacaaaggcagcaacttaaatcattcgcagggctcagcacatattattgatctctgctccgaaattaaatgtaattgttccttaagattgagcttgaatttgcatcccgatctgccttggacagtaactatctgcccctgttgtcttggcttcataattagttgtgctcctttcattctcaaaagggtcccattttgagcagtaaattatgtggttattctgcctaagatctttaaatgagagtgatcccatgggtgggctgactctgaactaggtatcgtgaaacagaaagtaaggctttccaggcaggtgtggctggagcccagtggcgcctgacatggagcctctggagggcagagaacctcagctggatgggaaaggaaggtaaggtaaagggcaggtggggcrtcaagagagggtcaggtgcttggtagttaataggacagtggcgagatcagagtagaatgtttgaatttaatatttcagagatggagcagctaaggataatggtgtggcccaggttttgaccataggcataggagggagaaatggaggcaaatggaggcctgattttgtttggggacaggaactgggcactggggagacacatggatgggggtttgtctctactcttgtactcttcaaattttgaatcttgtaactgtgttattttaaaaatctacaagtaaaattaaaatgcaaatcagcaccacaatgaaataccattttttacctttcagatcggcagatatcaagaaatttttcaacagtgagagaggagggcaatgggccctcatacatctacttgccagtgagatgcagataagcacagcctcgatgcagccagtttggctgtatttatataactttaaaatggacatacctggccaggtacagtggctcacgcctgtaatcccagcactttgggaggctgaggtgggtggatcacttgaggccaggagttcaagaccagtctggccaacatggtgaaaccccatgtctactaaaaaaatacaaaagtcagccaggtgtagtggctgtagtcccagctacttgggaagctaagccatgagaactgctcgaacccagtaggcagaggttgtggtgagcccagatcgtgccactgcactccagcctaggtgacagagcaagactccatctcaaaaaaataaaaataaaaataaataaataaaatggacataccttttggtagcagcaactctttatctggaaggttatcttacactcccacctgtggacaaaaacagagatgtggtttgggacagttactcacctccctgtgcttatgtcacagttgtagtgagaattaaatatgatacatgggaaggattttaacaagggcctggcacatggtaagcattcaggaaatgctggctgttatcatccgagcattgttcacagtggcaaaacattggaaacaacctgaatgtccatgaataaaggactgattttaaaaaagaaagaaagaaaaacaagttttgtctctactttggaaaacgatgaaccttttaaatagaatgaggatattctttaaatggtgctatggaatgatttttttagaaatattgttaggggagggagagcatcaggaagaacagctaatatttgctgggcttaatatctaggtaatgggatgatctgtgcagcaaaccaccatggcatacatttacctatgtaacaaacctgcacatctggcatatgtacccctgaacttaaaataaaagttgaagaaaaaaataaatagatttttaaatttttaaaaaagaaatattgttaagtaggaaaaagggaaagtgtagaagagtgcttatggctgtcatcatgcctgtgtagagggtgcctatgggtacagtatggtctctccagggaagaggtcacagaaactggttacagtgatgcttcctgggaggggaacttggaggtcggggctcagggaactctatgacttcttgtaccttttatattgtccaccatacagaggtattccctattcaagaacaattaagtaaattccacttctgggtatacacccaagaaaactgaaaaccaggattcaaacagatagttatatcccaatgtgcatatcagcattcttcacaatagctaaaaggtagaaacaacctaaatattcatcaacagatggataaataaaatgtggtacatacatacaatcgtgattcagccttaaaaaggaataaaattcagacacatgctacaacatgaatgaacttaaggacatcacgctaagtgaaataagccagacacaaaacgacaaatactgtatgagtccacttatagaggtacctagaattgtcagatttatagatacagagagtagattaatggctaccagggcctggggcagtgagaaatggggagttagtgtttaatgggtataaagtttcagttgggaatgatgaaaaagttctggaaatggatggtggtgatggttgtattacagaacaatgtgaatataattaatgccactgaattgtacattcaaaaatagttaaaatggtcaatcttatgcttattttgccataaaaggaaatcattttaataaaaatatttctttatcactttgattggagctatgttaaatgtagattaatcacaaagagctgtgttgtatgagcaacaacaaaaaacagtcctatccaaaaaagcrcttttgttctccaaattctggcattttctatgctaggcaggcctgctctgctttgctggctggctttttgggggttcatgttactgagcagcgatgaaaggctgaaccaggaccaggggaagagggtagcttcatccaagatggaggagaaatgggcaggaaagagatgatgggtgggggcagaagcagagaaattcccatggggccatgaggatgagataaatggggtgggtgtaggaaaggaatttcctacaggggtggaaaaagctggcctttgaggggagtaacagaggagttacagcaagaatctgtaaaagaatcaccatgttccactggtgagctggagatcacaaacgtatagttttcatattcttctcacctcttctcttccaggcaacaaccctgacggggttgaggaccctggttagctaaataagtgaggaagagtggaaaccagggactccccatccagaccaccatccaccacgggcctctgttctttagcagcaccagaagaggctccactccaagtcaagattgaagtggtatctttaggtaggactggaaattataattattaaaatgagactgagaccaagggtggctggaacaaccttgtgacttgcctaaattccattcaggggcaaagcaagagctagtcccaccgaataaatgtaaaagaggctgggtgcagtggctcacgcctgtaatctcaacactttgggaggccgaggtgggtggatcgcctgaggtcaggagttcgagaccagcctggtcaacatggtgaaaccccatctctactaaaaatacaaaaattagttgggcgtggtggtgggtgcctacaaccacagctactcaggaggctgaggcaggagaatcgcttgaactcaggaggtggaggttgcagcgagccaattattgtgccactgcactccagcctagcgacagagcgagactccatctcaaaaaaaaaaaaaaaaaaagagtaaatgtaaaagagcagtaagagacaaaaatcaagctgctttctgattttaccacataagtcatgtttgttcaatggaacagtgcacattagctttaattgttaattaacacgcatctgttaaataaccttgtatctgactttggattttaagctttctgagggcaaggaccatgtgctgtttaaccccacactgttcccacagcctggcaaagtgcctcaaatttacacagggggcactgagatggctgctgagtgaattgctgaccaagagggactgccccacatcaggcagcccatgccattactgtgctcacactgtgcccgacacagagcaagggatcataagtcctgggtggcttgaattgactcttcctaaaaaaagagtctgtgatctaggaagtccaatataaaaagatgttgcggattgcccagacttagagtaagaggggcagaaatgaagtaggcatggatggtaattttgtttttccatcagggctgctcttactctggagtaaggagaggaaggctaagacacaaaagggggactccgcccaacccagcttatgtcctgtgataccagaagggagcattgcaatgacctattaaacctcaaaccaagctgaatccatttctgagtaagagactcttacagggctcctgtcytcaaaactatataaaattgctcaaattatgtacttctgagataataaattagcagaagaagcacatagcccacctcttaagatagggaagtagatctgaagtagctcaagaaacaaagttttctacagatgaaggatgagggaaggaaacccaagaccagttgattctggtttgggaaatgataacactggagaacacactctactatctgtttcttgtgacatcctttgtgctaaagttatctcctttgttggcatggccaccatccctacttctagtgcagtggagatgtatgagtgtctccattgctaagtgtttagttactcaagataaacttgactggagagggtgtgggcaggcattcagtcaagcaacaagccactcamtgagtgccaccaatggtgtgggaaaagatgactctccttagactggtccatccaaaataaaggaggtggggagagcatacctgggtggtcttcagggtactcctggaaacatccatcagctcatgagctcacagctgaattccaaatcctgggatgcctgcttggagggagggtaaaacaccatttctcagggacagaagcccacaaagctaagggcactgggtttctaagtcaggatttcatcacggctggatgacccttttttaaggaaagccagctgatctccaggactcctgatacataagagctatgcagtctgtcacttctagggagagagatggggactagctctggttcctcatgcgttccttccctctcactccctaaagacctcaagaaacagatccttggtaacaatgccttctttgggccagaaagcttagttgaagtgtggattcttatacaagtctcatgttttctggactcctaggagactcagaggagacaccataggtaacccttattgaaytggaagaagtgtgaagtactatcaaccactgagactcccatggctcaagaatatgcacagaggtctaactagatataggtctcagcccctgactttagaagtctgacattccacagatatgcacacactacacgctcccctcacagaggaaactggagtagggggacacagcagaacaaaatcgcaacactactacaggaaaacctcgtcattccgttacttgtcctttgctatgttggaatasttatagattagtttcaacaatcaggttactccttatctttgctctaagtcttgtacaggcctttagcaaaaagcaataaaattctcatctgactcttggtgggctggggaatctgcctattctattcagttggttcactcacatctccaaaccagaacctacaaccactctgtaactttatttatgtaaaatccactctacttaccccagtgcagtggcctgtggctcctgggccctgactccaattcctttagggtggaccttgcagttggaaccatccacctctcgttttttctatctctgctattaacatagcccctcctctattgcctcaccaactattttcaaaccaaaaagtctttgtctattcatagccrctgtaaaagtaacattcatttttctgttttttaatctaatgtctgcgtcttcagtggttctcactggctaatctaatcagtgtgttctagggaggtttattccttgcctgttcagcttgtcccagcacaacaaaggtaagtcatttgcctggggagaatcagctcttttaaatcagacaatcctcaggaaagatgtcaggacttttgcctcttttcttcatgggactgagattcaggagaacattccacattccactgccacacagctctgcaaaccccaaatcctgactctccgaagaaggatatgggcaaggaaaacaaagaaggcatttgaaaaaaccaaaccttgcaagaaaaactttgcgtacttggtgatttttccaggtttatcctgacttttggcctctgtttttatgaattccatttttgtttaagtgaaaaagatacggtgagagagacatagtggaaaatgggaagtttggaggaagatgggaaggaagaagccagtgagtaggaagtgasaatcgggagtggagggagtgagggacgcggtgctgagcgatggggaagagaagcatgccaggaaggcgcagcgtctctgggcacccagcatggggcctggtatatgcacacatttcccctcattgaactctcaacagtccagtggggagagcattctcgtccccaaccttacagagctggaacagaagctcagagacttacagacaggaagaaaagtaggagctggaagccccattaaaaaagcaactctacccctcttcttccagtctcttctgtggcttctctaagggtcttcagcctccttatttcagggttgaccttctctttcagataggaaatttatcatctggttggatatcctcactttcttcctagatcacgtggagttttcccttagtggaaaagcctcattcctggatctagagcctgctggtggcagacatgtaaaaaacatgtttcggaggccatgcccaagccaacacattaacccaacattatagtttctgttaataatccatggaatcaaagacaggcaagactagggagatcaacacatgctgggtcaccagaggctttcctggttttagcacagaagatctgtgacccaggaaaccccttagtcccaggaagatcagcacagcctaggccagaaacagtttcgggccttagggaatttccagctggttggggattcaacaaattcagaagagtgtgaggctccaaaaagaagcacaaagggagggaagggttcagtgaaagaaaaatcacccttgtttggaggattaccttgttccacaaatgttcatggcttacctaccagccccatgtgttaaagaaaagctttgtggagaaaatggccttggagatgcagtgaagggataggataggggtaggatttagaacagtagaactaccaaggggtatctgaggcagagggaagaagccacaaaaaatatagacataagaggtgggagaacatagcataaatatcctgagaactggagagcagtttccctggcacagggcaggtttggggaaataaagctttgggcatgcgacgataggctgggtagtctatggagaggtgtaaacatcagcaaacatgtctgaagtgaaaggaatgtggaaggggacttggtacaagaatggaataatggacttcacagtggattgtagcacaggtggaaagaccagttgagacgttactgccaagcattcaagtgaaaccctttggtttctacctacccaggttttgttcaaataatttggacatttatttcagacacttcaggtttggggtttttttgtctctcacttcacacaggaatttgagggtgagcttcatctggtttggtgagggtattggaaggtatggggcaggggctgtccctccaggatgcacaaagggaacaggtttgcaggctcaggaatcctcctaatggaggaaggaggaaggagggaggaggacctgccctggcagcaccgtgctttcttcctcgtgtctagtgtccactgggatttggctgctgcactgcttgtctccctgtccagacctaatgcctcgttagctgttaaccaaagcatgttccttacttatttgagaggctttctaccttgccagagaaagacagccatttgaatgttctctgtgagaaaagggaaaggcagtgtggcggtgtgagaccacagcctgaagtccccgactgccaccacctgccacaatatcctgctgccactccccagctctgctgtctctaagcctcagtttcccacatgaaccaggcgactaaagtggggatggcagattttctctcagaagggaaaagtgctaggcgtcaggtccaaagaagtatactgtaaacccctcctcgtattccagcactgctttggaatgctttttttttttttttttttttgctttggatatttttcctttttactttttttttttcaagttctctcatgaggttgcatactttactttttttcatttaaaaaatgtagttccagttggacttagggaggaaagagaagtaaatgttaacagttcactttacaatcttgaacgaattttttacttaaggttgatttaacttggtaagtgtattttttgtgaatttcctattcatatctatgtttctattgatgtgtttcttttttctatttatttatttatttatttatttttgagatggagtctcactctatcacccaggctggagtgcactggccaccatctcagctcactgtaacctctgcctctcaggttcaagtgattctcatgcctcagcctcccaggtagctgggattacaggcatgcgccaccatgtcaggctaatttttgtatttttaatagagatggggtttcgccatgttggccaggctggtctcaaacttctggcctcaagtgatccacctgcctcagcctcccaaagtgctggaattacaggcatgagccaccactcccagcttctttttcctatttatttgtaaaagttacttatttatgttataaatatttttctttttctttgtttttagagaaagggtcttgctctgtcacccaggctggaacgcagtggcgcgatcacagctcactaaaacctcaaactcctaggctcaagaaatcctcccgcctcggcctcccaattatagatatttttctgtttgtcatttgtcattcaattttgtttgcagtctttttctttttcttacaggaaggtttaatacgatgtgtgtgtgtgtgtattttaataaagtcaaatttatccatattattctttaaggtttctagttttgttgtcaatcttagaaaagttttagccatccccaactttatatacaaaataaattttctttatatagaaaatctgtatgttctaaattttcttctagttcttttccggtattgctttgtatatttaaatattcaatccatctggactttggtatatggtgtaatatgaggatttaacttgtttttcccaagtgttaaatcaccatttgtaaaattatgtaccctgtacccaccatcctacaccctccttcccaaaggggcagactgaaatccagccgaggggacccatcctgcttgatcacatactgatgtttctatgtgcttgagtctgttctcagccaaccaacctgatagtaggccccgtgcccagtttccctttcttaccactcactcatccctcaaaccactgtgttctgatttctgctccttactggtcacagacatttctgtggcaaagctcatcatcaaacttctaattgccaagtggacaattagacagtggacacttttcagatctttgcttgatagacctctctattacatctggtgttattgacaattctttcctcttttttttttcctgtttgttttgcttggtatattttacaacttgtgggccattcagtatgtgcatatttatctttgttaaatacggccacattgttttccagagtggctgtagcacttcacacacctactagcagtgtgtgtgtctaactggattatttaaggataagagttgggagatctgggatgctctggttttctgcccccagggatgtgctcactgtcccctttgtgctgtcaccctacagatctctctcctgtgagcttgagtcctgctgctggcctaagtcaaccccaccactatcactaccaactgccaacacaaaccaagagacagctttaaagactaaccttcccaaaaccctgtttttgcattttgttccctgttccagaattgccagtagcttcccaatgcagtcaaatacagtctgaactccttggattggcactaatggtgttctcctgcctggctttctcattccttgccagccttatttctctccctgctacaccctcctccccaaaggggcagactggaatcccgccaaggggacctatcctgctgatgaggctgtaaaccagtacagccactctgcaaaaacaatgtggcaatatttaataaagatgaaaatactcataaggaatgacgaagcaatttaactccttacagaaacttttgcatatgcgtgccaaagcacatgaacaagggaggatatttatatagcatggtttggaggtacctgaactcggaagcaacccaaatgtccactggtagtggaatgggtatgttctggtctcttcacccttcttcactccccttgcctcctcactgaacttacacagcatgttaatttttcagataacatgtcttcatttaaaacaggagcccaactacctactttccaaaatagagagcattttttttccactgaaaaatgaatttccaatatcactatgttaatatgtataaaaactggacaggtgcagtggctcacgcctgtaatcccagcactttgggaggccaaggcgggtggatcacaaggtcaggagttcaagatcagtctggccaacatagtgaaaccccatctctactaaaaatacaaaaaattagccgggggtggtggttgtgagcctgtaacccagctacttgggaggctgaggcaggagaatcacctgaacctgggaggcggaggttgcagtgagccgagattgcgtcattgcactccagcctaggcgacagtgcgagattctgtctcaaaaaaaaaaaagtataaaaattttgtaaaatggtgtggtcatgttttatcatttgttaatctaagtgtttctttttgcgtttttaaaaattcacttcttaaaatgtgtgtttacatttttttaaatttaaatatatatctaggttttcagttctatgttgtcaaatgcatagtctatcctttgctttttgctttttacaaaggaataccaagatgagttacaagtgatttatctcagattttgttcactgaggcttagagtttactccatgagttcatgagggttcagttccacctattgttccttgctcaattgtttgagtaggtcctgattacctgccagatggccagtcctgggctgatcttttctacaaagatcagaagggtctcttctggcaaggcaagcctggcttgtactctctgtggaaacttaactagccatggctgcagctagagggcccagccaaggatctttccaaatcaagtgtctttggctgtcaaatatgtaggtaactaaaactccaatctctgagggaggacagtctgccctatctgaattcccttgtcttctagaaagggtcaaatagtagtctaagcactcagggagagtgaacacttttctccttgtgtctctgtcaagggcagggaacactaaaccattagtaataacgtagtctttaaagtacattaaatcagctaagttaactgtttaaccataagttcaacactcctttttttttcttttttgcattccatctgttatgcaaaaaccccaatttttgattgatatgaaatgaaaacatagaaataacaggcatgccataccatcaagagaccaaccactacctcatccaatatttcacccctctccactccaattgttttgatctctttcaatgggtgacttcacagaattgagatgctaggtctcaccaagatggtgacttttatggccagcttctctgggatgagtaggaattaccatttcctacaattcccagatgatgctgatgctgttagtcagaaaatcactgctctaaacccaactaataatttacagaaaatggagaagacagaggaacttattaacaccatgaggatgcattttaagaaaatccagattctgagaaatagttctttcaacaaataaattataaggaaaaatcaagcaagaacgaacctagactgcctgtgaatggccactgcattccagccttggcaacatagcaaagcccttctctgaaagagagaaagagatgatgatgagaaggaggaggagatgtttctaagcaagagactggactggaggcctcaatttactcccaacgtcatctggaggtcacaaagggcagagagccaagatggcagcccaaggcayggtacaagcctatcttagctggtgtcaatgtctactagattctgccccaggcctccaacaatggctacaggctggaatgtggaccagcctgcttagtcttcaaaagggaagactgcctatgtcaactcaagtataaaatatcaggagagctctttgctcgggcaccagtagaacaatacgctgacactgctgagacagtgaaagattacagcttctactttgkaatgtggttctaggatgacactgagcaggtatagtgctttcatcggcattggcttcacagatgagggtgatgcctttgactttgataacttctgaaaaagcaccttaaatggataaaacaggtatctgagatggccaaaggatctcttgaaatgaacactcatcccaggttggatctgggctttaaggaaagacagaccatcaagttgagtaatgggaacattacaaccaaggaatgatgagcttcagccaggtgcagtggcacgcacctgtagtcccagctgagggctgaggcaggaggaccacttgagcccagaagttggggactgtagtgtgctataaccatgcctgtgaatggccactgtactccagccttggcaacacagcgaggcccttctctaaaagagagaaagagatgatgatgatgatgatgataatgaggaggaggaggagatgtttctaagctcaggactgcaagagactggactggaggcctcaatttactcccaaccccatctggaagcaagttactcttcccctccatcctccaaggatgttgcctcaccagctgttccaattctaaccatggagggagtgatgcagatatccttttaggctgtgattcttctgctcctgtcatgacaccagcaccagctgcagtctctgtgagcaacgacttggagagactttataaccattctgtcccaaacctggcatcagagccatccaactgactccagatctgaatagtactggcaagacatcaaggacagacttgaacaacaaaaatgaccttgagaaaatggggtagaaaatcacgtctctgaggaagaaaatgaagaaggagcaaagagcagatcttgtaaaagaaagactgtttcctaaagaattatgatgtctgatatatgggtttggggattatcagaacccttacactgagccaatggatattcctgaagatctttttatagagttcatcaatgaaattatgaacttccaacgccagttagaagatcagatcaagtacaagttgatgatactgtcttcttaattagaaaggacccaagaaagtttgctagagttaaaagacttggttactatgaatgaataattgaaatgagctagaaaagcatctgacaragtcaactatgattttgacaccttttgtacgttctgaagctccattattttctgggacaaccatatatagtaactaaatatttctacagtaaggtcccgatatctaaccatgtaaatgaaagatgaagaaacaaagttttcatattttcaattttagaatgagactttaacgcctgtatttatattaccatacttgaattattcagttttaatgaccacatgtaaaggaccttgcaaactgtgcagttccttctttttactacctaaatgatgaaacaacacaatatttttgttgagtgtttgtgccgctgtaagctacactacagctgtttaatatgtgaaatccagataggacctttgactcaccatagctgagacacagctctgtcatgtattctttagtttctagacagtatcagacaaattattaaagatagtgagctgttttatgtttctcttaagtagatataggaaaagtctcttttaagaatgtttgtattaaaaggtaatttgttttaatatcctttttttcagatagcaagtgattttttggagaaactaagtttcatgtgaaggcttcagtgttggaaggcttttccttttttttttttttttttctgagacagagtctcgctctgtcacccagtctggagtgcagtggtgcgatcttggctcgctgcaagctccacctcccaggttcatgccattcttctgcctcagcctctgaagtagctgggactacaggcgcccgccaccacacccagcttattttttgtctttttagtagagatggggtttcaccgtgttagccaggatggtttcgatctcctgatcttgtgatccacccacctcagcctcccaaagtgctgggattacaggcgtgagccaccacacctggcctggaagactttttatttttatttattttttgaaagagtctcattctgtcacccagactggagtgcagtggtgggatctcagctcactgcaacctccgccacctgggctcaagcaattctccagcctcggcctctcaagtagctgggactacaggaacatcccaccacacccaactactttttgtattcttttgtagagatggggtttcgccatgttgcccaggttggtcttgtctcaaactcattgactcaagtgagctgcctgccttggtctcccaaagtgctgggattacaggcgtgagctattgtgcccagcctttggaaggctttttaaatttaaaagctttgaggtttatccatactatttgtcaagtttttggagaatttgttttcacagatcaaagcttctaaaaatgcttttagtagtagttggaatggtgttgctttaaaagttggtgacagaacaagtatttggtgttaaacaaacaagtattgttttattaacgtatttgttagtactattcattatgaaaatgaatccttatctaaaaccatatgtggctatggaaaccacttttgtagttcagaatatacagattttgtgtgcatttagctatgttacataaaatcatcactgcacttagcttataaggattgaacttgcatttaaagggatcaatcaatgctactgtttgtgaaacagaaagttttgtgtgccacttataaacattatctataaatcagtacttgggaaaattctactttttttttttttttttgagacagggtctcgccctttcgtccaggctggagcgcagtggcgcgatctcggctcactgcaagctctacctcccaggttcacgccattctcctgcctccgcctcccgagtagctgggactgacaggcacccgccaccatgtcgggctaatttttttgtattgttagtagagacaaggtttcaccgcgttagccaggatggtctcaatctcctgacctcgtgatctgtctgcctcgggctcccaaagggctgggattacaggcgtgagccaccgcgcctggccagtacttgggaaaattctactttcttaacctattgataccaggaataatttctgaaaaactaaacagaaataaaatgaccttgggagcaggaatctttaagaggctagaaactccttcccttcccagaactacaattactaaacaacctttttcttagcttccccattatattcaagctggtttatgtcattcccctttgcagttacttgctgtgcagccaagagtgtctgccatctcctgctcactaacaagccaggaactaatgggtcttaccatacctgcggctatgaggaaatgacccctaacattgtaaaatttttctccaccttttaaattccataacttacttcagtcatctcatggctctcatgtaccctttgtgaagtcctatttagcaatttcaggggacaaaaacacaaaacaaaacaaaaaaacccttgctacttcctactccattaaaccaattctctgaaaatggatacacttgccttcagtgtttatagatccaaaattttgatgggtatggagaaatatctcttatatacccttcttcaccacatccagtgctgagtgcagctccactaccctcgtgtgtttacatgtctcttcctatgatacaaaggtgttggtagcacctccattcttttgtttgtcaaaaagtgcaacatcttcagccagtgggtatggcttagatgaaggaagttcaaggggatgttctaagttatattctagaagtgttttttttctccatccagctgctgcaactgatggaaggctttgctttgtatttgccccattattaaatctaaaataaaaaagtttagaatttaacctgatttgtggagcagagaggttgcaagcacttaactctcattcagtatccatgttgacttgctgcctgggtatctgtctggccacatttaatagacacgttttttcaatccattagcacctcagtaaaaatctgctacatctttcatcatttgtaatgatggagagtcacagcttcagccatttgacaggtttcccaaagtgaaggctttgatatccatcacctagagcagtggtccccaacctttttggcaccagggactgatcatggaagacaattttcccatggaatggggaggagggggaggatggttttgaracgaaactgttctacctcagaccaccaggtattagttagatcctcataaggagcccacaagatcccttgcattgcagttcacaatagggttcacacttctatgagaatctaatgcygctgctgatctgacaggaggcagagctcaggcggtaatgctcccttgcccgttgctcacctcctgctgtgcggccaagttcctaacaggccatgcacccagtactagtccatagccagggactggggacccctgacctagagtacctcaaagcaagtgaccctctcactactttccctctgccctgctttttcttatacattgcttgaagagagctcccttttctaggtcaatgggcattacctatttggtttgttaagggcaatctgaggaagaaataagatgatacaacttctctccttagcacctgtttgcatgcttacactctgaatgaagaaattttattttttttatttttattttttttttgagatggagtctcgctttgtcacccaggctggagtgcagtggtgcgatctcgactcactgcaacctccaccttccgggttcaagtgattctcctgcctcagcctcctgagtaactgagattacaggcgtacgccaccgcgcccagctaatttttgtatttttagtagagacagggtttcaccatgttggtcgggctggtctcaaactcctgacctcgtgatccacccacctcggcctcccaaagggttgggattacaggcatgagccacgacgcctggccaggaaattctatttagtttcaaaatatattctctcttcttgacttacatcttttcatcttttcctaactttgaatccattttttttttcattgcactcccattccagacagttctattcttgcacagccatggcaggacatctttaaattttgatagaaaatactaaaaggaaaatctctataatcccagtgactaagtactgggagcctatgttctcaatcttcctccatattgtgttatttgcattatcaaggtgataatgttatgtatttgaataagaagaacgtatataaagcaaacactgtattagtaaaataattagaaaatagggggaagcagactcaaaagacatctatttgtagtgtattgtctttgtcttaaatctcatccaaataaacatactgtaaaacaaaacaaaatgtttataagacaaccaaggtaacttgaatgctggatagctgatgaattaacttttcaggtgtgataatggtattgtagttttcttttttgaagagctgtatctttcagggatactaaaatacttttggatgaaataataaggtgataagatgtctgagatttgcttcaaaacattctgggagaagaagggggaggaaaggggatatagacgaaacaagatgaaccatgaaatgaacatatattgtatgtgtaagtcattacactctcctctcatttgtatgttaaaattttccataataaaaagtaacaaaacagagggtgagagacatctatttacactggtacccgttatttgagcaagagtccaattcccacatccaaactccccagccttcggaaaaggaatgtaggccaaacgtcccaggctgcccctctgaggacctctgtccctgggagtagcaatacctgtttcgggtggcacggatgatagagatggagggaggctagatgaatggtcatgctacccatacacatagaaaagctggctacatgaaacaataaccacagagaagcaggagggaccactcaccctcagacttaagtgttctccaggtgccctgggcctatacttgacaggggccaaggtcacctgtgctataaaacttccagagtacctgggctatagagcatacttgttcctaattcactttttgcctcatggctgtgtagggtagactcagctctggggccttgtacatccttgtacattccctaggattacccagcagcctatttgggtctttgtgttgccccacccctgctccccactgaggcagagcactgaaaatgtgaaccaaacaggtgaatgcaaattgtgggagtggggtgagggacgtgccaccacatttagactctctctctcagccttggcctgctaaaaggaggagaaaacagtgcctggatggtagaaaataagacagtagctgcccacagaaacaagctgaaagctggggcactaagggctacctatccttcttcttcttttttttttttttttgagacggagtctcactcagtcgccaggctggagtgcagtggcgtgatctcagctcactgcaacctccgcctcctggggttcaagtgattctcctgcctcagcctcccgagtagctgggactacaggcacgcgccacaacacccagctaatttttgtattttagtagagatggggtttcaccatgttggccaggatggtctcgatctcttgacctcgtgatccgcccacctcagcctcccaaaatgctgggattacaggcgtgagccaccgcgcctggccagggctaccaatcctttggggctcaaaagatggttatgtgtgtcacagtgtacatcttgggaatgtgcttctattttgtttccttttcatttgtttagtatcagcctcttccaggtatccttttttaaatacctgtatcaagcatgctatgttatttaattttctccctgaagattacctaagaatatcacctgaggaaggtgctattggcctattacaaatacagaaactgaagctgaaaggttaagcaccttccccacgttcagacagctcaatagcggaagagatggaatataagccctattcttatttcacaaagctgcctccatgctggggcaggtaacgttaaccctaggaaactgcccaaaacccaccaaaagagagaagctcctagggaacagagttgagaatgttcataccctgcccctgccaactgccggtctgcttggttttgtcacactggcatttctggctttggatgaatcaaaggtggctgttactatgctatactccatccttggtacacagagcacctcgccaggcctctcccccaccatcacatccccagtttccagaaatcattcccctggtcatctgcctggctatccattctccacaatccccatgaatggatgctacccaggacacacagtgagcatgagctgctgtctcccctttcttgccaccacaacccagtttgtttcctctattccatggagactgccctggccagctcatcaggcatctctgaatcacaatggccacttcccagaacttgattgccctctgagctgctcaatctctctcctcccttggctctgtgacaatgctttctacaggggccctatgcttgcagtggatgycccttcaggctgcaggctctttaactctcagggcttcccagggctctaccttcccttccctctgaatactctcctgaggtaacttgctgcttcagattctctcagcctcacctgactcccacgtctccagctgcttgctctgtgctgactaactcccacaggccggtgaccacattctgttccccttgccattgcaggacttagattaaatgccatgccgcaaggcatgggatctggctttcgcagtggccaagaaatatcatcccagcaagaaagtggggagctaacactggctccatggcaaactttgagcagtaaagcatgggcaggaagcagaacaggtgaatttcccctccatcaatccaaatacaatgttctagccagtcatggtgtttctgtgtagtctatccagagacatccaacatgggcaagtgactagctgtctttgtgaggcaggagccaactcactaacaccaacctttgattttcttttcctcctttccctcactctcgctgctctgagacttcaccctccaataaagtgctaacactarctttgcctcagattcggttttcttagtaacttgaatacagacagtaacctcacccaaaccatgccttcaaccaccattgatacactcccaactcactccccaaacttttcctatcttcaatctggacatccctgmtgagctccagacccagcaggttccaactgccaaagggacatctctgcttgtacattctcacaagcacctcaaactcatgtccaaaataaaagtcatcttcctcctcctcaaatacgtgccctttacttgtatttggcaggatgcagagatggaagacaccctaaaggaactcctgtctgaagtgggagaggagttaactaacacttaaaatagaaacagatgcttactggcataaagtagcgtagtaggagcacatactggagaagagaagcaaggctactgtgtgccagcacagtgcttgatgcttgcatgcactatctcatttgaccttcataacaaccctgtaagatatcatttttccattctgcaggtaagaaaacagatcagagattagaaaccttgccaaagtcacaaagcaactaaatccaagcacacctggaaaaaaggtcggtatcttttgctgcctcaagargaggagcacctaacaggccatagggattggaaatttcctgagatggcattgccagagctatcttaataaatggacaggatgtcagctgaggaatggggatggggcgagggcagggaggtagagtggagggaaggaggtagatggcattctgggtggtgggaagaggcctaagagagcaccgggtggcaagcaaactgcaggggttcactaaagctgaaccacctggcacatcgggagaggctggagaggcggacaggacccaaatcattgatggtctcatgtgccattctagtgagtttaaattttaaaatctagacacatagaggaaccatttcaggatcttatgtaaattttaaatctagttgaagaaatcatttcaggatttaaactggggagtgacatggcccagtatgcattttggaaaggtccctcatatcgatgtgtagaactggttgaagaaaggcaatggaggtagggtaaccagtttaaaaactgctgaagtgcccagagcaagaagttatttatagacaaagttcgtggatgtaaaaaaagtggaaaaatttgagagacagtaatgaaggacaaactgaacaggactggataactaaattagctaaagagatcaaagaaggagtcaaggatatccaggtttgtggcttgtcacatgtaggacacagaagagatgatttcagttttggacatgctgactcttaagatacctgtggggcactcacagggtgatagccaacaaataattgggtgaatgaattcggcattcaagagagcagcagtttaagtagtgagaaactgccaccaagggaaaaggatggaacaaaaagccccattctcctttcaaagtgccaccagaagttgcttggcctcggtgtcttaaccacaccaatcagaaggcaggtcagcagcttgggtagaatccaatcccaaggaaaggacagtgtggtctgtgatttccttgccctagcagagcccaatttggagacgtgaggtgaagactctctggttcaagacacaataataacccttctcaaccagttckgtgagaattaatccctcatatgtaatgcattacatcctatgcatctggaatgacactggttgtgtaccatcattgagagtattgaagaaaagtcatcaaatcattttctctcggaatcccaggtgagaagagccaaggtacagagcaggcattcaaacgccataacccactgacctcccagacagtatagtcattgagaatatggcccctggacgcccaacttcaagcacccctcctcctgtctgcccttcccctcaagacagaaagcagaagagcagagggtctggcctagtttaggcctagcactctgcagggtcaagggtctctttctgcatctagatcagagccttttgggagtctgaactggacttctctccccaagagggaaaaaaagagaatataaaggagctagccaactaatctaaactggggctaatatctacaatgctggggtgctgtttaccagcctaatgagtcccaactctgcaagtattttcagtaggtctgggtcaagaccagaaatctgttacattttaaaagaaactccccaggtgatactaatttatggtggggtttgggagtagcttttgtacctcctatcctttactagtatgccactttagttttcccttatttagtaaatattccctctgagagaccccaggtcttatgggaagactggccagtacatcagaaaattggctggggtggtgatcatatcattactccagctccaaaaattggactaaagagcagtggaagctacaggaagcagaggcagggttggcagaggctacaccctcccagccctcctgactccataaatgaacttaggtacctagtcctaagtctagccctttcctccttggttagagtaacttactgcacatgaattttagaaacagcattcttctggtcactacgaagaggagacctcaaatttgatacagccaaagcttcctcagcatcgcttctcctccactcctgctgtgagcttaatggcccaagtcccactctcaacaccacacaggaagcactgaagcaraagttgctttaatcaaggggtgaagtcctcaatcaaggggacctcacttaacctttggtggtggggtctcagcctaccccccacaagccctgaggcccctcaggaaggagggagcagttgaacaacaaattatggcagaggccagggaatgggagtgggggaacccgggtcaaggtgaaggggcaggacgctgaaagggtgggagtgaagctgaacggggcaggaagagcttaacccacgtttctacctgggggctggctgaggtggctgtgcatcgggcagagcggcaccagagggctgagggtcgaagggracagcaggggaaaggagtgcttaggagatgaggcgactgtgaagctggtgcagctgctcctgggtcagcaccagccggtgtcgctgtccaaaaccagccgcacatgagaaggtcactttgcccatgtagactgtgtcatcctgctgctcctccttggcctggtggttgatgaggagaaaaagactccaggtcaggggctcacttsagctgtgggccactgaaggggtccctgagcactgagaccaaggcagctcctgggtgactagggcttctgagatcctgggctattgtgaccacatttttcaaataagaatggggatacataatctgacaagggagttttgaggccctcctggtgtcaaaagtcacggaaggtgtttaggtgctaaaatattggaatttcaaagcactgtragcacttctgagttacttgtaagtaaaatttggccagataacccaaggtatgcagttgttagacctgagactccaaaggcctcctccaattctggaggagaggggggcccgcctgagctctccacactgtcccatcctccaccccatgctccccctcaccctgaggaaggctgatgaagggaaggtggcaaagtcagtgggtactgtggctccagggcgctgagatactgtctccttgaggacctcatcctagggaaggggagaggaasacaagggttcatttatgggacccccacaggctagcacaagamcaygtggtttcacagagacactaataccargggggcagggacttagtcctctatatcaacatacttttgctctcatctccaaccccatccccacaccagcactcctccttactttgcaagtcctcatcctgtaaggcccaactcacattctaccgctcttgggaagccatgcccaaccgttctaccccacaatgatctcagcgctgatggaagctaaagcctgaaccagtcactctaaagattaccctagcttatccattttgttatgagaatctgtcttctgtttgcactgagacagtgagcttccaaggcaagaaccctgccttcccttccatctcctccccaattgctgtctagcacagggctgggctcagaggaactccacaagtgcctggctccaccagtttatgctgtgaagtgagctctgcctggcaaactgagctgaccttgagcttctcgacggtgtcactcagggacttaagctgagccacttgctccataagttgggccgacgggctcttggcagctgtggggagagaaagctggtgaggcccaccaaggcgcagkcaggcagttctactggattaagggttaggggtgcaggtataagactctctaacagaacaagtacttgagagagagtgggtgaatcaracaaactgaacagtgaagccaaagaacactgctgggaagagcttctgtggtgggggaaccacctgagcaggggmtaaatccytgggccaagtggagggggcagttttattcatcttgggggttggcaggtayataccagggctggtgcgagtgatgtctactacgtgcgtgtgtgtgctcaattgattcaatgtctccagcagctggctggtcttacgatacagcgctccagctggtaactcactgccagggccctcatgggatagctttgcaacatgcagagggggcagggatgccaaggatgccttcatctgggctccctgtggatgaaaaaagaaggatagtggtaagaggtgctaggaggcccctgtcatctatcatcaatggggcaaatatgctccatctcccatcccagtcctccccgtggctccctcaccttgaggatgctgttctcatgctggagctgggagatgtgcagcctcatggcagagatctgctgaagcagcagtggtgagtccttcaccagccctgggcctggcacagaccctggagcctgcccagggatggctcctgtggggaccataaaaaatctcatcagccccaagtggaaagggttgaaaattgggctccattcctactcttcccctttcctcatccccccatcacccatctccagtcctggcttccccctccaccctgctcccttagctccaactcccaccagcctggtaacccccggccagagtgggtctctacctcgctgctgttcttctgtgctcgggatagcccatsggggagcaggaaaagaggagagaggagttaggtgatttgggggttacggggacacaccagaggaatcctggacacaacctgcaggaaaacccttttcctaatcatcatactttctctaacaagactctctgccacctatctttggggacgagcagataagtgttaaagaaagacaccaaacaggagtgaggccacaagacagggtacaatgtgtgaagaacagtggcaaagagagtgtgcactgtacaaagtacttggaacatgaggctgttcctgcctccctgtctcagatgccatctccaagaagggcacggagaatgctccagagaccccaatatgtctgcacccttagtgctcaccagcagcaaagcttaagttggggatgcaaacacactcccttgctcctaaggattccccattgctctgaggcaaaagaccttcttttttggtgggaagtttcataaattcagaactatgtttgtttaaagagtgctaatgtttgtttcaagagtgctaaaaacaacacaaagtagtaatcctggaaactctctccaaagaacacagagctgtctgtaccacaagagcctmaagtcaagaaggtacttggtcacctcccaagatcaaggggwgtcagtaacagagactttgtcaaagactctatgtaggtgaggtcagctgacaagactcaggagcagctgggaaagtctggaggccctaagggtttaattccagggcaaaaagcctgtcttctggaggtgagaaggttaagtgagaaactggagagtaaacaaaacaaactatagggcagaggagaacaaagacagcagcagccacctcctgagtcaggtaactggggaggctagaactggtaaccagaaaaactctaggtgaggagccctgactatactgagtgactagacaaaggtcaaaacacaagccccaagtgaaactgggataattcagcagtggaagatatgaccacaycataaaatgaagccacatgaactcagtgagaaaacacagtgtccaagcagagaagcaatcaagagcaggtatcgggcagggctggatgccccaggagagtcagcccagcctgctgctggctgacaaccctctgggatatagggctgggcagaaaggtcagattacagagccagaaaggacatctactagagaccaactgtcatcattattctgagcctcattaacaatttagtaatgccctcctttgcccagagaaactcagcacacatcttcagcggaagggaaaacttggtgaaaactggcacagagtgaaactgtgtaagcatgttcctggctgaatacccgggggtaaggggggtggggcagaggtcaaaatgaggccaaggacaggagagaagacaatctcctctgtgctagtgctgcctattccacagtactcaccaccagcaatgccagagaccagagtagcaatgcctgaaggaggagggccccggagtccctcaatcgtgcgtttggactggctgttcagacgctgctttagttctgccttctctgcctccagctggtcgatgtcagcctggagtgcatccattgtctcctcaaactctctgtgaaagagaatctgggctttggcagtgtcccttctctaaagcactccttgactattcagtcctgagaggtccttggaatagccctgccagtgagaagccagggcagagcagcacaggcttaggctggggtgatgcaatggggttggcagtgggtaaagaaaatggggagtctcactataagagaacctgagtaggggtatgggttaggaggcagagagctccagcagtgggaggattagaggaagcaaggccccagggaaagtgcctgacttctccttctttcgcagcagtgcctgggtctcctccagccgagtctggactttctcgatgcgctcatctgcatccttggcagcactgtccaacttcttctccaggaggctcagccgcacattggcctcacttagctcctctccctggacaaggacagaacttctagatccctgacatccyccccacagtccctggaaactgggggctagaccatgagatagtaggttccctgagggctcaccacagctcccattgattgcaggccccacttctccccttaactcccaagccgtcttggtcccgatccccaacactcactgctttcstgagtcmwaccaatttcctggcccccagatcctgagcctacactaccctcaccttaatcttgagtgacttcttcaactccttaataactgtctctcgatcttcgagcttcaaacccaggccttcagcatctgtgatctctgcacgaagggcagcagcccgcagttcaaccggtggaggctaaggaatggtcggtagggggtgagaaagtgagggtggagagaagagatcatcactgtgctccttacagagagatccagttacagggaaaaccctgccttctaggcaggatggtgctctccagatgccttcctcctgtctccccgtcctcccacaactagcagtagctctgcaagtcttactcctacargcctctgcaacttctccaaggaaatctccacctaccttgctggggggccgctctgcatcatactccccctcctgcatggctgtggccagcttgttcatggtactgatgaggatgttgcatgactggcgcagacactcataggggctgctggagggggtcccatagatctgcaggagccaagggcagaagtaaaagccccacactggtcactaactctccccacaccttctacccagccatccaggcccacctgctcgcttgctttgaaagccagttcctccagagcagccacaagtagcccctcattctctgccagtggggcaatgagctgggcagcagcagctgccacctcctgcagcacagccacgacccacgtcaagtgtttcctgcagtctaggagcgtgtcagatacctgtgtgccaggccagagtcaggagtcaaccctgggttcagcaccacagtttccagctaccccaaaaccatttttgtcccctaaccagatccagatcttcaagtgctatacccttcatgtttctactcagtttccttcccttccccagttgcagccttaaacctgtggtccaaaggccagtgcagctgggatcccaggagcatctgtccctggcattcgccttcggatcttcttgcagaactggcggatgtcactgcatgaagtttccagatcccggagcaggagggcaatatctgtagcctcctgcccaccctactcaggaaaaagaaaatggatggagaaccaagttagcattaaggctcggagtaaggaagtgaggactaagaaagaagaggagctcacacagatctagatgtgttctcacctgcaagaaggcacgcagccgtcctacctccacactcatgcagtccagagcactctgcgtgaactgtgaggatagaagcatgcaatcatcagcccccagcaggagcccttctgccttatcaacatctytaagaagtccccatcctctgctgacccccatacataagtaggtcctctagtttccctgatatggctttggtaactctgccctagtcttatgtgacacttcttgggtgcctgatctcttgacctgatgccctccatttctgatctccacgggggctcaatcactggcccagatacttcaccttaatgtggtcagccagctgcatagtacagtcctcaggctgttcggcaaggtggatgctgtacagatgctgaggagagataacagacagacaacttttaggccctggagcgggtggggrgttcttcccaaactgtagtttgagccytggtcatcatgggtctctggaggtacaagagaatccaaagccctcaagcagctgcatcatatggagagttcatctaagagcaaaccaggcctcaagcagcaagcatgggacatacaaccttgaatatattagtaagagcccccatcaagtgaaagcttccctgyctcctgccccaagcccaaattcttgccccacacctgatagtacttgatggccttggtgagaggctccacattgacagtctcatccagctgatccttgtgcagcagttcaatgaggaaatccaaggagcgctcatgggcactcatctcagggtacaggctgcccactttcttatacacatccacactgcactgagagagggcactagagaccagagaagggcactntgaggctagagtctgccaggcaatctcagttctggccaatcctggacccccaccctggggtgagggagtcaggagtcacttactgctcatagcggtgtagcgtggcctgcagcaggctcagcgagtacaccagtccagcagcaaagctgagttgctccccagcagctcctcgcagcccaggccgctctgaacagttctcacttagttcaaacttctcctgggcctgcttccggatcagctctgcctgtgggaaaaagcaccaggaacctgggcctcagagcagaggatggagaacagagactcaggaatatagtactcagagcttaactatgtggggagcatggacacacatgggagagaaagcagaaatagctcttacctgggtgrggaatcttgcatggggaaagggtagtgatgtgattactggaggttstgaggagtcaggatgtgaaaatgaaagggtagtggraccggtggaatcaaggtctttcctgacttaaagctgccactcctgctatctctccacctagaatgctatcctgcccatcatccccaaggttaacccctaggcacctcctggccctcagacaatgttattccctcagtcacaccctgctcacctctaaatcaaatctctaattgtgctctctcacagaacctatctctccttgaaaacayaccatttgtaatatatattaatcrgtgactttgctgtgttcctccactataccataaactctttgtgggcagagactctgttgtcttcactcagcatcttcaatgcctggytcatggcaagttcactagatttctgtggaacatgtgattgattggccataccttgcaaatgagacgaggcatgagcaacagcaccagaacgcagtcatggtccccacctggccgaaggaagctgtcaggcatgaaggctgtcagcagggacatgtgtcgattggcctgggccacctccatctgcctcaattccatctcaattgcctgtgaggtgaacagggaggaggactcttagccagagctgaaagagccccaaaattcccatgccttgctccagtagatcccttgcttctagggcaagcccaggccagagtcttccaaaccacsacacaaagcaccccttcccccaggaatctgaagcccagaccccataccagttcatcccaggcagggctccctcagacccacacactttcctgaccttggcatgggccttagtctcagcaaacttgattttgaagtcaaaggtctctggaggtggctgctgttgcctctccacagatgctkcctgckggttygtcagttcccgattcacatcctaggaggagagacagtgaagcacagctgggtcataaggaagccctggggtgatggtgggcagagagcaaacagtgggcatgtacctgtagatgggcggtcagctggcggtacttcttgatggtctgctggtagtctgcaaccgtctcctgggctgcctccacacgcttctgggcctcacgaaccygcgcgcctgccatgtccagctgctcccgcagctccagttctgtctcacgtgcattctcctgcagctcatcgttcatctcattcatcgcttcctaggacaccacaccatagttkgggctaaagaaargcagggtcggccagcggcggtggttcacacctgtaatcccagcactttgggaggtcaaagcaggcggatcatgaggtcgagatcgagatcatgctggccaacatggtgaaaccccatctctactaaaaatacaaaaattagctgggtatggtggcgcatgcctgtagtaccagctactcgggaggctgaggcaggagaatcgcttgaacctgggaggcggargttgcagtgagccgagattattgcgccactgcgctccagcctggcaacagagcgagattccatctcagaaaaaaaaaaaaaaaaaaaaggcagggtcagggtagcaagcccaggctgggtccctcaccgcacaccctgctcaaaggccaagggtcacatgtcaatctttttctcagcaggtccaagtcagatgtcaggggtctgctcttctcttaccaagtctcccacagtctccctcaactcgcgcactttctcttccagattcaggttccgatctgtcagcatctccaccatctcctcagcacccagagcagcatccacctrtgttacggggaggatagggagaagggctgctggaaggtacctagaaagaggaggcatcaactgataggagagtcaggtgggggattctgggtgaggggctgggctccccagacctgctccttgagctcatcaatggtgctctctgcctggcttagctcctcctgcagacgctcccgctgttgcctcacaacttccagctcttggttcttcttttccatgagcttctggagcttcacatgctcctgcttctctgaggaagaaagatcccgcatcctgcagggatgtgaggaaggcagaaggaggaaagcacgtgtcagagtctctggcratgggtgctctaacacatttggagacacaagagtaagcatcagaggcaagcastgaagaccctacctcaccagggcatccttcaggcgggcattctgctcctcaagctgcttgagctgataactggatgcagcgccatctgagcctggagaagatcattaacacttysaggcatggttctcacctgaccgtttggcccccagcagctgtgggccccttacccttctcttcaatctcagccttgaggatctctaagtcagtagtgagctcgtccacccgctccttcagtgcctccacctcctgctgcagggactcagcccgctcttcagccatctccttgtccaaagtggccatctcaatggcatcagcagtatcagccatctcctccatatagcgttcctttgcctccakcgcctccttggcttcctgaggaagaagtggaggtgggagggggtacmagcacagagatgccccaggcctttctcacagtatgttccaggctccagctccagtctagtttccagcatgcttccttaggtctcaggctgccccagccacccccttcatccagagtcaaacctttctcgcctccttgaggcgccgctgcaggtcggcctgctgctcctgcattttgctcttccattcctgcacctgctccagctggattttgtgtttctccagctcttttagctttgctttgtcttctgcccgtttcagtctcagggtctctagtttctcctccaggtcccgcacctgagcccttagtccctcctcctcctgcaaaggagaggcctcacggtctgtgcacagcccactcctcctctccaccaacactgagctggcgcaaagaacacaagaaagtgtgcaaacatcacccagccccagggtggccaacagtcagtggcataagaacatctgagaggaaaccgtagcacagtatatatggggaaagtatggcataagggcaagaaaggaaaggatggctcagtcagtagcaagatatccataggctatgtcctcaccctttctgatccaagttctaggtctttgccaaccccaggaaattttcaagacacagcgggtagccacaagcctctgggtgtcttgattctcctttacccctacccyaggccttaccttggatggggaaggaagmggggggactgctccaggagaggtgaggaccggcgtggggaygatgggtgctgccagcggagtctgagccggggtgctgggctcactgctgctcagctcacctgctgacgctgagccagaggggcccagggagctactggccccagccaccccagtactggctgggcgcgtgggctattcagaaagggtagaggcagaccagaaagaaagcagaggataggggtagtaagaggaacagaaacagaatatgagaatatggcaagggaaggagacagaaaagggaaaaagcagaaagagagtrtcaaagcacagtgagaaaagaagaatgaaggggacaaggaaaatgatacagagaggcagagagagatagtgacaaaggacagggggaggatggaggcagakgagagagggaggaaaagataagagaaagacataagattataaggctcctcgcttggcactgactccacattcctcctagctctggcactacccttaagagcagaatccgttattccctagaacccccatctatgacccacttgtgatcattctagcaactccattatactctcagtcccatccttgctccaggtctatgccctccacccctagacggaaaaagtacaatctaatttccacagaaggttgggccaaaagtgggggtgccaggctctctacccctgytaagccctctttgggagtcaagctgaatctccctctctcagtctatttcagaggaccctgcaggtaaaagggccaaggtgaaagttgtacccctagactcccccttgaaacaactcttcgtcatctcccccgatctggcaacactatccatgcccctgtggggcaggggagaaggtgggcagaggagctgacctgaagttcaagccctggagcagacaggcctgccaatgtgctcaaagtgctgagccccaaggtctcccagtgggctgacactcagagatcatgtgcaatcctcagacatccccacccaaggcctgtcacagacacactcacctccttatcccctgacattttacatggccaagttcatctttcttccaatccctcccatcaaaactggtcaaaattcccttgttcaagaaagcctgctttgattaaccaccacaaccccattcatttctcttttgcattcaagctactggcttagacaacctcctaaaagccaaaagccattttccccaggaggtgcctgccagcactgcgaacccccaccctttcctctgaagagaacccaggatacactatgacgaactttcacttgctcatacacgtgccctcatacatccacatgcctgaaacgtgtgtgtacactcagcagtggctcacacaggggcctgttttctcaccttgggtcgccgagttgtggtctggacaggcaacaggagccagaagagaagtagtcaggaaagaaaggacaatggcagaaagacagagagcaaaagggacagcaatgagagcagaagaaataacaggaatggggctacagttagccaccctcccccccatcccatccccttctcccttcagtgaatcactgtattcctacttcaggaacccagaattcctgttccccttggttcctgctcccacttttgtccaatccttgcaggcctcaccccttcagacaccccagaaatcccagaagtccatctctaggctgagccatagaacaaggaagcagctagtgagaaggtcccatgagaccagtcctcctgctaacgatctctccaactccagtccagagccagaggccccgcccagccaccactcccaaggactttcccaggtcagcctcttccttcaagtgctagactctacacagaactccctagaaaccccatgtgmcgagcgtaatctaagcccagaaatgggagatcaggtccctagggtagaacaatgctgctgtcctccctcccccaacccccttccccagaaccagatcctgcagcagtcccgatcactagggaagagggctcaggtgtcaggaccatgaatattgcattagcagaagcccagagctcagcaaagtaaccccacccagctgtaggaaaggaggtgggggtgggcagcagcacagagaaactacagccccttcaggttactgcaaaatggtaagtggacaattaactccaatttccaaatagtgttcttgctacccagtatctcactgctctagccaagacaagatttggcttgggccctatttccagcatacactgaggccaattcccacctcttctaccctgggctaagcttccacagctgtgggtcaaagactattctaggttccccatcccaccctggtaaagtgccctgatacaaatcctggggattgggggatactgggagaacaaccaagaggtattctagcaaaggttgggtgaggcaggcaggcctgctagaggcactgagatacctgggcctgcttccctaggttctaccacaggaaaccctcccagatccggtatgcggtagaggctgcctgaagcccaagcctgtgaggccactgggtgttaaggcctggaacacaggcagagccaaaagcaggcaaggcagtaagcaaatgcccagggtgtggggcatagtggtgacacacacctctccctaacccaccttcgtcctcacccgcctccccgaccaggtagacagatgaagtcaatcagcccccacccccaccccagcagcctgctgccaccattgccctggcaacccagcagcaggacgagagcaagcaagagtacctttcgggctgtcggtgcctgtctcatcattgcagaaaaccaaagaaagcaaggagaggaaagaggagggacagaggaggatagacaaacacacggaggaaggacagacgaagggagggagggcaagagaccgaacagagggaaaggcggcggagacaggagattagtgcatcaaatcccaacaatgcagtctcagcctcccggtgcggcagcttcccagcctgcaaacggccgccgctctgacacagaggcccccgcagacgtgcagctggatcgccaggctccggcaggcaccggagcggtgcctggcccagttcaccagcttaggctgatggcagcctcagtggccgcagcaccagctccacctgacgtcatgcacccaccctcctctgctccatgggggtggagccactgctcctcagtcacctagcaaccatctagggctttgctggctcctcctcctcatgacagtcatgcgcagagcttgtcctgcttctttctccaaagaacaggttttggctcctctcttccctcccttgcccacccccaagagcgtgctccaaaaaactgggccaggggctatcccagaaatggcattctatggggccagggcatcactggggagggacacatggcctctctgctccagcagtctctctcatcatactcacattctgcccccgccacccaccyacccacagccccattaactccacttctgtctcttatacaacctggcaacacccttacagtctctcatctggcacacacatctagagtgcccctccagcaacaggcttcagctctgaggagcacacacagtgactacgaaaccctgcggaacacgcatctgggtagcagcagctctaatgactgttgggctcctctccaaccatcccctggttgtagacaggttaaagcctgtctctaaagggtttccaaaaagaactaggcactttgcagagacatctgagttttcttctgccttccccttcaaagcatattcttttgctctggaaccagctccctgatccacatgggtgagagcaggggccctctgctttgaaaaataactactggagaggaagactggggtgctccggggtgggggcactcaactgtctgattgacactttccaacgtgagtgcagaagggcagcatgggtggcctaggctgggctttttcacatttccccaggcagctgccaaagcccctggatttgggcattgctcaggccccagcccagggtcagaccaggctggggccagaactccataaatatcagaccatagtttcatgctcttctctattcaaggcctgaggtgaaatggaagccccaaccaggagacaataatcaaaggacaaagccaagtttctatgactctgaaatgggcccaggatccttcacagcattattttccttatatccccattccctaccaaagcaagtaccagcatgtggtctctaccatggcaagactccaaaggacccatcaccaaccaggagctggtttccccctggaaaaggagatgttttcctcttccctcccacagccccaatccagcagctctccatgcaatgtcagaatggcctgagataggctgacgacaaggaaatcacagaattgtacatacagcacagtacatacaggccagacaggcacatgcaggtcaaaaacagcttgggcagaggcccaaggcaggggctggtttgaggaagtggtcatggcagtgatctaagagtttaaagagtctatggtgggaaggggaggggacgtgacatgattgagccccactccaatgatggttgatgaaaggctgcaaggggtaggaggtaggcctcaggcacaccaccagaggaaggagacagggacagactgatggggcagagttgtggggtgtggggatatttatggctgtgcccatccacaggcaggcacatgaaggctcttaggttttccaacttgggactgttcttcctaggctctgttccctgacctcccatcttcctgcaaaaccccctcacttggtaccttcctcagccccattcccccagtctatccttccacagtcgtccaagctcgggctaagtgagaacacactgtaacccagtaaatgatctatttcacactgctgctatttacagtcaaatgcttatagtttttgattggggaatctttgacttggagtcctggggcagagagaatcatccctaatgagtgctacctgggtatggacactgagcctgatgttcttgcmcccttcaaaggaactctgaaagccaaggccaccatttcctctggccatcccagcccaaggtcacacacacatgcatgcagcagcccagggacatgcaggacagctggggaaggggctcatggcccccatccacccaggcacaaatagtaaacacaccaccttcttaggcttcagtccscgctgcatgaggagtaggaaagggcagagttagagaacagatgtcctgggcataggtgttaagaccaactcgggcttacacaggttagacgcgggtaggggggagtcagggtgagatgagtagcccctcaaagatcagcttccaggatgttcacaccttggcccagagaagctgcagagtctgcagccccacctcacacacatcctgcacagagtagcagagaagaactaggaagcactctctgcatccagcttaaaacaggaggcagagggcccggctccttgccattcacttgtgaataggagattgcttcttcctctatcttctaccttaaccttaccctcagaccctttagatgttggcatctttgggtaccaaaaggtaggaagttggctacactactagggccagacctgtccttcctatcaccctcagctcaatctcatttgaccctgaacttctggagcctatgagtttttcccttctaccatctttactgtaactctaacacagcaattaatccccagaaagcctccttcttagggaagttggagagactagaaggcaaatcagactcacctactacttctacctgcctagcactgggtatccctcctctttctccttcccctccctttattattccccattcccacccccaaatcactcaccagtttgctagtctttgcagttgtatcagttccctctgtagaaagcaaacagaaacaaagtgtgtacttgtatagagaggtagggggagatataataagggaatatggtagtgacggaaaaaaatcttaggatctactgtggccccatgttatgaggagaagtcctggggactcctcctggctatggggaggcaactttaagtgggtggttgttacctcttttgaggacttttgaagcagaagaatcaggtgtctctggggaagtagtatctgctccatcttcaaatacctggatctgaggccagattcaatatagccagatcaatagtttcaatayagccagatcaaggacggctgtaatatgggcccctccccaggctccaagcaaaccaagagtacagggcagcttccctaaggatgcatcttcaatcttccctcccccactaccttccactctcccaacyagaggcttatgcccatgctcaggaaaacgaagtaccaacacatcagctgcacatgcgacagacatgtgcacacatgcacagacacaaaakaagggcgtgaatacctgggactggcgcacaaagatgccatgcccttcatcacaagtgaagtacttcctgccttgaacagttccatcatttttgccctttgcttcatccagaatcacgcctacccatttgccagtggcaaacagtgtggctccaacataggccacagtgcctcggtggccttttccaatcacctctacacgggagcccacccgcagaggccgggcgcttgcctccgcactcatcctgctgccgctgggcgtctgaaagacamaggtaaacacagacagttagaggcctcagatcaaaggtggcattcttatgtataagaaatgcctcagccaagatgctggactgaaaaacaaccagagtcattttcttaaaccccatttacagaattgggtggacccccaaattcccctttgaaaaaatgccaatgatattctaagatttctccaaattcctctggaatctgctagaatttttaagtttatattttttataacaaatcagaattcattgaccagtctgtgaatgtcaccacatggctgctttctcaggagcactgtctccttaattctcttctcaggaggggaaataagatcaagcaaataactcagtttagaccaggctccccacaacccaatgccctgactcaggagtctgagctgggaagacaggcaattcagtgggtgatcctacagaatcctgtttccccttccactgtcacttgtctcctctgtgtttcaaatggttttcttaggcctcaccctttcagaggcacacaattgtgcctccttccagacccttaagtcaccacctctccttcctgatctgactcctcccacccccatccacaaacccaccatgaaaccccagatgcttcaccacagcccattcaaccattcaactccccttctacctggcctgagtcttgtttggtcaactctctatccccaagctctggagattcttctccatgctatgttgctataaaaaggaaaacacaggccaagtaaattgggtggatctacccctcgctctgtccccaagactctgctcagtggtccaaatgaatggtttatcactccacagatgggcaaggcaaaacaacagactaagacactgtccttgggcagctcttagcttcggcacacccatgatgactgaacacaatagaaaattaggtcccaaataggcccatggtttagaagaaaatcacacttaggtcatttttagcaacagcaactccatgaaccaggggccttgcagcaaacagatgaatgaggcatgatgaagtgataccatcatcctaaagactctatgggagacccttctgatactctcatttataatagcttcagaagggagccctggcagagccagggaagagccaggacacctcccagcctatcactgcctaattcccttccccaaacagctcatccaggaaggtgaggatgtagttcccagaggctccaggaccccaaatcacacctggaacagcaggatggctctcatggacctgacaataaaaggaattgccagtgatataaaaggctgaacccaaagtcagagactcccccactttccaaccccaataagcctctcagaaccagggggccacaacagtagctacagattctatctcagaagagaaagaaagcaagtaacaaayaacaaagcagctcttaagaaaggcttcactgtaagacctctctgagccatcatccccattctgagtccccaggatagtctggaccccctcaggagcccctggtatgagggccaattagagtcagaggtcaggccttgctagtccccatttagggatcaactctgtaaagggaagcctgtccagccttacaccaccagggcttcgagggctccttagaaaacacagtctgagtgccctcagctgagctccagcctatctccccagcccccacagcaatgatgtccacaggcagccaggccttccccagcagccctccagggccatcccagattagggccacttacccggctgtacacgtgcctcttgctctgtgccatgttgctcacccggcctctaccccctcccccagctggccaaagacagagagaaaaggtagaaacctaggcaggagggtcagggcgctgggccctcatagagggacacaggagtcgtcaggcacagccctccccagtccatgggcctcactcggtggcctacacgggtaggggtgggggcagtgatgggggctgaggagcaagtcccctctgctgcctgaggattcctgaacccagagacacagaatcctgcttgccagctgatgagtctcactctgcgctagtgctgctctagacttgtcaggaaccgtgctagcctctgggtcctagtgcccccctgcttcacgtgggccagraactaagggctgggcatacgccacagaccctcagcactcaactcttgaatacactgtcctagggctggaagcagtcttgacacgtcctcctagtctgtacccactcaccatcactgttcccctctcccccaggatgtaaggcctcagcaggcccataagcatcaagtgacacttcaaagcgatcagctgcctagagcctccacacagccaaaataagggtctctcatctacctttctggtgctcttctctctccctcccctctctaaactctggactcagggtccaaattcatgtgagtagggcctggatttcaatctcacactgagccagaggaggcaggccctgcccaggaggcagcaagagaagggcagtaatgaaggcaacttcacacacatagcaaagcaagccaagtaccctagccccctcccacaaggctggcaaaggttgccatagtcacccttcaccctttatggttgttataaggggccaggttgtaaaacacaagagtatcagactcaactggattactaaaggcagtagtcaaaagcagagagcccttctttcttcttgtagcacaaggcccagtccacctcagtcatctgccccttgtactcttggccttgcctcctagcatctcagacccaatgaaatggtttattttctacgcttttgtatttcacaaaaattcttcagtaaccatgtattacttttataattagaattgtttaatttaatgagattatgcattctaatgagaggtctccaagggactatgttaccacactgctttcattcactggcccatctatcatgggctagaaaccaaaagaccagggtccctgcccctacacagccaacaaggttggcctggggtctgacctatggctccactgagtatggtatggatctagttcccttgggcctagggacgcctgtcttttctgcactgggcttacttcactggcagaacagtgactttaccccgctctaccctcttaagataggccaggtagcccaacaggagaatgacagccaacattcagaaatatggccccaaaacacaattccaaatcttcagtcctggccagaccccctaggaaataatctctctcctccctgcaaaatctccatgtcgccccctcctttccctattcgccattacacaggtgggcagggccaggcacatccttgcagcctggacctcacatgttcggagcactttacagtctataggacaccttaaaaaaagacattttatagaaccatggttgagtactggttctagactcaggctactttcctggctttatcacttggtagctacataaacttggtctagttacttaacatctctatgcctcaatttcctcatccgtcatagggaagtaacaaagaacatatctcagagaggtatcgtgaggattagctgagataatccaaacaaagcatccaggacaccgcctggtatttaataagtgctaaataaaagttagctaagaacaatgtcatcatatatagacattacaataaccccattgagaggttggccagggatgatgctgacaaggcaactgagtctttgagaactgagcaacttccctgaagacacacagactgtgaggagtagagccaaaactggaaacaacctgacccagagccctctgtgctttctactacccctcaccattaccacagacatatctaggcttccaaggccctgctcttcctgtaggccacactgccttaaaaaattcaaaagagctcagatctaaaaatagcctcacaactcactaaccacataggtatcaatagtcccctaatttcttggaatctgtttattttcctatgaaatgaaaataatatctgccatatctacgtcagtatcatgaggttcaaaaaagctaaagcatatacaggtaccttgtaggccaggtgtggtggctcatgcctgtaatcccaacactttgagaggctgaggccggtggctcacttgagaccaggagttcaagaccagcctggctgacatggtgaaaccctatctctactaaaaatacaaaaatgagctgggtgtggtggcgcatacctataatcctagctacttgagagactataggcatgagaatcgcttgaagccgggaggtgaaggttgcagtgagccaaggtcgcaccactgcactccagccagggcgacagactgagactcaaaaaaaaaaaaaaaaaagcaccttgtaaaaagtacagaaattatagaactgcaaagaattacctgacatgatactaaatggtatatacatctacacaataaatataagaaattatagacaggagagaggtgagctagaaagaaagggagtacctaagcatgccttgaattatgggaattttaaaaaatatgtggaggccgggcgcggtggctcacgcctgtaatcccagcactttgggaggccgaggcgggtggatcatgaggtcaggagatcgagaccatcctggctaacaaggtgaaaccctgtctctactaaaaatacaaaaaaaaattagccgggcgcggtggcgggcgcctgtagtcccagctactcgggaggctgaggcaggagaatggcgtgaacccgggaagcggagcttgcagtgagccgagattgcgccactgcagtccgcagtcccgcctgggcgacagagcgagactccgtctcaaaaaaaaaaaaataaataaataaaataaaaataaaaaatatgtggaaaggcctacaaagccctgtaacttgtgaacacagtatgaacagaggcagaaataactttgcttgactagcgaatagtaaagaaccctagcttagctgaagtaacgaattgtagatggttattctatcaaactataagccttttgaagcayagcccacaccttttcctctttatgatccaatagccagtaagtagctcatggtcaaatatttattgaataaacatttattgaataacattgcaacatactgggaggtaactgtgggtaggcacggagtttaacatcaggcagacagagaaggacttgrtccaataataacaggaaggcagtcttgttcctgagcaggagactgcatagtgaaaactattttaggaagatcaaactgatgacacctgcaggatggagtgcaggcaggagcaacctggcaaagacaggaataacagcaaggaggctgctgcaacatttgacacagggtaaggaaggtttgaaccaggatcaggaggagaagaaagaggccagttcagagacagtaccaaaaaagccctgagaaggccttgtaatagatcaaacatgaggaaagaggcagcaggcctacatgggctctggagacagacctgaatatacctttggttctcctctgagcaagatatttaacttcctgagtcccggttacctcaactgcaaaaaggaagaaataatgttacctcacagggacattttgaagattaaataagatttaagtaaagcgtttagcacaatgtctgtgtgctcaacaaatggtagatatcatcttcattcattattttaagggaatatccacgatgacttgcgcacagtaggaactcaaatgctgcaaggataaatagatgggtcaatgaatgcatgaataagtaaatgaataaatacactcaggagttttcaagcatgagaaatgtaataattgaaacattaacagaactgaaaaaaatgggaggagaaacaacatgttaggagagagaaaatgcgtcctgttcttagggccttctctggggaaaacttaattgcatacacgaatacatgtacttcactatctccttcaaaaatgaacctgtgatgtagccaaaacagattccattctctccattccacagatgacagaactatgtctcagaagtcaaatgacttgcccaagtctcatagccaaaaaatggcagaggggcacatctgaatatctctacaggtaggtgctccttccacagcattaccgggcccaggcccatatcccataggacaatcctgggttaatgttaccccagccagggaggagacagacacctcttggatttctaatccattttcctctccaatgatattaaataccactaaaatatctagaaaaatgagaagagaggaggggaaaaatctctgtgtctgataaataataatctctgtgtctgccaatagtcttagagaaatttcaggaaattataggaaaataagattttggagaatgaaaaaggagaaagtgaggaggaaaagcctcttttccacctctaccatttctcccctgtctgaaccatttctaccttgtttttactggcaccccagcatcctttgataccttgatctcctcttgtctcaccttatcaaaccttgatcctgggctaacccaactgtctgctttccctgctttcccactcctagaggagcttgtctgaaacccaggcagtctgacagcaaggcaaaactatacatctctgaaagcactagtaaggaagagataaacgtggacctaagtccttcaggagtcagaaaggaaaaggtctgcttactgagtggtaaatggaggctgggagactggaagcttggaaagctggattccagatattcacaggaccccagaagacaacgtacacagagctttttgttcctaggtcctactcagtatctgccttgcggatttcatagataaggcctacacactcaacggacttccttcccttctccagctcctcattaccctaaaaaaacgtctacaaacccactcccactctgaatgcagctctactccatctcaaaatgtcccctttccccagaaatatccagtgacttccaggcccacctccaagggcccagacctctaaaagtcaagaagaaaagctatgctatatgcttcacttatcttcaatataggaacttctgcaagaaggcaagaggcactcagccctgcactcaagaacctcaatcctctcagtggtatcagaagtcctacttaggctgttcgaagttcctgctgattcctccccctgaatcaaccagcaagttcctggcactaggaccctgtagacagggaaccctgagcctgcgctctaaagagagagatgcaccatttcacaacttcagcaaaagccaaagcagccaacaaagccacagccctatcggctgtactgggctctgccttttgggcagctcgccggccactccccaaaagcagagcattccatcctttctctttttaaacccacgtcatcatctgatcataatggaaatcaatctcctcaaaccaccatgcaaaggcgtatccatggcaacctcaaaaggaaggacacagagatgatgcttcagtggctgcagcaggaaaaggtaagtccgtttctcttccatccacgccatcccatcactctctcctttcactcaagtcaggtatacagcttacctacaaattgtatctgtcacacaaactgagaaaacacataaggtgagttaataatcattatgttattatataaggttttagatctgcctgtctctctgccaagaaaaaattctccttttctaggtgataggaacagggacaaggtctctcttcttattcacctctcagatgacacaatctcagcccacaatacctgacaaatcactatcggtcacttgtctttctagtcaggatgctggaaaaatcactcaagaatatccgagtttccctatgtagttgtcaaaagctgacagcaacagtgatcccactgtcctgccccctccatgccaccatcatgcccacaaactggcatggtaagattccctccttagcaaccctagactctaggctctcaaggttcagaaaccgggagttgggattaaatttctgtcttctctgatgcctcaggaaaaggaatccatttctgcagacgtaagagattcatcaaatacaagcgctactaatcctctatgcctcaatttcctcttctggaagaaagggataataacaataactttctaacaggattgttgtaaaaatcacatgagaatgcctgaaaagcacttagaacagtgccttgtataaagcactcaataaatgtcagccattattattatgagaaagatgaaggggaggcttatagtgtaggatttcagttcagagggtactcaacactcttggagcttatttcagttccactgtcttcctctttcctcttaacagttatttcaagcttcctttacattttcaagtccttactcccacccaagccaacaccagcattcccacctctcagcagataaccttgctgaaaaagaaaactggccctattaggtaagaatttctttgaaaatttagatatatctgcatgcatatgtcattatctctttcttcctaaattccttcctttcttccaacattcctctttaaagaaaatggtatccccttcttttcagggcccaccccttcccctctcctctgaggacttgatttagcaatcgtcttttctcttgtgtcttcattgcaccctgtctactggatcttacatggcatcagaaaacccataaacaagacttccattctaggaaaaacaagtccctgctacctcttccacaagctgccaccattctgtattcttcctttctctgctgaactactcaaagtgagtacacattctctatcttcacttcccatctacttctcgatccattgctatctggctccatccctaccactccactgaagctgctcacactttaaaagagccctggtgaccccaatgtcctacacaacctcaaggtgcatttcccaagctcatcctaacttgatctccctgtagcaactgagatygtcaatccttttcctggaattttctcctttcctagcttcctgggcaacattctctcctacccttgcacgtcaatccttctcatctcctctgtcattattttcagccttctgtaagcgtggctgggagacctcaaccattcccacaacttcaactaccactcatacttactgcccctagacagaaactcttctgaacttcagactcatatctcactgtctgctaactgccacagagccctcaagttcaatatgacccaaaacacacttggtatctcccccaccaaaaacaaacaaacaaaaaaaagttcttcttctatattctctctttgctattggcaccaccatccactcaaaatagaaaactgagtcatccgcaacaactccctctcttgttctcaacaaccaatttagtcattatgtctggttaattctgtttctccagtctctctcagattcatcctgtcctctctatccccactgacctaatccttagctcagccctaaaccatgtctatgatattacaagagtctcccgatgtccctgaaccaggttctcccccttcaatttccacatttagcttcccaaaatacaatcatgtcatcttcctgcctaaaagtctccagtggcttctctgcccacaaaatgaaatctttttagcactgcactacaggccattaacaacctggccttgaccaagcacagtggctacacctgtaatcctagcactctgagagcccaaggcgggcagatcacttgaggccaggagtttgagatcagcctggacaacatggtgaaagcctgtctctactaaaaatacaaaaattagctgggtgtggtggtggtgcatgcctatagtaccagttactcaggaggctaagtagtcccacctgtagtagctatagtcccaactactcaggaggttgcagtgagccaaaatctcaccaccacactccagcctggttgacagagcaagactgtatctcaaaaacaaaacaaaacaaaaaactggcctcaaactggcacagcagcctgcagacccacctatactcaggaggctgagggggatcacttgaggccaggagttcaaggctgtagtgcgtgatgatcttgtctgtgaatagccactgcactccagcctgggcagcatagtgataccccatctctaaacaacaaaacaaaataaaacaacatggcttcattatgaatccggtcgcatcaatcaccaaagttctcttttattccagccacttggatctatctgcctttccctttatgcatctgcaaatgttacaaatgtcaccaggacaattcttcctcctcatccttcaaggctcagcccaattctcacctctttcctaaagactctcctggcttctccatgtggagctaatcattccctcctctgtgctcacagagcacttgagacatatctccatttcaataccacattctatttaaaatatcatctcttactctactatgaattcctccaggacagaggattgtatccatctcagtatctaagcactcggcgtagggctttgcaaagagaaggtattcaatgttgaatagatgcctgtaccaacatcacactcaggatataaactggctctgacagctttccctgagagtagctccactcttgaagaccaccaccactggggaaatcaccacttatgtgcacatatgtacgcacacacacatctctcccctaaccctcagtaaacatggctctttccactccagacagaagcctaagaaactaaaagtgcaggaacagccctaggtcctatggaatttggtagtgacactaaatctcaatcctgtatactttcagggtaaaagaaccacagagacagctctaggtgaggtgcaaatctcctgggaaacagcattaggaaggatttggggcagcaagggcccatgctctgctgtagtgaagcccttggggaggccagactaaatagctaacctgtcccttgatcacattcaactaacatcagcctgaatctcaaaaggaaaatgatacaaagccaaagtcagagtctccaggatggcaaggaccttaatatagatatgaatctggcaatattccagctcttacatcttcaggggacactgaggaccgagttcctattttccttggtatgggacagatagcccaagtgcccccagtatcacctagtagctgtagacaggccaagcaacctgggaatcatctataatccctttcaacctataactccaagcagctgctagcaatgatagagctggcagagtaaaacctagagtggcagttctcaatggtattatgattcacccaactactttgactcctccctaacaacttcttctcctttgtaccctcatggtcagtcaggccccacttatcaattcgtccttagtactgcctcctgcatctttcctttctcctccattatcactatcactacttcagtctgccatgtaatagctttgaaaattaaggcaaatcatttaccctctttggtgcatcatctacaaaacagcataacagctgctctgcctacctcgtaggaatattagatcaaatgaaatcatgcctgtgaaaagttctgtaaagtgtcatacataaatataaggcattattattatcaacctaaattgtctaatattgctatgtgaagcctatccagctccgtctccccctccttccctagttccaaccaccttatacatcacagtaaagcacatacatctgctaaaatactgctttgtccctacacccatctgcccgacatctttcactgataatctcatttcttactataatcaaacaatcctggattcaacagatgcagtcccatctctgcaccagtgtcaactgcttaagatacttttctagtcttgcaagccacacccatccttcaaagtccagccaaagccccactacactccacagagaacaaagacaaatttaagaaagggatttcttaaacataatggaagaattaaatacaattccgcttagaaaaatcatagtaggcacagctgtcatctaatacttggagtcaacattttaggaagacgggtaacacttctttcctgtttgattgttaagagataatctaggaccaacagcatggaagttgcagagatgtatttcagcaacatgaagaacttccttcttgagctattccaagaataaaatgggatgccctatatgcagataattgcccattattttaaatgttcaagccaagctgcaaaatttgccaaattggcaagaatatttcagatagaattcaacactacagggataactcgactagactcacagaattttaaatctgaaagaaatatttgagatcttgtagtccagactcctaccttataggcctggacagataaagtgactctctcaaggcagcacatctgttctggaaaacatggtctctaactttcaatccagtgatctatacttttgctactcagattgtgttccatgggccagcagcattagcatcacctgggaacttgttagaaatgcagaaccaatcagaatctgtactgtaacgagatcgcattacatgtgcacgccattaaaactcaaagcgcactgacccatactgccccttctaaatcctgaatttctaattctggaactccaattcccaaacggttcccacatgttagccagaggcatcacccaagaataacagtatatcctagtaaaattttcaaaattctacataccatacccccagttggagattcatggtaaatattattagcatattaaaggctctgcaatattctgtagtaaagtttaaccacgaattttccaacagctttcgaaaacaaaatgccttttttaaaaataaagttatcattatctcttttaacatctcatagcttaggctttggcagtacattaagtaaaggatgtcaatctctacctcctagctcttcgcctctcggtaccttaagtatacctgagtagccagtggtcaacatgggtttgctgctctcctcactgcaataaatgacggtaagttttcaaatccctgcctctgaaacagcagagatccttatctgtgtgatttagctgtggttctgtctaaagacaagggatgcgcaagatgacctcaaggatcatcttgccagctaaggcggaccccaggagtaggatcacacacacaagtcatatccagactcccatgctgtgagtcctttacgatttttctccccgtttgagacgaatttctcaaccatgtgcccacaggaaacctgtagctcagtatggattcaggggcgcctcagacgctcgcaggaacggaggggagacccttgcagttctggaggaactctaaggcgcagtcactctgatcccaggagaacaatgctaggctgaagagctgaggtgggtcagaccggcctcggggcaaacgctcaggcggagcccccggaccccgacaagcgcccacccctgccagtccccgccccgcacaccgggctcggtccccagcccaccgccggcaacctcacgaacacgtagggggccggcggagcagacggttggcagagtcgcgcctccgtacctgcactgtgaggggctccgcgcccagctccgaccccaccgacgaccgacgcccaagaccctgcggggccggccccgccctccccgccctcgtgggctgcccgactcgccgccagacccttccaggaccgcccagaacccttcggcccagaggcccagaggcgttctgggtcgagtgaaccctcttttcccgcagtccagccctgactgaaaactgcgcaccgaccgcagccgggattacatcaatcaggcacaaagctggacacctgggacaggataagcgcacgcgcactgtgcctgggaagccgattaggaccataagaaatcggcgtgtcgtggcgagcgccctctttcggcggaggggagaaagcgcagaagggctggaggacttatttgcaagtgttaaactgctaattaaaacaatagcgataaaccatatctcctccattagcctgggggagaaaattaaatgttgctgctactcagtgttacctgtcatatggggatacaggcattctcatgcgcttatgatgggaatgtaaaatacaaatttacataatggcattttaaaattttagacataggttcaaattcttttttttctgtttttaagacaaggtctcgctctgttgtctagactggagtgcggtagcacgcacaatcatggctcattgcggccttgacttctcaggctcaggccatcctcccacctctcagcctccgtagtagctgggtctgcaggcgcgcaccaccatgcccttttaattttcgttttttgttttttgtttttttgtaaagacggggtttcacaatgttgcccaggctggtctcgaacccctgggctcaagcgatccaatcgcttcggcctcccaaagggctggaattacagacatgagccaccgcacccgcctgggttcaaattctaactgcaatttactagccgtgtgaaatctagagttacttatttaccctctctgtgcctctgttttcttatttgttaaagtgagaatgtaaatgatggtacctatctcattatgttgttagaaggattaagttaatccatgtaaagagctggaaatataactattgtaatgttatatttatttcagttaatctcagatttaaaacaaactgaaaaattcataaagttgctgtaaggggcagtaagcagtagaagggatgcattgagtatcccctttattactccccccttttccctatttcaccttctaaatatttataattattattttgaatagataatacgtttacatggctcaaaaatcagaacactattttagaatatacacagagaaacctcccttcaaccctggttcccatcgactccatcccccttgcctgctacagataatgcttattagtgtcttcttgtttatcttttcagtgttttgtgcaaatataaactcatatgaatatatagtcttactcctcccatttcttatgccaaatgtagcatgccagatacaattggcataagttctgttcacttaatctattctgaaaatctttctaaatcaataaattagagatcttcctcatttttcagctgcttagtactctattgcatggatacacataatttattaaccagtttcttctagttacatactttatttccagtcttttagtattacaatcttgcaatgaatcactttgaacataatgacattccaatgtgagcaggcatatctctaggatacatcttggtcaaataataaatgtatctataattttagtagaaatgtcttccatctccttcaattaaagaaaaataaaaagtaaatataaagactttaaaagatactgcatatacatatttttaattgtcgtaaagcatacataacatgaaatttaccattttaaccatgtttaagttcagtggcactcagaacattcacattgttgtgcaatcatcaccactatccatctccagaactttttcacctttctgtaccaaaaacaaacatgtaagcaaacaaaaccctctgtgatgatctgacaaaaaaactaaagtgtatgatagaatgtgtgtaggttatatataaataaaacacagttggccctctgtatctgtgagttcaaccatccttggattgaaaatattaggggaaaaatggatggttgtgtctatagtaaacatgtacagacttttgtccttgtcattattccctaaacaatacagtataacaagtgtttacattgtattaggtattatacataacctgagattatttaaagaaacagttcccgacctctttggcaccagggacgtgttttgtagaagacaatctttccacagactgggttgggcaaatggttttgggatgattcaagtgcattacatttattgagtacttgatttctattattattacattgtaatgcataataagataattatacaactcagcataatgtagtatcagtgggagccctgagcttgttttcctgcaacaagacagtcccatcgggggtgatgggagacagtgacagatcatcaggaattagagtctcataaagaataagcaacctagatcccttgcatgtgcagttcacaatagggttcgtgctcctataagaaactaatactgatgatgatctgacaaaaaaactaaagtgtatgatagaatgtgtgtaggttatatataaatactatgccattccatggattttggtatccaaggggtgtcctggaaccaatccctgaaggacacacagcaactactgtatgtatctccttctgagtgactttaacatttaacctgtgtgctgagtttttacttgacaccaggagttcaagaccagcctgaccaatatggtgaaaccctgtctctactaaaaatacaaaaaaaattagcaggcatggtggcgcacacctgtaatcccagctacttgggaggctaaggcaggcaaatcgcttgagcccgggaggcggaggttgcacagtgagcagagatcatgccattgcactccaacctgggtgacagagtgagactgtcaaaaaacaaaaaaaaacctgtgtgttgagttttttatataaagctgccaggcctcaggtgggatgggggtggtgattcaggaaagaccaaaatgtttctcagcatcatgaaagggatcctactgaatcataaggacaggacgtgctaataggagaaatattgatttttttttacatttgattaggctgagtggtcttcaaggaaaattaatattgtctttgtcctgtgtttttcttcataggtgctgttgtaagagatccaggctgcctttggcttcctccaatggggaacctgaacaaggacccccaaactcctgttcacataactagagcccttccccccaacatgtgatgctgaacagagaagaacatctgtgcttacctgggtgaaatcctaggcattatagaatgtggggaagaatccatgggagaatcctccccctgaggaaagggatgctgttttccaggagaaggtgggttttcagactgaaaagcttggagaggggaatcaatagagagtaaatcaaagatgacaaagccatgggggaggacatgtgtgggagagagaagcatctagattagctataccagcactgcccaatagacataaatgtaaattttaaaattgtttttagttgggaaataggttaacaaattttaaagaaaatttctggagaaaacttaattttttaaagacaggatcttgctctgccacccaagctagagtgcagtggcgctatcatggctcactgcagcctcaacctccctggctcaagtgatcctcctacatcagcctccagaatagctgagagaccaaaggccaccgtttctggctatttttaaaaattttttggaaagacagagtctcactatgttgtccagactgatcttgaactcttgggctcagatgatcctcctgccttggctttccaaagtgctgagattacatgtgcgagccaagataaaattttatataagccagccacacatataattttaaattttttagtagcgacagtttgtaaaagttagaaaaaaaaaaggtgaaattaatttctttttctttgagacagggtcttgttctgttgcccaggctgggatacaatagcatgatctcagctcactgcaacctccacctcccaggctcaaacgatcctcccacctcagcttcctaagtagctgggactgcaggcatatgccaccatgcctggctaatttttatattttttgtagaaatgggtttttgccatgttgcccagcctggtgaaattaattttaacaacatactttatttaaaccagaatattcaaaatattgtcatttcaacatgtaatcaatacaaaaatgaggcattttacattctctttttttgcactgtctttagaatgcgatctgtattttgcacatttatagtacatctctattcagatgctaagttttcatgggacatccttgatctggtttagactacataaaatttacaattgaaaaagtagatttatttatttatttactcattcattcattcattcattcatgtcagagataaggtccttctatgttggacaggctggccttgcattcctggcctcaaatgatcctcttgcctcggcctctcaaagctgagattacaggcctgagccaccaggctcagcctggaaaagtagattcaggtatgcaacttatttcaaacattttaacatattttccaataactgaactgaatacttaaatgtatacatttttaaacataaaattaattaaaaataaataaaaattaaaattccatttctcagttacattagccacatttcaagtgcttaatggccacatgtggccaagggctaccatattggtcagtacagagatagcgcttcactccttcttctccctgctttgttacacttttatgagagggtctggcccttcaggaaaggaccacatgtgtgttcattgcctggtttgttataacatacaggtagagtatgaggagacaaggtggcttagggagagcctgacctactgtaccccttttccttctgaggtggggtagggaacagcatgagggtggtcccctgggggttccttgaaaactgtgtgataagaagaatccacaatgtaggataacccagaacgaccataaaaagtacaatggcgaccaaggaccatgcaattttaaaaagtaaaagaattttcaaaagtaaaaagaagtgaatcactgtagaaatcataaagaaaataatctacagatgaaagctttttgttaaaacaaatacagatccttgaaaagaatgtaagatctcattagattctctaaaatcaggaatacgaagatgccgaatatctctgagtctgatcaacactgtatttgaactagtgcatcaaggcaagaaaaacgtatataaaagacataaagattagaaagaaggaaattaaactgtcatttttcacagatgatatgatgacttacatggaaaaggccaaaataggccgggtgcagtggctcacgcctgtaatcccagcactttgggaggccaaggtgggtggatcacttgaggtcagcagttcgagaccagtctggccaacatggtgaaaccccatcacgactaaaaatacaaaaattagctgggcatgctagcacgtacctgtaatcccagttacttgggaggctgaggcaggagaattgcttgaacctgggagggaggcagaggttgcagtaagccgagattgcaccactgcactccagcctgggcgaagaagcaaaactccatctcaaaaaaaaaaaaaaagccaaaataatctgtaaattattaggattgattagaaaatatttagcaacgtgactagatataaaatcaacatgcaaaactcaattgcatttctctaaccaacaatgaaaagttaaattatataatttttgaaatgaaactgatgcacctagtaataaacaacaaaatatgtgcacaacccggccaggctcagtggctcatacctgtaatcccagcactttgggagtccgaggcaggcggatcacaaggtcaggagtttgagaccagcctgaccaacatggtaaaaccccgtctctactaaaaatacaaaaattagccaggcatggtggcacgcgcctgtaatcccagctactcaggatgccgaggcaggggaattgcttgaacccgggaggcagaggttgcagtgagccgagattgtgccactgccctccagcctgagtgacagaacgagactccgtcttaaaaaaaaaggtggggtggtcaggcagggtagctcacgcctgtaatcctaacactttgggaggccgaggcaggcagatcacttgaggtcaggagttcgagaccagcctggccaaaatggtgaaaccccgtctctactaaaaatacaaaaattagctgagtgtgatgcctgtaatcccagctacttgggaggctgagacagaagaattgcttgaacccgggaggtggaggctgcagtgagccgagatcgcaccactgcactccagcttgggtgacagagagagactccgtctcaaaaaaataaaaaagactgagagatgagagatgtgcacaacccaaaattacaaaattatatttggaaacatacattaaagatagcctgtggctcacgcctgtaatcccaacactttgcaaggccaaggctggtggatcacttgaggttaggagttcgagaccaacctggccaacatggcaaaactccatctttattaaaaatacaaaaattagccgggtgtgctggcacccgcctgtaatcacccaagaggctgaagcaggagaatcgcttgaaccaggagacagaggttacagtgagcagggatcgtgccactatactccagcctgggcaaagaagcgagagtccatctggaaaaaaaaaaaaaggtagcttaaatgaatgagagatatagcacacttatgaataggaaaatttaaagtcataaagaagttagttgccctgtattaataatatgtatttgagataactccaatcaatattctatcaggatattctaggaacttgacaacaaattagtaattttgtagagaaaagcaaagggcaaaaaattagccaggaaacttctgaaaaaaagaagacagttgacacggtgaaaccccatctctactaaacatacaaaaattagccgggcatggtggcgcgcgcctgtagtcccagctattcaggaggctgaggcaggagaatggtgtgaacccaggaggtggagcttgcagtgagccgagattgcgccactgcactccagcctgggtgacagagcaagactccatctcaaaaaaaaaaagagtgtggctgtgtgtgtgtgtgcttattttaaagtttattaagtaaagcaatatagtattgacgtagggatagaaagagtctagatctaaaaacaaactaaaacatatacctacaaaaacttcgttttttaaaattattattattgttttagagacaggttctcactctgtgacccaggctggaatatagtagtgtgatcatagccgtaacctctaactcctgggctcaagcaatccttctgcctcagcctcctgagtagctaggattgcaggcagtcatcaccacacctggctaatttttttatttttatttttgtagatacggggtcttgccatgttgcctacgttggtcttgaactcttggcctaaagtgattcccgtaccttggcctccccaagcgctggaattacaggtgcaagccaccacaccaggccaaaaacttaatatatgacaaaatttgtattattgatcagtgagggaaagatataccattcaaaaaatggtgctgggacaattaggtattcaaatgcaaaagcaagcaagaaaggaaagaataaaagaaggaaaaaagggagggaaggagggagagaggaacaaattaagtgcttccatttctggtgctaccgtggactaaatattacggaaacttctgatatactgcaactaaaaatgctggatataatatttaacaaccacacacactctttcaccatagggattcccagtccacccccttaactttctgagtcactctgtgaccctgccagctacaggtttttcccagcaagcttgaacccaaactggggccttgaacatttccaggcactgttaaaggtatctaggttgcccaaaatattgaaataaactggccccagccctgagccaaatttcttaaacccccatttaaactccataccctgacccctccttgtggacaaacctaggtaagacatcctgtttttctctctgtccatcttgaaaatatgctgcagcactctatatgtaagttcttcaaataaatcctttgaactgataccccaggcttttagtgcttccttctttggaatcccaaccagccccatctcgagatggtttggggcgctcccttgtgggaactcccttactttgggatcaacttggggtgactccagctgcaggttggcagaacaaaacattcacacacacccactcacacaaacacacacacacacacacacaactatttatattgcctgactgcactggtaggaaagtaagaaaattcttcagagtatagagatgataggaaaatatgaatcccaaaacacaggtgatcactggagccagtgtttgctaagtagtcaacctctggtggtctggaacctgggtttaaaagtccataagaagtagatagaaggttgggcatggtggcgcacacctgtaatcctaacactttggggggccaagatgggaggattatttaagcccagagtttgagaccatcctgggcaacacagcgaaacactatctccaagtggggatagggacagaaaatgaaatcatggatggttggaatggagagctatcccccgccacacacataagccaggaaaaagagtaacatcctccatagagtgaaaaacaacaaaaaagagtcccttccagagggaaacagtaagggtaaaagcctatcttagtggtgaggaaaagaaatctyctctgattattcaaataataaacttgtactcatagaagtttaggaccagaatatatatatatatatatatattttttttttttaaagtcccaaaacaaaaatttaattttaagtggtaccaagttgtttagtactcctgggaacccggccaaatgaaatgtaatgagggaatgcactttaattacagccttaaataatttctatagctatagttccaagaaggatgagtttacagtcactaaaaacataggaaacaagtcaccataaactgttcgagcctgcaaagattatagatactggaattttcagttacagtatataaaatgaataagctaagtatatttttaaaacatataggaggatttaaaatataagaaaggaacagaagagtatcaaaattgaccagatagattggaaaataactaattataaaatctagtaataaaaaaataatgggctgggagcagtggctcacacctgtaatcccagcactttgggagggtgaggcaggcggatcatctgaggtcagaagtttgagactaacctggccaacatggtgaaaccctgtctctactaaaaatacaaaaattagccgggcatggtggcggatacctgtaatgccagctactcaggaggctgaggcaggagaatcacttgaacccaggaggcagaggttgcagtgagtcgatattgtgccattgtactccagcctaggcaacaagagtgagactttgtctcaaaaaaaaattaattaatttaaaaaaataatgattggtaacataaggttactagatggaataaacaagagattggccatggttgaagaaaaaaattagtaagctggaaaatagatctttttttttgaactagaagtgtttattgcagaaatttggccaaggttcgaattgggggcccaaatagagcttttaaaaaatgaacttaaatgtagctttaacatatatagacaaggaaaatatgaaagagaaattaagagacatgaaagataaagtgggaagatctagcttttatctaaattgcaattctataaagagagaagaaaaaggtctgggcacagtggctcactcctgtaatcccagcactttgtgaggccaaggcaggaggattgtttgaagccaggagtttgaggctgcagtgagctaggattgtgccactacactccagcctgggcgacagagggagactctgtctccaaaaaaaaaaaaaaaaaaagagagagagagagaaagtggggggtgcaaaggaaggaagaaaggagggagggaaaaagggaagggaggaaggaaggaaagaaaggaaggtaatgaagagattgttgtatttaaagagtaatacaggttagatacatatcctcaaattcaggaaatccaaggaattcccaccagaataaataaaaagaaattcacatgtaataaattcgtgagtttattacaatgaaactagaaaagcaatgacaaagataaaatcttaaaaggaggaaaagagaaaaggcaaaatccctgcaaaataactgttagattaacatcaatttctcaataacaatgaaagccagaagacatagaaatactgtatttgtacggggttggtggctcacgcctgtaatcccagcattttgggaggccgaggccggtggatcacctgaggtcaggagtttgagaccaacctagccaacatggtgaaaccccgtctctactaaaaatacaaaaattagcagggtgtggtggcaggcccctgtaatcccagctactcggaaggctaaggcaggagaattgcttgaacccaggaggcagaggttgcagtgagccgaaatcgtgccattgcactccagcctgggcaacaagagcaagactccatcttaaaaaacaagccgggtggactggctcacgcctgtaatcccaggactttgggaggccgaggcgggtggatcacctgagttcgagaccagactgaccaacatggagaaaccccatctctactaaaaatacaaaattagccaggcgtggcggcgcgtgcctgtaatcccagctactcgggaggcagaagaatcacttgaacccgggaggcggaggtttcggtgagccgagatcgcgccattgcactccagcctgggcaacaagagcgaaactcccatctcgaaaaaaaaaaaaaaaagaaaagaaaaaaaaagcaatactatatttaacaggattaaaaaaaacacacaaaaactgtcggccgggcgcagtggctcacgcctgtaatcctagcactttgggaggccgaggtaggcggatcacgaggtcaggagatggagaccatcctggctaacagggtgaaaccccgtgtctactaaaaacaaaacaaaacaaaaaaaaatacaaaaaattagccaggtgtgatggcgggcgcctataatcccagctactcgggaggctgaggcaggagaatggcgtgaacccgggaggcggagcttgcagtgagccgagatcgcgccactgcccttcagcctgggcgacagagcgagactccgtctcaaaacaaacaaacaaaaaaacaaaacaaaacaaaaaaactgtcaacctataattccttagccagtagcaaactgataccccaacattaaggtgaaataaatacatcctccaacaaataaaactgaggaagtttattatattagatcttatattagttttctattgctacataacaaattactataaattcagtgggtgaagcaacataggycaggcatgatggctcatgcctgtgatcccaccactttggaggccaaggcaagaggatcctgtgaggccagcaatttgagaccagcctgggcaacataacaagaatccccatctctataaaagaaaaaaaaatttaattctaactcgattacctctgaaaaaataaaaaataaaaaataataattagccagagtggtggcatgctcctgtagtcccagttacttgggaggcagagaggcagaaggattgcttgagccaggagtgtgaggttgctgtgagctgtgatagtgccactgcattccagcttgggtgacagagagagagcctgtctctaaaaaatataataaatatgtttattttttaaaaaaacacatttattatctcacagtttctgtgggtcgggagtctgggtacatgtttgctgggtcctccactcaggaggtcaccaggctgaaatcaagaagtcatccagggttgaaagctcattgaagttcagggtcctctttcaagctcactggttattggcagaattcaatttgttgtgactatagaactgaggcctggctcccagaggccatctgccatccctgccatgtggccctctccacagtgtagcaatttgcttctttaaggtaaaggagagaatctttctaacttctgtaaaggcttgaagccttttaaagggctcacttcattaagtcaggtccacccaaaataatcaccaatttgattaactgattagagactttaactacatcagaaaaatcccttatgtcaggtaaataacgtaatcacaggagagaaatcccatcatattcacgagttctgctcagacttaaggggaagggggattttatagggtacataaacaaaagatgagaactttggaggccatcttagaattctgtctaccacaaatcctcactaaagtaactttcttttgagagagaaagagagggtctcactctgtcacctaagctggagtgcaatgacgtgatcacagctcactgcagacttgacctcctgggctcaggtgattctcccacctcagcctcctgaatagctgggactacaggaacgtgccaccacactcggctaatttttgcatttttgagagacggggtttcaccatgttgcccaggctggtctcaaactcctgtcctcaagcaatccacccgcttcagtctcccaaagtggtgggattacaggcatgagccactaagcctggcctaaagtaacttctaaagatgtacttcaggtagaaggaaaataacacaagatggaagatctgagatacaagaaagaagagcaagcaatattaagtattaacattaaacatatgagcaaacctatacaagtatcacctatttaaaataatatctgatttgtggccaggcatggtggctcacacctgtaatcccagcactttgggaggccaaggtgggcggatcacctgaggtcaggagttcgagaccagcctcagcatggagataccctgtctctactaaaaatacaaaaaaaaaaaaaaaattagccaggcctggtggtgcatgcctgtaatcccagctactcgggattactgaggcaggagaattgcgtgaacctgggaggcggaggttgcagtgagctgagattgcgccattgcactccagcctgggcaacaagagcgaaactcagtctcaaaaaaaaawaataataataataataataatatctgatttgtgagattaataaaatagtagaattaaaatatagggttacaaaaatgtataaattcaaagagaattattaatgttaaagaactctaaaatctatgaattgttttaaagaagaatgaagatattgattaaagacattaagttaaatatgtagattaaaaattctaggccgggcgtggtggctcatgcctgtaatcccagctactcgggaggctgaggcaggagaattgcttgagcccgggaggcggaggttgcagtgagcctagatcgcaccactgcactccaccctgggcgacagagagagactctgtctcaaaaaaaaaaaaaaaagtactcataacaacaaaactaggcagtttccacataaataaggaaaaatacaggccaatctcctttactattttttcttttttctatttatttatttgggccaatctcctttatgaacatagtaaaaagttttaaaaaaaatgagcaggctgtttagcaatgcataaaaaaggtaacactattacaaagttgggtttattccagaaatgtaaggttgtttcaatactagaaaatctattaaagttttctagaaaaagaaatataagttggaatagttacaaaggaagaaataaaactgtgattattcctggatgatgtgattttccatgtagaaaaaccaagagaatctatggacgacttattagaactagataacttaataaagttgtttgatataagatcaatatgaggcaggagaggtagtcaaggaagtgaccaagtagtcaaggcagcaacagtggtgactgtacaatcaacacaataaacctcagcatatgcattgtaactgagctcattcaagcaaagctatcttcagtagggaatttcccctgcagacagcatgtgcagtttgatttacctgtcctcaaactgaccctttgctcattttattagtaaaaagtacacccctggatattgaagatgctaatgagacatgtgacatatgaacaagcatatacagctactgcacatccacacccagaggaccacccagaacatgcttactagtaacacctcttcccacctcatgaataatcatgtcagacttccataagagtctccctagtgccagtctttgctgtctcatccttatgagcagcctgccctgaattctctcactttcggtgtactgtctgttctgcacctacctttcaaaatattctttttcttgtgcaataaattactctatgctgcacttcttttgctgtgtcccttgtttaaattctttcaaactaagaactgaggtttcacacagccgtcaacagatatacacattttaaaatatcatttataatagcataaaaatgaaagtgcctgaatataaatgcagtaaaacttctgtacaagatctttgtggataaaattatttaaaattttgtacaggtatttagaagatttaaatagatataagagtcaaccttgtccatggttaggaagcctcaatctcataaaaatgtcaatcctcccaagtatatctatagattcaatgcaatccccaacaggatgtgtgtgtgtgtgtgtgtgtgtgtgtgtgtgtgtgtgtgtgtggtgaaattcaaagagctgattctaaaatttatatacatgaacaaagatcccagaaaaggagcaatggactcatactccctaaattaactggattttatgactcatcacccagagcaggctcagtacaatactagttgggagacaactccctgtgaggttggggtgctgtgctacaggatgtggtaaatgccttaatccagaggtcactgtgtggggctatcttccccataggcaagaagcacaggtctgggaatcaagaggtacaaatgaaagtttcccttcttactggtatccccagcgctccccggaaggagtcttacttcaagttaccacaacccaccacagcacccggtaggttgggagatcctagttcccaaaagatgaatacttccaccggctaactggcaataaagtggaagattaaactgtgtgaattattcttttttttttttctttttgagacagggtcttgctctgtcacccaggctggagtgcagtggtgccatcttggctcactgcagcctcgacctcccggtctcaatgcagtcctcccaccttccactcccaaataactgggaccacaggaacacaccaccctgctcagctaatttttgtatttttttgtagagatggggtttttccatgttgctctaggctggtcatgaactcctgagctcaagcaatctgcctacctcagcctcccaaagcattgggattacaggtgtgagccatcgcagctggccccgactattcttgactctcaagtcatcactaagccaacaggcataggaagtggtcattatactggacagtaattggtcctagaagccagcaaacaaagggcataatcagagtaagtgctggaagttagaggcagggtggcaagttagggcagaggtcacagagggtcagtccatcttgactaggcttgtcagtcggactgaggcattccagaggctctgggcaacatgaggatcccgagaggctttaacgggaagagttatcacacaggaactgctgaaatattttccagaaataccacccggctcctctgccaagctcaagtagaggactgggagtacaccttgtttgagatcctgttgggagggacaagcgaaaaagaagtcatgccaggcaaactttggcctgctgggacacactgagaagttgagccctgccccattcctctaggccaaaccagttctttcccccacctaccttcatgaagaagctgacaagctagaagaggaagcattatggctaagagaaatgcctcataatccccatgtatacaacaccgggctccacagcattcacagtcattcctaagaaggtgagacacaaggagagtgcaaagtgaagagagaggaggatgaccgataaaaggggttaagtgtagttcagcagcgtgcaaatcctaccaagtctgttgggtagtgttgaccagtgacttgagggtggtgcaggggacactggtgctctgtagcttaccttaatggtacccaagccagtaaggaaggatgggtattggaagtgttgggtgaactgtaggaggaacatggtggacgatgctggtattggaaaacaccagcaggaaagaaatattgtgggagatgaaaagagtgggaaaaggttgaaatgatgtgaatacagggttgagagaaatagagggtacaaagatgatagttggagtggaataaaatgctggtttggggcacattgggagtactttatggccaggacatgttggcaggagatgcgaaaggttgggaggtggtgctgggagtggagtaaggggtgtcagaggcagttacctcttccttgaagtctctgggcaagctctccagtgaatgaagtcaatagcagtttgctgcagtcatagttttggttaaaggtcaaagggcctccagcctgtcaggtgcccctcatcaatgtacccatgtgcatgccgaacggaagacacattcaccactggggctgaccctgcctgtcgtagggcccctgggtagagatgggagggaccacactgcttcaatccaagttctagagtaaactcccatgctcactccccaacctgcttctccagaagataggagagcagggctctctaagaaggggcagtggggtccctatccagaaacctgggctaggcataggagagcttaatgttagctgggacctcattttcattattagctgccttcctaatgatcttcttcttctttcatattagtgtttggagttttgcctttcttttcttctacttgctagttggagctaccttaattgatcctcatttatatgttttatttcactgatggctaagaaggggaaggagaagctggaaacactgtgaaagttgctttcatgtattcatacattcattccttcatttatccatcccacaaatgttcattaggcacctggaatatggcagacactaagctaggtgctaaggacataacggtgctaggtttgggggaaaagaaatatgtgtgcagagatacttgagaaaatgtttttaaagaaacaaagctagggaaggtcatcactggaaaactattaacaagcttaatatttaaaaaaaaaaaaaccaactatgtttcaaacaaaaacaaaattaaaatcctaaagttaaatcttaaaaaaaatgtttaaaatagtacataagtgttttagtctgttctcacaccactattaagatgctacctgagactgggtaatttataaacaaaagtggtttaattgactcacaactctgcatggctggggagacctcgggaaacttataatcatggtggaagacaaaggggaagcaaggcatgtcttacgtggtggcagaagagacagagagcaggcaggggaaaactgccactttttatttattttttattttttattttttttgagtcggagtcttgctctgtcgcccaggctggagtgcagtggcgcgatctcggctcactgcaagctccgcctcctgggttcacgccattctcctgcctcagcctcccgagtagctgggactacaagcgcccgccaccacgcctggctaatttttttttttgtatttttagtagaaacggggtttcaccgtgttagccaggatggtctccatctcctgacctcgtgatccacccacctcggcctcccaaagtgctgggattacaggcgtgagccaccgcaccaggtcaaaactgccacttttaaaaccatcaaatcttgtgagatctctctcaatatcacaagaacagcacgggggaactgcccccatgacccaatcacttcccaccaggtccctccctctacatatggggattacagctggagatgagatttgggtggggacacaragccaaaccatatcaataagtatacaaaaaagtctggattggctgggtgtggtggctgatgcctgtaatcccagcactttgggaggccaaggcgagagtttgaggccaaggtgggaggcctgaggtcaggagtttgagaccagcctgcccaacatggcaaaaccccgtatctagcaaaaatacaaaaaattagccaggcatggtgttgggcacctgtaatcccagctactcgggagggtgaagcaggagaatcgcttgaacccaagaggcggaggttgcagtgagccgagatcgcgccactgtactccaacctggtaaacaagagcgaaactccgtctccaaaaaaaaaaaaaaaaaaaaaaaagtctggattatgtaaagtataaaaaatagttgttgtcacatatgagtttacagtattgtttttaaaatgctaaaactattttgaaattaagactcactcagtgggaggccagcctgctgcatggactgcttccagcactgctccttctctccccagaaaaaaaaattaatacaaaataaaatttaaaaattacaaattacaaatgagaaactgagcaggtggtatttagccaaaatttgctggaaagaaaattattcttaaagaagacaatggactttaaatttgcagacagtgacatagagaccaaaagtgttctctgctcagttggagagactgatcctcacagagcaacatcagtgcagtcacagagatatgtacaagggggctaatggagccccataaataggggtgactgggggaggtgaaggttggggaaagatccacagcagaggtgatatctgtgctgcgtcttggcaggtgaactaaagttagccaggccaacatgatgagaaaggatattccagatagaaggaaccgtatgtgcaaaaacacagccagagggtgaaaaaaaacagaccgtggtccaagagctgcagattgtctggctggagactaggaggtgggttaaggaagggcaaaaggcaaggctcttagtcagcagagggttttttttttttttttgagacagagtttcactcttgttgcccaggctggagtgcaatggcgcggtcttggctcactgaaacctccacctctcgggttcaagcaattctcctgcctcagcctcccgagtagctaggattacaggcatgcaccaccacgcccagctaattttgtatttttagtagagacggggtttctccatgttgatcaggccggtctcaaactcccaacctcaggtgatttgcccacctcagcctctcaaagtgctgggattacaggcatgagctactgcacccagcctagcacacagccttctaagtgtagagaaggggcttagagttcatcctacaaaggagaggttaccttcaaaggattttaagcaagaaagtgtcatgatgaaaggtgattactcgatgtggcagtggggagaatagattagagaagatgagacaggaaagaagtttaagaaactgtcactaagcaagatgcagatagtgtcgtgacatgttacaatttgtggaaagggacaaaaacaatcatacttgcaggtgcatagagttttgcctttgttcactttccaattgggattaatttagttgactgctaaaggatacgtgagactccggcaacagtagttgcctctcaggaggggaacaggtggcttatgtaccagaagagaaaaatagtttaaaaaaaaaaaccctctgtatccttttgtacactttcaattttgtactttggatatgtattacctgaccaaaagaaaaattgcttttcttttaaggagrctatcacattgcaaggggatgagtaattaaaaaataataataataataaaggggctattatacaatctaggagaaaatgtcagagagaatgttcctgccacccactccccgaaactttccctggaggagccaaactttctcaatcagaaagggcctcttcaaaggacttaggcccaaggcagtaatgtatcaactgtatcatctgtatggcctacacctctggccgaccctgagaacagaaactgagtcttcttgctttctctgtttctggtgcctagtgtccccctcaagaagccttcattgcaaaaactactctactggtctggctagaactaggggatgggagaaggaggtctgggatctcatatccccttgctgattatattttgggctgaatgattcttctaycagccttctaatactgacttgtgccagctgggcttccctgatgtgygacacaaaaagtgtgttgggtcaccactcagcaaacagctgggtgccaagaggcaagaggtggtcctgggagacagttactagaatgccaggggtatagggaagagggcagcacagaaggtgcccatccttccttaccttggagtagatttgtgagcagaaagggcccaacatagttagtgacaaaggtgagatccaggccccctggggtaagtgtcttcggaatcctgggaggaaatgaaaacactggcattgagtgataaagggaccaccttgagggagacaaggtctgggagggacatattaccttcagcagaaatgccacaggggcacatacatgtgaagatgggggcaatgaagtttaaggctataactcaatgtcagctttttaggggagggtatggattagtgttttggcaagattgcatagactaggctttgaggatacctgttttagagttcctgagctagaaaggagactgcagaaacatgtttggagaagcaagccaggcacataccactgactccagcattgtttaccagcagatgtatctcaggattctcctgtagaagcctccgggcaaagctccgaatagaggtcatggagctaaggtccacctcgccaagcaggaggcggttgctgtttgaggctgcttggatctcagccagggcttgctgtccacattccctgctctgacaagtaaggatcacttgggccccacaccgagctaggtcctgggatacaaccttcccgatgcctgtgggaggacaacttcggctgggtggtgactacagtgaacaagggacactctaggggagggacaagggtgttgatagtggatgctcctccctgccttccctgtgagagttgttggaggctgaggcccatagtgaggattcagggtgggaggagcactcaccactgttggccccagtcactatggctattttcccagtcagatctgtggagcagcactggaggtcccagggatgagacttctgccagagctgcacatgtagttgaagaagaccagaataaggaagacagagccagcgccccagaccaggatgctgagtgcagcccacagcaacatagcagaaacttcctgggcctgctggggaaatgctgtaggaggaagtgggtgcaggataaatctgggcagagtggagactagcaatgaggcaggtgtggagcctaagataaaatttaaggaggcactgactcttgagtttgttcaatatactgtttgagtttgagagttcctccttaacttcaaaagtgaaatttggatttgcagtctaaggtgaagtgaccaagctccagggaccagggaagcaagaaatcaagttcttcatatctcgaatcactctgtgcttatgcggggccttctccttcctcccctactgaaaggagactcgaagttctctctacagagccagacccgctggcagcccttatgtctactcctttgggggacaggggtttctctagaatgcctctgcaatggggcagctttggccctaatgcagggtctcctaagggtggcgagagggttatttcctgaaccctggttctatcttcttctaggcctgcaggataactgctccccttggggttcagtgagagggtggacacccttggaagaaactgacaagagacatcagactagttcctaaggcaactcaggtgtttatttctggctagcagagggagggaccagttactactgccagaggctcagggatcagagggaggcagcaggcttagaggagcgtgaccacactttgggggctgagttcttcattagctgtgctacggtcacctgggctttggggcacctgtctggatgggatgttgctcaacgggaggaaaggtgctaccttctttgtcctcttgttcaggcacaccagagctgagcaacacctgggtgctccggttccacatgctcacaccaggggccagcttcagggcttctggcagcaacacsggcttccacatcacctgggaagtggcttcaaggaccgggggtgtggttmgaggccatctgccaggatcctggccctccctgtctgccagctccagaccctgtggaggcacgcgggtccggccagcccacagctcgcccagcagctcggccttcccctcccaaccgctgggccacctgacactgggccacagcttggggctgcggctgcgggccacatcagggagcaccgggtgtgtggtgaggaagcggatcctggagtttgggagtggcagctttgactcgagggatggcgacgataggcctaaatttaaagtggggaacaggagtgcggggcccgagtccaagtcacggaaaggaatgcctggccggagagggaagaacgctgccggggagacacgggtgccggggccgagggcttgrggttcggcccgggccttggtcttctcgccccgctggcgtccgcggtaggcttccaaggggcgtgtttgagagtctgggaccaggacctcagccagagggcgcacccagtggcacgggagcctcgcagggtccaggcgtttcacggccgccttgcggcgcatcctgtggtggtgggcgctcagccgcacatccgagtgcccggcccgctgctgctggcaggacgcggaggggcgggtggcgccgcccacagaggggtaggacaccaacacgcccgaggcgatgcagggcaccccctctgacctgagttccagccgatccccagccgcgtccagttgaggcatgcaacagtagaggtcttccaacgacaaatggaagccgagggggtgtcccctcccagttgaggcctgggggctggctaccaggtacggatccagagaagggtcggcatcgtcggcaggcgcctcctccaccgacagttggaagctcgcgctcaaggacccggccgaggagaggcctctagactggccgtccgcttcctctacaggacctccgggccctgcctcctgaaacagctctgatgtgggaggaggggccgacgtgactctcagctgcggagaaggctcccaagattccatctgctcctgggagcctcgacccatccacgaccttcctaaagggatccggtccacgcccccagggtcctggggaaatgcactcgggcagtgagatgtcggaaaggggagagcaggagcaatggcagaggagtccggagaggctcctgaggagtgtacttcgccttggaagttctccaggccctccgaggtggacgcgtgcagcacgggcactsaaccctgagcccaggagtccgtcgtgcatgccgaaggctcctcgtcctcaccccatgtggggkcctcagctactgcagattctccctcgtcccgggccaggaagcgccactcggtgatctgcagcatggcctcccgggcctggctgatggtgaatggaatgcactgcggaggcgagagaggatctcaggtcggcagggaggggcgggagagggagacgagtctgaaggacccggatcccggcccacctgctgagtcaggtagactttgaaagcagagtccatgactcgagccagcaagtcggccaagatgtcccctacgacgtyctcgccctcctcgagggctgtaagcgccatccactcggcctcactgagccgcccaggcacaatatccacctgcggcactggcacagtgggcggccgcactttttccgccttggaccgggtcaccccgcggtctcggacctgcctctcctgcctctgtgagaacaaaacatggcaatcagagcaggaaaccaagaagtggaacggaagagtagctataggctaggaggaagctttctcaagttgtctagtgggaaggaaaagggccaattgacgaagagcctactatgtgacagatacttagtagatgtttgacctaataattttcattaacagcccactaaccacaattgacagataaagaaactgaagtggggaggctgaggaaggagagtcacttgaacccgggagatggaggttgcagtgagcagagactgcgccactgcaccccagcctggcgacagagcaagactgcgtctcaaaaaaaaaaaaaaaaaaaaaaaagaaaaagaaaaagaaagaaaaaagaaaccgaagtctgacagaagttaaccagccttgcttaggagcacacagtgagcaagcccagacaatgtgaaggtttaacttcatggcccttataccagagcaaagtgttcaaaattcttgagtgttcaaattacttgagaaagacaattcagtaaacagtcctggaattattggtgctatttagagtcttctctacattttgttttccagaaaaggattttttttttttaattcaagtaattgcaaataggaaaccagagggggagccccaggctgggacaaatcatggctacccctccctgacagacccgggggagcaggtggcccctacatgctttatggtggatttgggcccccttgctctctctgctgcagcatcctaggggagtagtcagtcacccagcctgccatgccccagcccctcttctccacgaagagtaacctgggggaggggatcatgggcagaacaggaggcaatgtggatgaacatttggcgctgctagcagcagcaatgacagatgtcaaagaatggaacattgaaccaaaaacaaaacaactgtccagaggtagtttgtgaacaaaggaaaaatggaaccagaacctgsgggggtggcaggagcaggagggctgggagtgggaagggtgagctccttgttattggtgccccatctgaggagaggaaaatggccaagtggtagaagcaaagtagggttgggggagcagccccagcccacctcaggtagctgccacagggctcatgggcctcacctggacaataggtgactgcatctccatcactgcaatatgtactcagatcccaggcagacggtaagggggctggggccactgcaaagagggagtaggggactcacacccctcccgctttcctgtagccaatgggggctgtccaacctagtgcagggactagggaaggtggggaaggatgaaaggtgtgagcctcacgtggtgacaamgacagtttggctgggggaatcctgggggccagcacccccctccattggccacacctgctgctgccaggacagtggagtggggtgtgccagaatgggggcttgggccccttttaagaccaggggaaccctcccaggcccctctatgggaagccagaggcaacagtggaggagcagagaagtggctcccaaaccaaaagcccagagagcaatgtcaccaccaagggatcagggacgcagcaggtgcagggtgyggctaagcaggacattagccttgtccaggagggcacatgtgtatgagtgggtggacggggggaggagggggtagggatgggaagaggccaggggaaaagtcctctccactcagcccatagggacctgcagcggctggtgtgttgtgtagtgtggtggtgaaggtgcaggtggaagatgagggtggtggctggaggcggtggtgatggtgggtgtagggaaggggtggggggtgggaggtggggggttgggagcagatcaaagctgtccagtcccagaaggaagctgctcctccagtgaggactcctgcgagatgcccttctcttcctccttctccagttttttgggtcttccccttggtttccttcccagagttgtggtggttttcccggtcttggcagcacccttgtttttgcttccctttggtcggccccgaggtctcttaggtgttggcacttcgctgagctccttctgactccctaccagcgctgtcctgggactcaccggaggctgcttgcgcggcctgccacggccccgcttctcagtgccgtcctttttctgcttggaggccaagggctggctggacttcgagctcgactcgctcatcttcccttctctaaggactagttggaaaagtgatggctgggatgggcgaactcggccgctggcctgcggtgcatgctccggtttgccgggagcagcggtgctgggcgctgaggacaggccagtctccaccgcagccgcccctggtcgcaaatgcggatgccttcctggagccgcgccagcgccagaaatagcccaggctcggagtcccacttagaagagcacagccccggctcaggggagcttaaaaagttctctacattttttttttttaaccaactattcttatctccattttatggtaatttacccagtatcatacaagtaggatgtagtgaagtcagaatgcattcacatgcaagtctgtctgactccagagcctctcaaagacatttgcaacaaatatgaaaaaagataaatatccccgagtaaattaaaagctcatataaaaaaaaaaatggccgggcgcagtggctcacgcctgtaatcccagcactttgggaggccgaggtgggtggatcatttgaggtcaggagttcgagaccagcctagccaacatggtgaaaccccgtctctactaataatacaaaaattagccaggcatggtggtgggcgcctgtaattccagctactagggaggctgaggcacgagaatcacttgaacccgggaggcagagtttgcagtgagctgagatcatgctactgaactccagcctgggtgacagagcgagactctgtctcaaaaaagaaaaaaaaaactaataaaataaaaaatagaagaagaaaaatggccaggcacagtggcgcacacccacagtaccagctgctcgggaggctgaggcagggggattgcttgagcccaggagttcaagtccagcttgggctatattgcaataaaaatttaaactataagaagaaaaaccatttaagatcccaaagataagcaaaggacatgacatttcacaagagagggactgtagatgactaataaatatagtattgacattctgatttctagttcatcaaattggaattattttaaaaacaagaatactcagcattggcaaaggtttagtgtgataccatgctgcaacagtatgcatgaagacattaaaaaatgttttcacttcctcaaccctgcaatttcagttctataaatacaaccaaaaggcattttctgaaatgaagataaaaatatattctccaacaaattctctgcggtatttttataatagcagaatattgaaaacatgtctttaaaaagagaataaataattgacatgctatatatactgaaatattatgcaatgattaaaggtaatctttttttgtttgtttgtttttgtttttgagacggaatctcgctctgtcacccaggctggagtgcagtggcaagatctcggctcactgcaacctctgcctcccaggttcaagcaattctcctgcctcagcctccggagtagctgggattacaggcgcctgccaccaggcctggctaattttttttctatttttagtagagatggggtttcgccatgttggccagactggtcttgaactggcctcaagtgatctgcccaccttgcaggcatgagccaccaacccagccattaaaggtaatctttagaaagaatttgcaatggcataaagcaaatgtttatgatgtaacgttaattgaaagaagcaggatacaaacttacacatcaattatgatctcatatatgtaaaccactatgtgttcaacaaaaggaaaacttcaaaatgataacagaggatacgtttccttcctatgctcttttctattttgtaagttctctacaatgagtttgtttccttttgtaatcacttaaaaaaaaaaaaagactagtccccaaaactcactttagagacataaaaagtttacaaacaatctcttgggagctccctcaattccccacaacagtctccctgaacctggttccttccaaaatgtacttccaaatgtgatcttcccaaacctttgcctattgccccgctaaaaccttgtctcatatctgtttcctaaaattcattatccccccaaatctgctgtttcctaagtcttgcagaactcaaaatccctgaagtctcattaaccctatccaccagtgagaacagccctgtagcaagcaccaggagtggcccatagcccaggccaagcttgactagagcagggctgactggactgagtaaagagagttgtttccttagacctcccctcccagcctcgcatctgacacccgtgatggtgaccagaagggacagagatatttttgcacaaaggctcttcaaatccgttttctttcttcttcttcttttttttttttttttttttttttttttgagacagtctctctctgtcacccaggctagagcgcagtggcgcgatctcggctcactgcaacctccgcctcccgagttcaagcaattctcctgcctctgcctcccgagtagctgggattacaggcaccgcgccaccacatccagctaattttttgtattttagtcgagacggggtctcgccatgttggcctggctggtcttgaactcctgagctcaggcaatcctcccgcctcagcctctcaaagtgctgggattacaggcatgagccattgagaccggccccgttttctttattttaaaattgattggctcttaaacaatttgactttcaagtgcagtctctgaattatttaatatatttcttcctcttgaaattctcgaaatagattttttctgttatcttccctctctaaatgctcatccatttaaatacgcaccacyatgtaagagacttactacattcattagctgtttcaaaatccacttcctgttctcgggctctacaccacccactgaccctttccctcatggcttgagtgtaacaaagcgtttgagtgggcaccgtgcaggtgtaggttttctgcccgagtaccgacgtggcttccttggtcatctaaactcccgcgcggtgggcgggagcaagtaggggcactgggcggccyagagccagcccactgttcccgacaccgaccttaacggccgaccctggctctggcgcatccccagctgaactgaagctcaccgagcyttcgtgcgccatcgccaacgcggtcgcagcaacgctggtgtttctgctgcatccgggccgcgtaagccacctaacagtcgcctgggcaaccacgggctcggggtcgctcgccccgcccacagttgccccggcaaccgcgccgcccgcgrcacgttccggccgctcaccccgcccaagggccgtgcgyacgtgcgtcgtctctatggtggcggcggatttggagggaccctacgaaccaggagtcaggcgagccgatctggggctgcaggtgttacctctgatctaggccgggggcttcagggatccgagccgagggagaaagccttgggggcttcatcacacttatttggctcgcgggcttggggccatcgggtggtcctgtgtcatccccattcctcctctgcgattcccccgtcgccccaaaacagccctgggactcccctgtcttgctcctcgagaccctcccccatcaccgtcctctgggcaccccatcctatgacccagtctcaggcatcttccgaaatgctcgatgatagccgccctcgggcatctccgctgcgtctgtttgtagcgcgcctggtgattcggctgcacccccacacaggatgttccgctgggagcgctccattcccctgcgaggctcggccgccgccctgtgcaacaacctcagtgtgctgcagctgccggctcgcaacctcacgtattttggcgtggttcatggaccaagcgcccagcttctcagcgctgctcctgagggtgtgcccttggcccagcgccagctccacgctaaggagggtgctggagtgagtcccccacttatcactcaggtgaggcatggagctgggagtgatgttgctgaacccagtcctacccccagccttttctctccaaaccttcaggagcaggcatgtcctaacctcagaatctccccaggcatgtcctaacctcagaatctcccctctcctgccgggcgcggtggctcacgcctgtaatcccaacactttgggaggctgagacgggcacttgaggccaggagttcgagaccagcctggccaacatggtgaaacctcttctctactaagaatacaaaaaaaattaaccgggtgtggtggcgtgcacctgtaatcccagctacttgggtggctgaggcaggagaatcgcttgaacccaggaggctgaggttgcagtgagccgagatggcgccactgcactccagcctgggccacagagcaagactccgtccccmaaaaaaaaaaaamaaamaaacaaactcatcttccctgctttgattttctccctacactgatgcacctccctccaggtccactggtgtgtcctccccttccgagtgctgctggtactcacctcacatcgaggaatacaggtaagaagaggactctcctgcttgccccaccagagccttctcagcttccctgccaggcttccagactttcccacttgcctctaaacacttccagacttttcacatgcttggcccactcactctttttctatttcttatcttcaatctttccatcttttccagtttccaagtgccacctccagtatctgcccctttactagctgtatgtccttacactattaacttctcactctcactgttgtcctctgaaaaaattaggataaaaatagtacctacatcccagatttgttttgaggattaaatgggctaaggctaacacggatatgtgaagtactcagcagaggtcagttgggttatgccccctggttcttgccccggtcttccagatgtacgagtccaatggctacaccatggtctactggcatgcactggactctggagatgcctccccaggtacctgcaggaccaagtggggtgggggcagggagtgtttgctagggctgcaggaggggatatttctgatcattctcccctttcatattcagtacaggctgtgtttgcccggggaattgctgccagtggccacttcatctgtgtgggtgagggagccaagtgcagggcatggaggggtgctggggcatgtgggctgtggccaggagaataatgagggcctgaggaaattgtggaaagttagagggaagggtggaagtggagtggaatcagagactccagtaaaccatggaagggttcagagggtcagggtgggataagacaaggctagtgaatgaaggggcatggccgttggagcagtgagagggggttttgttactaaggtttctgggatggagtaagtgttgagtatggtggctggagacccaggagggtcaggaagtcatcactggagtactggttctggatacaggaacgtggtcaggccgggtgctggtgtttgacatcccagcaaagggtcccaacattgtactgagcraggagctggctgggcaccagatgccaatcacagacattgccaccgagcctgcccagggacaggtgagtggacttcccctacccatctgggagccttccccaccctgggaggcaggggacctggctttgagtcttggctctgccactaaacaggtggatggctttgggcaaatctacattttcctagtcttcagcaaccaggttcagtgataaagccagagatactttacatttatgtagtrttttatrgttaaytaagactttataatactgatgtgaaatgaggagttggaacaaatggtttctaagatactttccagctctgaaatgtgcagcttccttctctagggcaagtcccacctattcaggcccagctccagtgccatccatcctctccaggaagccttccccatattctagctcccactgatgtctcttagctgaaacctgaattggcactgccctcaaaagacaactcttgtctccccaagtaatttgcaaacctcttgagaacagggtgtatattttcttattcatattctccattgtacctgkcatagggctaggcccataggttgtgttggctgcctggtgttgggggtgcaggggcccagggtctagtcatgactgtgactggttcactacgagacctccagaaggtcacgacactgtggcctcagttttatcatccatccagtgaggcaattatgcaccccctcctaatgttattgggggatgggactccatgaagaaattcaaggaaagcagttcatgcttcccaagggaaccctggtggtaggggtggtttctgatgggtctagctagtgagagctccacaccttgccctttccctggagaggcaaagatgcacacactgcctcccttcccctcctgccctgtatacaggaccatagcaggggagaaagggaagggttgatcttgcctttcccttcaggattgtgtggctgacatggtgacggcagatgactcaggcttgctgtgtgtctggcggtcagggccagaattcacattattgacccgcattccaggatttgggtaggtgaggcagaaagggtagagggcttcctgagatagcttcaggctggggagtaggatttgatctgggcaaaacaaagttgggtgtcacccttgcagagttccgtgcccctctgtgcagctgtggcaggggatcatagcagcaggctatgggaacggacaagtgcatctatatgaggccactacaggaaatctacatgtccagatcaatgcccatgcccgggccatctgcgccctggacctggcttctgaggtgggcaaggtaagtctcctcctctgtacctacataccctttttcctggcagtggaatgttgagagaacaccacaggcttgtctttgcaactcagtgtagccccctcccctggggcacctggactggggattccagcttatagctgtcccgtcagggcattctgactccccctcttcctcctccacagctactctctgcaggtgaggacacctttgtgcatatctggaagctgagcagaaacccagagagtggctacattgaggtatgtgtcatggggtgggtggaatgggggggcccaagcatggggcagcaggccctgacgagccctctgctcccccaggtggaacactgtcatggtgagtgtgtcgccgacacccagctgtgtggtgctcgattttgtgattcctcaggcaactcctttgctgtgactggctatgaccttgcggagatccggagattcagcagtgtgtgagaagagcagccttcctttgtccctgtggtattcataaagtacccgctccacccagcctttgtctgattactcagtatcacagtcatgtttcacagctggtgaactatgctccagggatgatgtgaggcaggtctagaccaggcagagagaggcaccctgtcctcaggagccaggtgaaggctgctgttaaataactttaatggttgatgtgggagtcacaagggagktrtgtttgctccaagggttcttcagtgccatcctcaaagctggttagtgcagggaggtagggcagagttggttccagttttcttccaggaagggtttagggaggtcccagcgagccccaggaatgagtccctcggtaccatggcaaccacaatttaagaggggcttctgcccacccctgcagcctaccccaggtccagcagaggaacaggaggccagactggccaacttgctatagacagcgccgtatccagagcccaactgcgcatgggtcattttctcttctgggcagatcctatgccagcacctttctctctcacactggtgactggagccaagtgcgaggttggcctttgctgcagaggcctctggtccgtggggatcgctgaggtgggaggggggcaaccgagcgagccctaggggagtggtctggggggacagcatccagggaaaaggttcggggtctcccccagggcagggggtgggtccagtctggggctggggccactgaggcaggcgagcaggggttaggcagggcaggctggtctgtaaacattgccagccagggtgggggtgtctccagccttgcgccctcccgctgggtcaggatgtctgtcaccgctgcgatgtcatccagcggctcaatagctgtggcaccaggaaggggttgggggagggttgggctagtcagagctcaggccccaagcctacccagccctatcacctgtcactgtaataggaggaaagcaaagcctggatctcagtggagattgcgttatcctgcaggagcagcccctcacctgggccccctggggctacaggctctgataagactgtgggacatggggcacaaggtagatggggatgggaaggggaggagtggggagcagaggtgggtgaagaaaccaagaggagaaaatgaaagcggtgccaggcaagtgaggggtcagaagaagagacaggaatccacatgcagaaagggaaacagaaaagaagaaattaggaaagaaattaatgaaatgatcctggctcaytggggttttgttttgaactttggtggaggtggttctaaaaagagttggagaggagaaaagaacacacaagattgggtgagacttgggtccccagagatctggtgtagcccagagtgtgctttctctctgtttccattatctggtttctcttgaagtccccaaccctacttcccattagcttcctggagttcacattcctctcacttacccatctcatggtacaaggacccctgctttgccagtgcttggggtggtttccggggagcaggagtttcaattttcatgatttcatcacagcactgcttccattggcctggaagaagagcgctgattaaaagagagagccaggctgccctttctcctgctacattcccttccacataatcttgaaacagaggcctttagtaaaaatgacaaactccagttcttcccaaaggttcaacccagcccccttctctcttactcatgtcaaagaaaagctgccacagagcctccatccagctctgcagtgcttcccgactttctgtctgaagggtgtgtgtcacctcatcatccccatactggttactgatgcttagggtgaagggccgtcctagagcctggtccagctcccctgcccggactcgagtctcctgcaggagaaagaagaggtctaccttggtcacagaagttggcagtgacaatcaggcagccttgatcacgcctgccttagaagaatgagcttgtggggcttttgctgagccctctcatttgcctcctactgaccagagtagraaggaatggcaaaaaagggctggggatgagacagccagtcctgagtcaggggaggaggagcagcttgagacagggaaaaagggattgagcaaggcagggaagacacaaaggtaggcaaggatgctccagccagaggtccctcagaactgacaaaaagtaggcaggaaagcccataaaagggatagggagcaaagaagggcaattggacctggagagaaatgggaagtggtaaagtagatataaattggaatctgagggagaagagggagagaggatgaaaagccctgaacctgcaggcgagagaaccctctctgagatttggcagggactgaggatggcaagtgaatgggacgatcctctcacagtgatgctgtagttggggaaaatacgggcccctgaagctggatgtggcactgtcaggagcaggaggcctgcttctatctctctgaggtatgtgcccaccctcctggggcctgaaggagaggctcctgggcctgtgcccttggtggccttactaccaagggacccatcaccttgttgacagcaatagtaagcagcggctcttccccagtgtctgcatcctcaggttgccggtaacagaagaggtttgtgcctttcagaactccatgcacttgtgcccagttctgcatctccccagcttgctgcacaaatgactcaacattttctggggaagtcacggcccccagtatccctcttctcagccccccatgagaacctgttcgttttgtccaccctgctgtccattcctcccctcgtctggccataccccatttcttccacccaaatcttgatttttcattagctcttctattcctggttatccagctctcctctgccttctccctgctcccttccactcctcagggccccctcacctgcaccctgagggtaccacttgcagtgggctgagtcatgcagagaggctgagctgccagacggcaacacacgctaccataaaggggcagccaggcagggttctcctctgggggaggaggaagtgcagggtgaggtaggggaatgagaaggggaccatcccacagcccctcttctcaccatcacatgtgtatgtcccccatgcacacacatacttaccatgactggcaagggtgaggtcatgtgtgcggaatccatcttgcactgctgccagggtgagtgtggtgtgagccaagaggtggtaacgaggaccactgagggagataggagagagcatcagccaagggaggggcatgttggccagcaggaactctaagggctgagcagatctgccccattgttcagactgccccacagaaaactcgcttgcctccccagagggttaggaatgaacatttaccgagctccagctaagtgtcaggacgtatgctttatatgttttatcccactgtattcctatgacagccctgtgaggttggtggcattcttcaactagatgaggcagcttgaggcttagagaggttaagaaacttgcccataatttataggtggaaagtggrggagtttgaatttgaacccatatctatgtccaaaatcagtattctgttcactacccaaaggttctcaaactgcttctcagagtctcagtggtcccatgcggtgtctccaggtgcatttaggtaccaccataggtcccagggtactctgctccaaccaagaagctctgctctatccacataaaatgtatttgctaggctgagtgctgtggctcacgcctgtaatcctaccactttgggaggccgaggcgggaggatcacttgagcccaggagttcgagactagcctgggcaacatagtgagaccctgtctctaaaaataaaatgtatttgctgctgctaaaaaggtaagaccccagggcctaagtctccctgccttcccactggtcttctggactggcttcagcccagctctggggcgtgggctggaatgcctcccagctacgtggccactgctcattcatatctgtctgcacatcctggcrgcaatgcaaaatgggttctgcacactcaacacagttcaaaggtcacctgtgggcagaatacaggcagctgagggtggtgtcggtgtgcaaggccttacccaacaactggggtggggagcaagatgggactgctccctgaacccccagcactgtccagcgatgcccggacacgcctccctgaggagcggcccagggagctgctgagtttggtggcaagcctcttggggccgccagtcagggccccctcttcttccacacaggccccatacagctctaaccgcagttcaaagtctggccccgcctcagcgctggtgggaggaagaaaggagggtggtcacaggaaagtccagggaggcagagggtaggggatgtgggtgaggcaagtgcaggacagctccacagagaaggccaggtgcccctcctctccaccctgcccccatcccagcttcctcccctggaactcgctcatccagaactggagcagagtggaggaaggaggtagccacagtgtgaggtactcacaagagcacattgctctgaaaggagatgtctgtgagggtcctgtccactaggatcatctctgtgtcctggatgtgttcccccagctgcagcagcaggaacacagcccagcggtgcaagtctggggacaaagggcaaaacaaaaaacacgtcccacgagagcctcctacttcagggtcattcccctgaatttgtcccagggtgtgtggaactcaccacctttgttcttgaaatattctgtgtccttccacatgagtggaatccggaggtctaaggggcagaggggtaagaatagatgttgagatggggcaggaggccgtgtgcttgggcaaggggtaccagcagctggggtagctgtgcttcttaccagagatgcagacccggccgcggcagggggagcgctcagcgggcgggccactgtcagaaggcctgtggataaatcacaatgtcctggcctggcctctagccactattcccccttgctctggtcccaacgactctaggatccccctgatcccagcgcctcagccaccaggttcccagccaggccgacaggcagggctgagggactataagggaaagttgttcattgaacccagcagtttgccaggcttggggacaccagggacactcaagccacattaactcacacataaggcacaagctcagggctcctctctccaagcaacctccctgaccacctctccagatccctgccaaggacaggtgcagccttgaggggacaggtgcccacagaaagacttcatttccagggctctccattaaacccctggcttagaggggtctccagtctttatttwttttttttttaacaataggaaagctgcttatttcccaccatcccatcacttctttgatataggagggtactgggtcagaaaataatttggccaacatttgttcaaaggaaaatcaccaatagggaagagttacgttccattcactacagacccttttccttccctaccactccccaactttgatttctcctttttcctcctggcctgatatggtgtaccctactagtgccccaagttctgcagctcccccacaccccaytgcagggcccgacaccccaccttccttccctccctgcccatcatcaggactcaccatgtgtccctttcctgaagcgactgccagttcatctgtacttactcataatgccactaaagtaattactgacttagtagagccttaagctaaatgatgtggcactaatggcaatgtgtttagctgccaggcacttggggtgtacctcaaatcacctgtgtgggctgtgtgaggactttggcaggacagagtctgtccatgctgcctctcagaggctgtccccccaccagcttgcccttcctctagcttcatgggatagccatacagtgggttttctgccttcttctggtagcttcatgggtgagctcctggcaacctcctcttgtgtcagccttcatggctggaatgggcaccatacctgtgaggggctgggactatttcccctagcagcctcagtggagtaagtaggccactttcctaaaaaccagttctccaaatgaccactttatccaaattggcatattcttagaataatttgccaaatattttccccaatattttggttttatcatggcatcacttaagtcattatagacttgtcagatcaacagtctaatgtcagtgttgcttacattttacatccagaagctgagcccttttagaatgcacaatctaatttgtttgaatgggtaggctttccttaagtggtttcttatttcctttcccactccctgcctctgaaggtgaaccccagatataacaaactattgtcagtatgtggtaaattggtgattttgtgaaccagcgttgaggaaattaattttccaaaagccagatagccagtcttactggatcacagacagggcttagcaaattagtgcttttgcattacttgctacccttcagatcagctacctttcaccagacacaccgacttttstaagtcctgccctggctactcacaaatgcgcctctgggcaacacacagtggtggtaaaacaccaaggtctctcccaggtccctgataagacttcatggggaagtcatctttaaggtggtccacatgccacacacgcacatgctgcaccaccaccacccagaaggcctcctgcctccatcgaggcctcgtctcccccttgctcaccgccggcttgtcttccccagcacctgcgcctccttgcgccgctgcagctcgcccatgtagctgaggatgcggctgttgcacactagcaggctcttggtggcctccagagcctgctctcgctgggagcaggctgccagcagcttacaggccccttccctcatccggatctcatggtctagcttcctctgcaactccgtgtcctagccagggttgggggaagggtgagaagkaaatgtcagtcagtggacaggctaaagcactccccagtccccaggtgggctgtggccagtaaaactgacaagaaactaatgttttaggcagttcaagagcaggcattgggtctcaatctcagctgcccacgaataaccagagaagctttgtagccaggtgcagtggtgtgtgagggaggctgaggtgggaggatcccttgagcctaggagatcaaggccagcctgggcaacatagtgagaccccacctctaaaaaaatatataacagccgggcacggtggctcacgcctgtaatcccagcactttgggaggcagaggcaggcggatcacaaggccaggagatcgagaccatcccggctaacacggtgaaaccccgtctctactaaaaatacaaaaaattagcagggcgtggtggcgggcgcctgtagtcccagctacttgggaggctgaggcaggagaatggcatgaacccgggaggcggagcttgcagtgagccgagactgcaccactgcaccccagcctggacgacagagcaagactctggctcaaaaaaaaaaaaaacatatatatatatatataaaacaaataagaaaaatagagatgccctcatgcatttgatggttggaagtataaattccttcagcctcttttgagtgcaatttggaaaaaaatctatgaaaactacaaattcatatatcctttaattcagctatccaatacctagcagtttatcttacacatataatttcacatatatctaggtaaagccatacatacaaaaatattcagtgcggcatttttttttttttttgagacggagtctcgctctgttgcccaagctggagtgcagtggtacgatctcagttcactgcaagctccacctcctggggttcatgccattctcctgcctcagcctcccaagtagctgggactacaggcgcccgccaccacatccggctaattgtttttttgtatttttagtagagacggggtttcacagtgttaaccgggatggtctcgatctcctgaccttgtgatccgcccacctcggcctcccaaagtgctgggattacaggcgtgagccaccgcgcccggcctcattgtggcattgttttaaacaccaaaattaaaaccccttcagtaggacattggttaaataagtaacagtacatctgtaccctgtagtattgcagacattaaggaaagagatatgcacatgtatgcagatatgaaacaatctccaaaataaatgatgtgagaaaagaagggtagtattgcacatactaccatttgtgcatgatatatatatatgtatgcatgcatatatatacatagatatagatatgcatgtttatgcataaaatattagtgattgtaggcctgggagccagggatggaaaacatttatgatacttttttttttttgagaccgagtctcactctgtcacccaagctggagtacagtggcgcgatctcagctcactgcaacttccaccttccaggttcaagtgattcttgtgcctcagcctcctgagtagctgagattacaggcatgtgccaccacgcccgagtaagttttgtattcttttttttttttttttttgagaccgagtcttactctgttgcccaggctggagtgaagtggcatgatctcggctcactgcaaactccgcctcccaggttcaagcaattcttctgcctagcctccggagtagctgggattacaggtgtgagccaccacacccagctaatttttgtatttttagtagagacggggttgcaccatgttggccaggctggtctcaaactcccgacctcaggtgatccacccgccttggcctcccaaagtgctgggattgcaggtgtgagacaccatgcctggcctaacttttgtattcttagtagagacagggtttcgccatgttggccagactagtctcgaactcctggcctcaagtgatcctcccacctcggcctcccaaagtgcgggattacaggcttgagccactgcgcccagcctaatgatactttatatataccctttgtactactggaaattgtatttcctttaaaaaatattagatctttggagtttaaaaaaaaatgatcaggccctacctaagatttgcagaataagaatctctaggagtggggcatatgtacttttggaaaactccccaagtgattctgaggtacacccaggttgagaaccaccaactcatgggaatggacagaaggaaaggcaaatgagagttatccctcagactcaagtgatgccagggacatctagttggcaagggatcagtggacaaggagcataccacctacagtgttcactgacgctgcamagaaacctatacaccccaaattaagagaatcaccacctaccggccctctgagcttgggagatgaggtcagaggcaaggaatggggatgggaaggtaggtggtccaggaatgagggactgtggataagggccagctgagaggccctggaagagacaccaggattctcaggaacattcatttagaaaggagccctggaggtcctgcttcttaaaaagcaatgggcaatttgctcaacctccctaagcctcagtttccccatctgtaaatcaggaatggaaatagtcctagggctgtgagaattctgtgaggcaggaacttaaagcacttagcacagtgcccagcatgtggtatacattaatggcagggatgcttattttaatgacgctatactttggtggtagcagcatttactcagtcaacactggagcatccctgtactgtccaaggttgtacatttaaaatccagctgggaggtgagagatgatgactttaatggctgctccataagtgccatgtcatggcacaaccatgctcacaagaaacagcctctgtttgcttctggctgaggtgatcaaggaaagcttcagagaggagttggaagactaactctatcacagtgtacagattggttcaggagacaagtcgagccatccatttgaaacaggggaactaatgtgaccactccaaacctgtctttttcctcacaccagctctcctccatacactgtgcccttgcatctgtccctagtggctccagccttcaagtctctcagacccgaacaccctaaattccctcttctaaaaagccttgtcctgcctgcctacagatgcttccttggctattttctgggccactgtgctaggccggacttttatcaccttcccccatcaccatccacccgttttccttctgtaataagccaaccctttcccaaagcccctcaccaggaagccctttcagactacataggtcctcccagtctagttttgtctgcaccagggttctgcgctgcccgacaacccccaccccagtctgcacccagcttcagccacaaacatcccaaatgggtgagcctggcaggagggggacacggaggtgtcctcaacccccatcttggctagtctcatcccagtcccagcactcacggatccttccccagcccgctccattgcgagaggcgcgcagaggcgcgcgaggtccagagagctgcactggcctggggagccggctgggtccgagggccgcgggaaatcggaggagccagggcgccagcatagctgcaccgcctccagctgcagcrctcaggacgccggtgacatcagctcccaattgccgcgagagcaactgaggggtaccagggcgctggaggtccctccgggcacctggctgggcttggctcaaggcggtgcctccaccgagactccatcgcggcgggaccggacctccaggagtgcgcccgcgccgccctggaaaaggctcctggccttcacgacgtgctccagctccgggaggcccctcccgcgtagcgtttgccctccaaggtgaccccttgcctgagagtatggagggcgaatagtgtataaattgggagagctggggccctagggaggtcactgggcccagcatggatgagtgggaccacgagtccagacacctcctctatttccctactgatctccagccccaaatccactctcccaaggcccaaggccgggagcgccctaggaaactggctcccaccctttcaggcagaggaactgggaatcctggctcaggatctggacccttgtgcttctagcgtttccccaacccagggatagttccttgttgccccctccccacccaaacacaccctctccccaagcgggcagcatttcccctgggaaagagcgcagagctgggtgtcagctggacccgggtcagatcccaaggggctagaggatgagtcatgggccccacacacattaggccccctgttgatatcccttccacccctcccactctcttaagtctctgacttcctgctctgcttctcactacccttttttcccttcagaatctccaccagggctaagtacaaatcctggtttagggacttgacaagcccacagaatttgacccctggaacctgagtttgtaaaatggggagtattccacctccttcgtagcattgtttgagaattatatgggaaagtctcatctctacctgggcctagcacatattttaaaataagccccctttacttgcaacttgagtcacttcctccagaaagtcttcttggatttactcttccaygactatctcttttgccattccctgaaacatcaatgggtctctcttttgaggacctgctgaacttggttgagaaagaacacagcaccctcagccactctcctaaaggagagtgaccaaagtgaaactaagcatctcctctgccccagaacttgaacaggccttccacagagaaaatttacattttttggaggagggtaggatgcagaatttaaacatttacatacctagaccagctctgtccaataaaaccttctgcggtgatggaaatgttcagtagccatctagcacttgaaatatggctacagcaactaaggaattaatgttttgttttattttaatgaactaaaagtaagatttaaatagccatatgtaactgatgtggacagtgcagaggactatgaatggcaaataggttttatctcatgcactgatggaggataattaggtagagtcccaacgagttcactggacacctttccacaaattagaaaaagctgaccctctccaggcaaacaaattagataaacgtgctccctcctgatgccgctgaaaccagaccaggactctcacctctggctggcacctgtgtgaaggacacaacctgcacagtttatgccaagacggtcctgagaaagattctgaggccaggtctgggctcgttgataaagagtgccaaaattgaccagtaacatctactatgatccagggagtgggggcagggcttgaggggggacagcacatacaatatcctgccattcctgatctagactctttgcagtcctrcctctgacctctcagcagcagcccctgcctggtccaggcagtcacttccacaacttcctccatcttccccatctccgtaaacagccacaccacccagttgcttagccacatacctgggaatcatcctggagttctctttctttgccctcccatccaatccatcagcaaatcctgtcagacctaccaccaccatttgaaatctactccctttctccaccatgagcattttaattcacaccaccaggttcactcccacctgaagtgggagtgaaacagcctcccacctggtggacatttgcgaactctcttgccaaccctccacccccaaccctaccctcaacttcccaccagcctattctccatagcagccatcatttaaaaacatggcatgagtcattcccttgcttaaaacccttccatggcccaacatcacacttaaggtgaaatccaggtgccttatcatggccttcaaggccctgcatgatctggcccctgcccatcagctccaccccaactactatattccagccacactggctctctctttcccacaaatatattaccctcatcctcatatcagggcctttgcccttcctccagtcttcacatatctccaaatcctcctgggcttagctcaaagatctcccaacagaggcttcccctgacctccacatctaacattgcctccctcatctgattttcattacatccccattttcatcataatttctttatgtgatattatttatgtgttcgtatgtatatttctgttctcccactacaatggaactttcttgtcttattcactgaggtatcctatggtcgaaaagagcttggcagatagtacataaaatttacatgtgtttaataatacatagcgcaaggtgcagtggctcacgcctgtaatctcggcattttgggaggtcgaggtagggagatcacttgagccaggaccagcctgggcaatatagtgagacctcgtctctgtaaagaattgaaaaaaacaaatacacgaataaacagcaccttgctgtctcaagggccagcagaatccttactcatagcccagagtccttctcttctctagcaaggctacatcctttctgtaaacctctctcacattgaactcctctcttcttcccatgcctaaaaggaacccttgtccccagaacagacatttacactcacccacagagcttcctgaaataggtgtaaagaccctgctgcaaacataagactatgatgggcagaactgagcctgggtccacacactgcacccaacacaaggcatagggaaccacctgtccctcttcccactttaagcaggcctggctctccccaccatgctgtagcaggaatgggcagggcagagattggggctgggatgcaagtgaaggaggtgtgtactccaagggtcgggggattacctccaggctgagtgccatctgccgaatgtagagcatattcaggtcctccaggatgtgcaatctgtcctgcatctctgtgccccccggtgccctttcccttgtcaacccctccagaggggggacagataggtaccacactgtcccacagttcctcctcccactgttccctcagtctttaaagaggtggccagctcttgggcagagggcagaagctgcccttatccctctgcactcctgttaaacccctctggctgctgtgacaaattttcctcgcccactgctgctccggggccctgccgggagccaggcagggaagaaaaagaaagcgaagtgaggataagtggggtcccaggaggaaaggccagctgcagagggggctctaggcacagagtgtccagtctcgctttggtggcagctgttctcccagctgtggaagaaaaaggccctttcattccgactctggccgctccccagcccccgcccacatccctggcctggtggacagggaatctgtgtgcggagagggcagtgaggggcaggcacaactggaagggggcagggaaacgacgcctcatgcaggttctagagtcatggggtttgcaggaggttggagcttcccgagaggggttccagcttagtttgagaaagttgggaaaaagagccacacaggtgaggacctcaggggagagtgagcccagggaatgggacaaaggggtgagttggcaaagcagcccagccctagggccaccccttccaactcagggcccccatccagcccgctccaccctgggctcacaattacctcgcttttccagagaagggaggagagggagagaggaaggcaggggtgtgcctgtctgctgctgtccccgctcccttctgcaggccccttcccttccagacaggaaaccagccccgattccgagccagctgcagcctagcgcccccgcctccacgccaggcccacggagtcacacttcactcggcggccgccaggccctgcggctccgccccagctcctccgagctgtccccgaaggccgggctaatcccaggggcggccccagctcacaggcccctccccctggtcccgggcctcgccccttactcccccacgctggccccacgcgggttcctcgggcccagtcgcttgggggcaaggggacgcgacaaaggccccctctccccaggtccactagcttctgagtcagagaaggcccgggacgccgggacaagggtgtgaaagagcctctttgttctgggcaggctggagggaaagggcagaagccaggcctggaatcccagccgggaggtagagggggcggaaggaaggcccacctcacttaaccctttccagacccggaagggaaggcttggaactgggctctccttgggcgagtgtgagtctgaccttggggacagaagagtcttcggggtagctattcgccctctcagtccccgctcaaccacacaccttcagccccgccctagcccttagggcgttacaggtggggatccaacaggttaacgcgtggacggcggacgggggaaacgctcagcctaggggctggactcctcttaggccccagaaaaggaggcggaaattttgcgtgtgggaagtaaccccaaggagttaaaagccctgcaggggcatagaggagcctttgaattgggcttcggggaagcgagcggccccggcctaaagtcggggttgatgacagaggctggcccagatggctgcgacaggttgtgggatggggctggcgactggggaacaagcgggagcccaggccaagagtccgagcgcttggggcccgcctagctgcccaccgcccttggcccggggatgcccaagacattttggggttcaggcacattttaggagtcgagctggggccctacaaattgagaccaacccgggctttttccaggctcaggcagataatcctaaccaggccgcggaatgggcagcatggatccgatgaaaatgcagaccgtccacaccttactttttaagtcaacaactccgtcgggtttgtacccagaccgtgcgtctccgcccctcggcgtgcacgcgggcgagggaaggaggccgaggtggctggggctgcccccgggagccgcggaaggggaaggcagggacgcgagtctctcacctcgggcaggtcgctgaagaggctgagtcggaagcggccgcgtttgaactccatctccagggcggagcccctggccacggtgacccggctccggtggtttcgggagaacatgctggcggccctgcgactttgcctgctcagtgcgctccccgcgccgcccggcttagcctcctctcctcggcttctgtctctcgacgctcgtccgccagtccggccgggaatctcccgctgcggggctccaaaccccgcccccggagacgacacctgggccgggcagggcgcggcaacctcctcttccaccccmgccaaaggcccagcccgtccggccagtccctgggcgccaagccgacctggcccgacggccccggagcccccaggggcgcactgcacctcgcgagcactgtgggagcgcgttctccctgcccgcgcgggtcgcgagcgcctacctggacttgggacggaccgagaagccctgccccgccagccgccccaacctggcaagcctggcttcccgggcgctgaaaaccccgtggctcagggatcgccgcgtagcacgctctggctctactcgggccctgggaccttgcccagtttcaatcccggcagcctccgaagagaccatttcaacatcccacagtcccaaatgttccttcttcgtccccctccccacctaggctcctctgcgaggctatccgcctaagcctagtggccacaactgatggggcggtgcttaaacacgtcgtgaaaccccagctctgtcactaactaaccgtgcaatcattaacttggtccagtcactggcctttctgagcttcagttttctcatttgttcagtgggaatactgtaattatctccactcctcaagttgctatgaggattacctataagaatgagggtaaaatgcccagcatagtgcctggcacaaggcaagtgccccatatttgcagtcataaagagcagctgcgcgcggtggctcacgcctgtaatcgcagcactttgggaggcctaggagggtggatcacctgaggttgggagttcgagaccagcctgaccaacatggagaaaccccatctctactaaaaatacaaaatttagccggccatggtggcacatgccggtaatcccaactacttgagaggctgaggcaggagaatcgcttaaacccgggaagcagaggttgtggtgagctgagaccccaccattgcactccacccttggaaacaagagcgaaactacgtctaaaaaaaagatggctgggtgcagtggctcaagcctgtaatcctagcactttgggaggccaagggggactgatcgctcttgagctcaggagttggagaccagcctgggcaacatgaaaccctgtctcaacaaaacacacacacacacgcacacacacacacaaattggcctggcatggtggtgcacacctgtagtcccagctactcgggaggctaaggtgggaggattgcttgagcccgaaagttcaagtccagcctgggcaacatagtgggaccccatctcttaaaaagcattacaaatatgtataattttttatttttatttatttatttatttatttattttawttttttttttttaagacagagtctcactctgtcacccaggctggagtgcaatggcatgatctcgactcactgcaacctctgcctcctgggttcaatcgattctcctgcctcagcctccggagtagctgggattacaggcgtctgccaccatatctggctaatttttgtatttttagtagagatggggttacaccatgttggtaaggctggtctcaaactcttgacctcaggcgatacacccgccttggtctcccaaagtgctgggatttcaggcgtggcccacgcctggccaatattatctatctatagatagatatagatatagatagatatagatatagatatagatatagatatagatatagatatagatatagatatagatatagatagatatagatataatcagctgctttgctggatggctggacttgcccggctggacttaccactccctgcttccataaaaacagggttcccgctaggcgcggtggctcacgcctgtaatcccagcactttgggagaccaaggggggcagatcacgaggtcaggagatcgaaaccatcctggctaacacggtgaaaacccgtctctactaaatatacaaaaaaattagccrggcatggtggcgggcgcctgtagtcccagctactcaggaggctgaggcaggagaatgccctgaacctgggaggcggagcttgcactgagccgagatcgtgccactgcactccagcctgggcgacagagcgagactctgtctcaaacaaacaaacaaacaaacaaaaaacagggttcccttcttgccccctctggggaaagcccagtggaagagaaggaaatggcaaaggattaacttgctgatcacacataaacagatctcctgaaggcttcagaacacagaacttgagaaagggtgagactcctacatggcaggctggctggacccagagacataccagtcttgagctcttagagagtccagatkagaaatgttttgctatggcaaatcatttcaacattcttttggaaaagctgactgaaaagtactaaagcaaaaggggaaatgcatcggctcctggaactgagccaatacaaacaaatgagccaggggtcaagctttagatgtggcttaacccactcattgagtgtcaggaatatccagtctcttcccatcacttggctctactttcctccacgttggcttcactctccacagtgtaacgaaattgctgcccaaaattctgggtctatatcttttcaggcttaaattcagctgaaaagagagcatctgtttcctgaggctcctacacgtctgggattcgctgtgagacatttgtgatcattcatccatcccaaaccaatcattggagtcagacggtggccagatctgaaccaattgctgtggctaaggaggttctaggtgccagctggccaggcttggggtcacttgcccactcctggagactaaccagaacccagtgaactgggagggagaaggtgggggagggttgttccccaaagaatgttccaaccactaccaccagaaggtgagagaatggaaaatgaacaggaaaaacaaccaacatcctccacacacaaaattttatatggagaagggagttcttctggtcagtaggaaaggcagatcaaaagatttataaagtccatggcatctgagattaaccacaaaagacgtgtgaggggaaagaaagggaaagatattgttccttaatttattcaaatattcatcatcactcctctgaactgtaagccttctagggaggggcagtctgtcttatccccagtgcctgggacatagcaagtgatcaataaacatcagttgaagtaaataaaagagaagcaaacagatttgagagtccttgactgagatgtgccatcctgttggactaagatagttcatttcaaatgtttgtttttaagcaacagaaccttttttttttaatgaaatcttacctgaaatgtgtgaaatcaaatcagagctgctatgatgggagcaggtgctagagcctcatgccttgtctacccacaggtgctcagctgctccctgctcccccagtgaacacaagctctgtggacgggtttgaaaacccctggcctgagacccaggaaggaggcagaggaatggaggatcttcaaaaaggaggttgagctcaaatcctgcctgagagtttgtactcaatgtggctgaagatttttgggaaggagggacatgatcaggattatattatattatattatatatatatatttatataatatatatcactctgttacccagctagagcaaagtggtgccatgataatacactgcagccttgaactcctgggctcaagcaatcctcctgtctcagcctcctgagtagctaggactaaaggcgtgcaccaccatgcgaggctaatttttaaatttttttgtagagacagcatcgtacaggctagtcttgaactcctggccttaagtgatcctcctgcctcagcctcccaaagttctgggattacaggcgtgaccactgttcctcctcccagaattaactttagagatcgtaatttggcagccttttccattagtcagttggaggagttgtgactggagtcagggaagccaactaacactgcactcaactgagggaggagagataagggtcaaaatttctatggatttatgtatgtatgtatgcatgcatttatttttatttttatttttatttttgagatggagtctagctctatcacccaggctggagtgcagtggcgcaatctcggctcactgcaacctctgcctcccaggttcatgcgattctcctgcctccgcctcctgagtagctgggattacaggcgcccaccaccacgcctggctaatttttgtatttttagtacagatggggtttcaccatgttgttcaatctggtctcgaactcctgacctcgtgatctgcccgcctcagcctcccaaagtgctaggattacaggcatgagccaccgcgccaggccagacttattttttaaattaaatttcatttgaaaaatatttgaaagtacgtgtacagttttctaaacactataaatgccactgttttttaaataatgtaaataatgaaaaaaatgaataaaagtatgccttccccaccctcaattattccacttccagaagaaaacactgagacagtttggtgcattcaagtgctgaagctcacaccagcggttcgtgttgatgacttttctggaattgggcatgccagttgctaaacattgccttaattaaaaattaaattacgggctgggcacagcggctcacgcctgcaatcccagcactttgggaggccaaggcgggtggatcacgaggtcaggagtttgacaccagcctgaccaacatagtgaaactctgtctctaccaaaaatacaaaaatcagctgggcgctacttaggaggctgaggcaggagaattgcttgaaccygggaggcagaggttacagtgggccgagatcaggtcactgcactccagcctgggggacaaagcgagtctccgtttcaaaacaaaacaaaattaaattaaggctgggcatggtggcttacacctgtaatcccagcagtttgggaggctgaggcagtggatcacctgaggtcaggagttcaagaccagcctggccaacatggtgaaaccctgtctctactaaaaatacaaaattagccggtgtggtggcacatgcctgtaatcccagctactcgggaggctgaggcagaagaatctcttgaacccgggaggcagaggttgcagtgagccgagatctcaccattgcactctagcctgggcaacaagagtgaaacactatctccaaaaaaaaaaattaaattaaattacataaacatataactaaatcaattttattaaagcaaaggtgacaaatattcaaaactcatcacttcctaattattttactgcattttacgacgacgtcttgagtagtttacatctttagtatctgtatggagggaatgctatataaatgacatgacaatgcacatctctttccaactctgtattcagtgatgtctcatttgaaattggccatggtgggagtccttacacaacagaaataggtgaacataacaaatccagcctggtttttttcccccctggggagcttttgttaaacatttaccaacatgccactggtttggtgcacagtcttcccaactttatctttttgtttatgtctgtatctatatctccccagctatgaagtagatatgtgggaaaggggctgtgggtcacctagggttcaaatcatcttctatttctgcacagttccctactgtggacagtattgacagaatgagctctagcccctttatggcagttggagaacatttatccttcttcccactttttcacagcctaaaggtaggcacttggcctaacccaactaactggaatgttcccaactggactttgaatattgagggagtgcagacaagacccagccagagttcatgatatacactcactgtacctgcagtacctgagaagggggtagtggtgccagcagaaaatcctcatcagcatgttcaagccgcctgacttcagtgtggccttggcataacctcagccataagtttgtgctgcctggcctcctttgagtctcgcttcttatccagtgaaagtatgagatgagccccaaaacattttatccagggaaataaaaatattttatccagggaaatttgagtctcacttctttccagggaaagtacaagattagccacctagcatggtggctcacgcctgtaatcccaacactttgggaggctgaggcaggtggatcacttgaggccaggagttcaagaccagtctggctaacatggtgaaaccccgtctttactaaaaatacaaaaaaaatagccaggtgtggtggcaggcacctctgatcccagctacttgggaggctgaggcaggagaattgcttgaacccaggaggtggaggttgcagtgagccgagatcatgccattatactcgagcctgggtgacagagtgagactgtgtctcaaaaaaaaaaagaaaaaaaggctgggaggggtgactcatgcctgtaatcccagcactttgagaggccgaggcgggtggatcatgaggtcaagagattgagaccatcctagccaacatagtgaaaccccgtctctactaaaaatctgaaaattagctgggtatggtggtgcatgcctgtagtcccagctactcaggaggctgaggcaggagaatcgcttgaacctgggaggtggaggttgcagtgagccaggattattgcgccactgcgctccagcctggcaacagagcgagattccatctcagaaaaaaaaattttttttaattagttgggcagggtggcacatccctgtaatcccagctactcaggaggctgaggtgggaggatcacttgaggccagcagctcaaggttgcagggagctatgattggaccactgcaacagagcaagactctgtccccctctaaaaattgagcatcataataagtaatgacagcaatgggttacaacccactgattaaaactggaatccatgctgaaacaaataaatatatctgtaaataaatatgaggagaagagaaagctcttacagtagaatgctaactaatacgtgtaactgcaataatgggaatagatcaccatttggcaattattatactrgagttgattcatacagtagtcatcaatggatacaaagcctggtgggtggaggtttgacggggaatgggatattagggtagttgcagagtatttcccagaaaatacttattatttggaaagacaaaaatggtgacattacagtggaggaaattggcagacagcaccttgaccaggtgatcaaggttaatagcatcagtggtgggaaaggctgacatcatgagcctcccagtgtgacacactgagaagaacagagcataatgtttttgtgggccgggcatggtggctcacgtctgtaatcccagcactttgggaggctgaggcaggagaatcgcttgagcccagaagttcaagaccagcctgggcaacacaatgagaccctgtctcaaaaaaaaaaaaaaaaaagaaatcaattttttgtgtgtgtggtgttcttgccaagaatttataagtctaggccaggcgtggcggctcatagtgtaatcccagcactttgggaggccgamgtgggcagatcacttgaagccaagagttcaagaccagcctgaccaacatggcaaaaccccatttctaccaaaaaatacaaaaattagctgggcgtggtggtgcacacctgtagttccagctactcaggatgctgaggcccaagaattgcttgaacccgggcagcagagattgtagtgagccgagatcacaccactgcactccagcctgggtgacagtgcaagactctgtctcaatcaatcaatcaatgtataaatatagacctgaggaaacaccagacagacccacattgatgggcatcctatagaattaaagacttctaccctttaaatttgtcaaggtcatgaaagaccgggtaaaagtgaagaaatgttccagattaaaacagattaaagagacttaatttaaaaatgtaataaatgatcctaaatttggatcctggataaaaacaaaaaggaggaccaggcacagtggctcacgcctttaatcccagcactttgggaggccgaggtgggtagatcatgttgggagttcgagaccagcctgaccaacaaggagaaaccccatctctactaaaaatacaaaattagcgcatgcctgtaatcccagctacttgggaggctgaggcagtagaattgcttgaactcgcaaggcggaggttgcggtgagcggagattgcaccattgcactccagcctgggcaacaagagcaaaactacgtctcaaaaaaaaaaaaaaaaaaaacgaggccaggcgcggtggctcatgcctgtgatctcagcgctttgggaggctgaggcaggtggatcacaaggtcaggagttcaagaccagcctggccaacacggtgaaacctcatctgtactaaaaatacaaaaattagctaggggtggtagtaggagcctgtaattccagctacttaggagactgaggcagagaattgcttgatcccaggaggtggaggttgcagtgagccgagattgtgccactgcactccagcctgggcaacagagcaaggctccgtgtcaaaaaaaagaaaagaaaaaggaggtatttcacagttggtgaaatttgaatggggtctggattaatgatgtatcargttaatttcctgattgggacagttgcacaaagcttatagaaaactgtgcttgtttgagggaagtacacactgcatgatttaggggtgaaatgacatcatgtctgcaacttgctatcatgttgatcagaaaaagaataatgatgtaaaccaaaaataaaattctgagtcccccaaccatgttgggccattccatgttaacctgaaaaactagtatgggccatgatgggaaagggggagctggacatgccttgttataccctcctcccttttgcaattactgatataacagactctttaagtctgataagaaacatttacagtgtattctctgtgaagttggctacctggatgcttcacttgaatgataaaatcttggtctccacaaccccttatctcaaccagacattcctttctattgattccaagtctctagacaataatttaacgctttttttttctttttttgagatggagttttgctctttttgcccaggctggagtccaatggctcgatgtcagctcacggcaaactctgcctcctgggttcaagcaattctcttgtctcagcctctctagtagctggggttacaggtatgtgccaccatgtccagctaatttttgtatttttagttgagatggggtttcaccatgttggccaggctggtctcaaactcctggcctcaggtgatccacccgcctcggcctcccaaagtgctgggattagaggtgtgagccaccacagccagccaataatttaactctttcaaccaattgccaatcagaaaacctttgcatctacacaatacctggaagcccccatcttccagttgtcctgcctttccagaccaaaccaacgtacatcttacatgtattgattgatgtcttatgtctccctaaaatgtataaaatcaagttgtagtcagaccactttgggcacatgttctcaggatctcttgaggggtgtgtcacaggccattggtcactcatatttggctctgaataaatctcttcaaatattttagagtttgactcttttcactgacaatgataatgggcataaacacagataaatattaacaatttcagaatctcgccgggcgcggtggctcacacctgtaatcccagcactttgggaggctgaggcgggcatatcacaaggtcaggagatcaagaccatctggggtaacacagtgaaaccttgtctctactaaaaatacaaaaaattagccaggcgtggtagagggcgcctgtagtcccagctactcgggaggctgaggcaagagaatggcgtgaacctgggaggcagagcttgcagtgagccgagatcgcaccacgacactccagcctgggtgacagagcgagactccgtctcaaaaaaaaaaaaaaaaaaaatttcagaatctgccccacccgccaaccatgtcgggcattccatgttaacctgaaacacatggaatgtttaaggagataagaaagttttggcccggcactgtgactcacacctgtaatcccagcactttgggaggctgaggcagaaggatcgtttgagctcaggagtttgagaccagcctgggcaacatggccaaaccttgtccctacaaaaaaaaaaaaaaaaaaaaaaaaaaaaaaaaaagaattagctaagcttggtggtgtgtagctgtagtcccagctacttgggaggctgaggtgggaggatcactcaagcctgggagtttgaggctgcagtgagccgtgtttgcgccactgcattccagcctgggagacagagctagaccctgtctcaaaaacaaaacgaaacaaaaactttattagagagagttctttgtattcatcttgcaatttttctgtttgaagttatttcaaaataattttttaaaatacgactaagaagtctttcagaaagaagagtgcctctcagcctacaaacatgctcaaatctctctcactctaaacaaagcaaaactaaaaacaaacaaaataatgaagccagttgtcacttactgttgccacttcctccctgctgggcatcatgatgcagaggaaacaccactgggccaggtgtcaggaagcctctgtttgagtctggctctgccactccctaactttgtgactttggcaaaaacatttctttttctgagcctcagtttcctcatttataagatggaaacaatggtatctcccttatggagatgctgtgggggccaagggagagaaggaatatataggcaggttataaactctaacgtattctacaaatatgaattgcaagtgatccctcactgtaactcctggtgataaaagagtattgccttcacactgtgataaaatccatcctcttcttggagctcagcctaccctctgaaggactgtacccagctgatcacagccttagtcccttgatactttctgcctttcctgaccttctcaaccctgtctggcccctctgcctggctgtgcaggacaggtgctcacttggttctgttcctggttcttttcctcttatctacttactctttctgggtgtctcatctactcccatcacttgggggcctccagtattacgctgatgacatccccactcacactttcatccttggtttctcctctcagctattccacctccacccaggcattcccacaggcacttcaaagtcgccttgggcaaaactaaataattcccttcttaacttgcttctcttcctatgttatcttccttactgaaaataccaccttcccgctaaatacttaggctagaaacctatgagtcagttattattatttgcttactgaagcatctactatgtgcctgtgcctgtgcctgctgccaccctaagtatcatgagttcttgatttcctttattccttgaaagagccctcatagcggtggatcctactgtattccatcttatagagctggattctcaggttcagagagcttaaataattttaggcccaaggttgcatagctaataaatggtgaaactgggatttgataataggcttgtctgactccaaaatcccttttcataatcacatactacatgacttaatcctggattccccaatataattgctcattgattcttgataattttatcactgaaatgtaagagacttttcactgctgttaccttgctcagacactcatatatatttagatatatgtatataggtgttattttctaattataaacgtgatatatattggctgtaagaaaatacattacatacctaaatagtgaaagttcctcaaccccaacttctacagttaaccaacattaacaggtatacattcctcaattttttctatgtatttgctagtatattatgcttttaaaaatcagatcacataatcttgaaatttacttttttttttttttcttttttttgagacggagtcccgctctgtcgaccaggctggagtgcagtggcgcgatctcggctcactgcgacctccacctcccgggttcaagcgattctcctgcctcagcctcccgagtagctgggactacaggcgcgtgccatcacgccggctaatttttttttttttttttgtatttttagtagagacggggtttcatcgtattagccaggatgggaaatttacttttcttatttcgtgtatcagcacatacaaacctacctgtttttatgtcttttttaaaatgaggtaaaatatacacgttttatacaaaattcaaaaggcacaagagggtataatcataaaaaaataggtcgccatccacccttgttctctagatgctcatcagcaaatgactcttaccaatttcctagatagccttctggggcgcctcatttcttttccaagctgcttaacatcccactgtatggatacaccaattcatcaggacacttagattgtttaaattctgtgtcaatctcattaattacttacaactcaacttttcttagcaatatggtgttccgcattgtacagctgcaccgtaattcatttattcatttccctacttatgaaaattgaagtttaaatacctaaactgcatctgctcttagggcactcgtgctgtttaaccatttcggccattttgtcatcaatatagtttatgtattcctccacccaactgtgagttcctcaaggacaggggcggtgttcatattcatctttgcatcctcttagactagcttcccgcacttggtctagtgtatacattcaccaaacttgtgttcaataattgactcatccgcgctgagttctgaaagctagcgtggggaggcggagccaggggaaagccctgcccatttgggctgtcccgacctcagagggaccggaacgttcgttggaaggatcctcgtttctcagggacgattttggacgcgaagcgtgccccgcacaaggatggttgymatgaaccggaagtaactggttgttttgctggctccagtttttccgcggggcggaaaaggcgtgtctgcgtgtgtcccaaccatttctagtcccctttcctcgcaggacctcatgagtaagctgtggcggcgtgggagcacctctggggctatggaggcccctgagccgggtaagcgcgaatagatcaagcaatttaggtcgtgttagaaaagaagtcccgttcttgctcctcggagagtccagggtacttcggccacaggtggcaaggagaaaggcggtgctgttgttatggtaacagcgagtactgcgggaagggtgggatccagtaggggcttaggttattcagggcttcccctgccaccctccggccaaacactgtcgacaggctttccttccacaggagaagccctggagttgagcctggcgggtgcccatggccatggagtgcacaagaaaaaacacaagaagcacaagaagaaacacaagaagaaacaccatcaggaagaagacgccgggcccacgcagccgtcccctgccaagcctcagctcaaactcaaaatcaagcttgggggacaagtcctggggaccaagaggtgaggccaagagggtcatagttttataaggggaactttaggagcagagatagtagttagaagccgactgggctttctagaagaccgaatggacactgtgacttcagggtccagatttaggcagcaagagtctaagagggtggggaaagttgggtgtagctacggagtaggaggaggagacgcttgctcattttaaagagtagtgttgcttctctgcagtgttcctaccttcactgtgatcccagaggggcctcgctcaccctctccccttatggttgtggataatgaagaggaacctatggaaggagtcccccttgagcagtaccgtgcctggctgggtgaggatctggaggtggggaaactgggtttcttattatacccgcctaaagaaagaaggttggttctgaaatgggttaggattttccatgtcccagtattaactcagccaaattagggtgccccatctgaacaattctgtttttctttctccaacttccttcccagatgaagacagtaatctctctccctctccacttcgggacctatcaggagggttagggggtcaggaggaagaggaggaacagaggtggctggatgccctggagaagggggagctggatgacaatggagacctcaagaaggagatcaatgagcggctgcttactgctcgacaggtatgttggttcattgtttattcactcaccaaatgtatacagtattgagaactctccacgacccacgcactttgcgtggcattggggatatcgatagtagagaaaagacaaagtttctgttctcctggagctagtattctagtgtgtgtgttggggggctgggaagtaaataagtaaataatttcaaaaagctatatggtttatgacaaaaagaaaagggtgatgaaatagaaagtggcgtaaacaaacagatagaaatgatggaagagagacattagggtagttagagaaggcttctttgaagagataacatttgcaataccagaagagcttttgagcagagaccagcaggcgcacagaccttgagactggaacatgtctagcaaaggagaagaaaaagtggacaagccactgaagggctgtacgcagagaagtgacatacttggtttacatttcaatagattactttggcatctttgtagagaatgaatcttcgtggagacaagagatagaagtatggagaacaactaggaagctgttgaagtaatcagctgagaggcagtggttgctttaaccaagacgaaagtggtggagatggagaaaatcagatgaattatggctatattttggaagtagatacttgtggggaggggaatggagagaaaatatatcaaggctaagcctgggattttggcttgagcagttatccacctgatactctctattgagataagattaaaaataacaacagacctctgggaaagctggtacagttttggtgcacaggtcaggcaggtaacattactgatgcttctccccttgagagataaggacctaaagctaaatgtcaggagatctgggaggaggcagtatttatgaagaggaacctatggaaggtgtcctggagagggtgctcattaattaatatcccgcctccgaaggcctgcactgctcaagaccctgccttccatgtcccttctttcccctcccccgatctggccgacctcgcctctccatcttcctccattttcagacagcaccccgtctctgtctctccctagcgagctctgctccagaaggcgcggagtcaaccttcccctatgctgccgctgcctgtagctgagggctgcccacctcccgccctcacagaggagatgctgctgaagcgcgaggagcgggcgcggaagcggcggctccaggcggcgcggcgggcagaagagcacaagaaccagactatcgagcgcctcaccaagactgcggcgaccagtgggcggggaggccgggggggcgcacggggcgagcggcggggagggcgggctgcggctccggcccccatggtgcgctactgcagcggagcacagggttccaccctttccttcccacctggcgtccccgcccccacggcagtgtctcagcggccatccccctcaggcccgccgccgcgctgctctgtccccggcy

SEQ ID NO: 96009 - DNA, 16348 bp, Homo sapiens
ttagctgggtgtggtggcacaagcctgtaatcccagctactcgggaggccgagcgaggcaagagaatcgctggaatccaggaggtgaaggttgaagtaggctgaggtcacaccactgcactccagcctgagcaagagtgagactctgtctcaaaaaaaaaaaaaaaacaaaaacactaacagagtgctgttttttcagctctcatcgttgtatcccagttccatcttttttttttttttttttttttttttaaatagaggtggggttttgtcctgttgcacgggctggtctctaactcttggacacaagtgatcctcctgcctcggcctcccaaagtgctgggttcacaggcgtgagccaccaacgcctggccgcatctacaactcttgtttttgagatagagtctcactctgtcacccagactggagtgcagtggcgtgaccttggctcactgcagcctccgcctcccgggttccagtgattctcctgcttcagcctcctgggtggctgggattacaggcatgtgccaccacgcctggctgatttttgtattttcagtagagatggggctttgccatgtcagccaggctgtcctcaaactcctgatccgccccctcggcttcccaaagtgctgggattacaggcatgagccactgtgcccggcctgcaactcttaattcacccatttgtggaacttctctccctcttgggtcctttttcttttgaaccacacaggtgttctaccttcattctttttcttctctatttttttctggggcatctcatcctctttcacaacttgaattacaccttctggggttaaactatttctgtttggttctaatcccaacttctatgctataatcaggttacctgctaccaatttcctccaaatcccaccaactctctttgtataaaatagaattgataatcttacatacacatatacttgcctctcttccctgacttacccattcctttttaaaaacaggcacttcatctactcagccacctgggctggaaaccagtgttctctagttctgttcctttccattctctgcatatctggtcactcagttcagaatattctgtcttttaaaaaagtgcctgaaagttgggcaaggtggctcatacttgtagtcccacctactcagaaggctgagacaggaggatccttttgagcctaagagttcaaggctagagtgagctgtggttgcaccactacactctagcctggtgacagagcaagacactgtctcaaaaacaaaacaaaacttctgaagtgatctctccattcccattcactctattcatcattattgcattctgctacccagtctatttcctaaatatttttgctgccacttaattttatccttccaaaacatgcgatgggttttatctctcactactccctgtttaagaaaacagtgccggccgggcatggtgcctcatgcctgtaatcccagcactttgggatttggccgaggtgggtggatcatgaggtcaggagttcgagaccagcccaaccaacatggtgaaacctcatctcttaaaaatacaaaaattagccgggcgtggtggcagttgcctgtaatcccagctactcaggaggctgaggcaggagaactgcttgaacccaagaggtggaggttacagtgagccgatactgcaccactgcactccagcctgggtgacagagcaagactccgtctcaaaaaaagaaaaaacattgcctaaactgtttttcatacttcctcaacactcattagtgtggaccatgcaatcaatttagggagttaaaccattctttttttttttttttagatagggtttcgctcttgttgcccaggctggagtgcaatggcacaatctcagctcattgcaacctccgcatcccgggttcaagcaattctcctgcctcaacctcacaagtagctgggataacaggcatgcaccaccatgcctaattttgtacttttagtagagggggtttctccatgttggtcaggctggtctcgaactcctggcctcaggtgatctacccacctcggcctcccaaagtgctggtattacaggcatgagccaccgcacccagcctaaaccattcttaaaaaaataataataataaaataaaataaaaaaagtaggccgggtggagtggctcatgcctgtaatcccagcactttgggaggctttggcgggcagatcacttgaggttgggagttagagaccagccaggccaatatgatgaaacgctgtctctactaaaaataaaaaaataaaaaatagctgggtgtggtggcaggcacctgtaatctcagctactcagaaggctgagacaggagaatcacttgaacccaggaggtggaggctgcgctgagtggagatcatgccactgcactccagctcggttgatggagtgagactctgtctcaaaaaaaaaaaaaaagtagaatagaataaaaattatcagactgaggctgagtttaatggctcatgcctgtaatcccatcactttgagaggccgacgtgggcggaatcacctgaggtcaggagttcaagaccaacctgaccaacatggtgaaaccccatctctactaaaaatacaaaaaattagccgggtgtggtggcgggcacctgtaatcccagccacttgggaggctgaggcaggagaattgcttgaacccgggaagtggaggttgcagtaagccgatagcaccattgcactctaacctggttgacaagagcaaggctccatctcaaaaaaaaaaaaaaaaaaaatcagactgcatggcacttagaataggaagtttaaagagattaagtcatgctttgtcacccaggctggagtgcagtggcacaatcgtagctcactgcaccctccatctcctgggctcaagcagtcctcccgcctcagcctcccaagcagctggaattacaggcgtgagccaccatgcctggcctaattttttttttttttttttgagatggagtcttgctctgttgcccaggctggagtgcagtggagcacgattttagctcactgcaatctctgtctcctgggttcaagcgatttccagctaatttttgtattttcagtagagacagagtttcaccatgttggccaggctggtcaggaactcctgacctcaagtaatccaccctccttggcctcccgaagtgctaggattacaagagtaagccaccgtgcccagccctaatttttttttttttttttttttgagacggagtcttgctctgtcgccgatggtgccatctcagctcactgcaacctctgcctcccgggttcaagtgattatcctgcctcagcctcctaagtagctgggattacaggcgcgtgccaccatgcccagctaatttttgtgtttttagtagaggcggggtttcaccatgttggccaggctggtcttgaactcctaacctcaggtgatccaccgcctcagccttccaaggtgctgggattacaggcgtgagccaccacacccggccaaccctaatttttaaattttttgtagatgggggggtctcctcatcttgtccaggctggtctagaactcctgaactcaagtgattctcctgccttggcctcctaaagtgctgtgattacagacgtgagccaccacacccagctaaaagtattcttttaggtaacttgttttaaataagttgtgtgtgtatgtgtatctgcacatactgggttgcactatggaattatttcttattgtgagttgtaggaaaatggttgaaagccactgctttagacaccttcacaatgctcagctaggtaacaaaagatctgtagacagtggcctgctgtgtactttgccagatacatttcccacgaccctcctacagcagcattactataccttttcccggtctaaaagggtgctatcttcaaaggaccgtttttcccctccccctttaaaaaagaaagctaggaggaggcagtatagtgttgtaatgagccagactgcttggggttgagatcctagctttgtttttatgtagctgtatgactttagacaaattatttaatctatcagtgcttatttcatttgtaaaatgaaaataatagtacttttctcataggactgttaaggagattaaatgaattaatatctgtaaagtacctaaaacattgctgggagtgtagtaactgctgttatctaagaggccttatttattcttttttttttttttttttttttttgagacaagagtttcgctcttgttgcccaggctggagtgcaatggcacaatcttggctcactgcaatctctgcctcccgggttcaagtgattctcctgcctcagtgtcacgagtagctgggattacaggcatgcaccaccatgcccagataattttgtattttttagtagagacggggtttctccatgtcggtcaggctggtctcgaactcccagcctcaggtgatccgcccgcctttgcctcccaaagtgctgggactacaggcttgagccactgcgcctgccctaagaggccttattctaaagtcaaaagaacaacctggatttgagttccccagctccataattaactggctgttattttgggtcagtcttaactactctcctcatctgtaaaaatgggggtggtctggccaggcgcggtggctcacgcctgtaatcccagcactttgggaggccgaggtgggtggatcacctgaggtcaggagttcgagaccagcctggcaaacctggtgaaactccatctctactaaaaatacaaaaattagctgggcgtggtggtgggcacctgtaatcccagctactcgtgaggctgaggcaggagaatcacttgaaccctggaggcagaggttgcagtgagccgagatcatgccattgcactccagcctggtgacagagcgagactccgtctcaaaaaaaaaaaaaaaaaaaaaatgggtatggttcaacatgcattgagtgctggcattgtgcttctagactgtgaacttgaggttggggccattttctctgagtccccagcaccttgcataatgcgatatagggtgtacaataaacatgtgttgaatttataaatatttagcatctgccttatgcctataattgattagtactgtgatacaaagatgaaaaatgaaacaggtatgtaataagtgctacaataaggatgtcgacaaatgcaacggtagcaagaaagacaaaaacaggactaaccattgggtttggtcagatgatttcataagcaaaaagtctaccactagtggagagtggggccaccagtcagattatagtgaaatataagtggtcgtgttgcataaagcatcagtctctctctctctctctctctctccctccgtccctccctccctccctccatctctctctctctctctctttctttttttttgaaacagtttcactcttgttgcccaagctggagtgcaatggcgcaatatcggctcactgcaacctccgcctcccaggttcaagcaattctcctgcctcagcctcccgaatagctgggattacaggcacccaccaccacacccggctaatttttgtatttttagtagagatggggtttcaccaagttgaccaggctggtctccaactcctcatgtctggtgatccacctgcctcggcctcccaaagtgctgggattacagatgtgcgcctcggtgcctggccacatcagtcttttttttttttttttgagacgaagtctcgctctgtcgcccaggctggagtgcagtggcacaatctcggctcactgcaacctccgcctcccgggttcaaacgattctcatgcctcagcccaacgttagattggtttttccgagcctgtgaactccatggggtcgccagataaacgcaatcccggtggaccaacgcccaggacagacgctacgtaccaaccctgtgtcaagccgcaggcagcggttccggactctgggacttaacctaacgtggcggggcgggacttccggcgggaggcggaggcgsaggcgcaggcgctggctggcaggtgtcgctaaccggacggtggtcgccagggcgagaggcgggagccggagaggtgaggcaggacccgggctccactgccgcctctccgagctcttgtgacgcggacctcagtgccaggatggctcggggcgagcggcggcgccgcgcagtgccggcagagggagtgcggacagccgagagggcggctcggggaggccccgggcgacgggacggccggggcggcgggccgcgtagcacggctggaggagtggctctggccgtcgtggtcctgtctttggccctgggtatgtcggggcgctgggtgctggcgtggtaccgtgcgcggcgggcggtcacgctgcactccgcgcctcctgtgttgcctgccgactcctccagccccgccgtggccccggacctcttctggggaacctaccgccctcacgtctacttcggcatgaagacccgcagcccgaagcccctcctcaccggtaaccgggccccagggcgggcaggcaggcggactcctaatctgggcgccccagcttgaagcgagagcaagggtgggaaggaatggatcaggagagttatgaagagggatgacccggagacccggagggacaggtcccctgctctttgacttacgtggccattctacccccaggactgatgtgggcgcagcagggcaccaccccggggactcctaagctcaggcacacgtgtgagcagggggacggtgtgggtccctatggctgggagttccacgacggcctctccttcgggcgccaacacatccaggatggggccttaaggctcaccactgagttcgtcaagaggcctgggggtcagcacggaggggactggagctggagagtgactgtagagcctcaggtcagggcctcaggacacccttttctcagcccagaccccctccatccttcccttgctgccagcaaatgcagcatgaagtgggctctggctgcctggcttaaatcctgccttaaacaactgcctgtataaccatttctatttaccatctctaagccttgatttccttgcttgtaaaatgtacaatgtagataataatagcacttaactcacaggactgtaagaattaaatgaaaaagaggctgggcgcggtggctcacgcctgtaatcccagtactttgggaggccgaggctggcggatcacctgaggtcaggagttccagaccagcctgaccaaaatggagaaacaccgtctctactgaaaatataaaattagccgggcgtggtggcgcatgcctgtgatccaagctacttgggaggctgaggcaggagaattgcttgaaccagggaggtggaggttgcgctgagccgagatcgtgccattgcactccagcctgggcaacaagagcaaaactccatctcaagaaaaaaaaaaaagccaggcgcggtggctcacgcctgtaatcccagcactttgggaggctgaggcgggcggatcatgaggtcaggagatggagaccatcctggctaacacggtgaaacccggtctctactaaaaatacaaaaaattagctgggcgtggtggcgggcgcctattgtcgcagctactcgggaggctgaggcaggagaatggcgtgaacctgggaggcggagcttgcagtgagctgagatcgcgccactgcactccagcctgggcgacagagcgagactccgcctcaaaaaaaaaaaaaaaaaaaaagaattaaatgaaatcaactgtgtagagttcttagtgtaggacatagtacaaaagtatactgttatctcccagggcacccagtgcaaggctctttatctcatcccgcttgggtgtacctggttaccctcagtgaccctcattactgccagacgtatgttgtttacattacccctgcctactgttcctttccctcactaaggctgattctcaagagggaattcaagagagaatgccaatctaacactgttcttttctgtcctcgttggtcactcaggactcaggtacttctgccctccctttggtctccctgttcttctatgtggtgacagatggcaaggaagtcctactaccagaggttrgggccaaggggcagttgaagtttatcagtgggcacaccagtsaacttggtracttccgctttacacttttgccaccaaccagtccaggggatacagcccccaagtatggcaggtaactgggggaaaagaatgttgggggatggaaggggtggttattcccattttcaccagtctccatgtcccctgcctgagacctcccaacctgactcctgaacactttgtatttctctttataatgcccactgccttctcttgaataatatttcctatttatcttctccccttcaagctacaatgtcttctggacctccaacccaggactgcccctgctgacagagatggtaaagagtcgcctaaatagctggtttcagcatcggcccccaggggccycccctgaacgctacctcggcttgccaggatccctgaagtgggaggacagaggtccaagtgggcaagggcaggggcagttcttgatacagcaggtgaccctgaaaattcccatttccatagagtttgtgtttgaatcaggcagtgcccaggcaggaggaaatcaagccctgccaagactggcaggcagtctactgacccaggccctggagagccatgctgaaggctttagagagcgctttgagaagaccttccagctgaaggagaagggcctgagctctggcgagcaggytttgggtcaggctgccctcagcggcctccttggtggaattggctacttctacggacaagggctggtattgccagacatsggggtggaagggtctgagcagaaggtggacccagccctctttccacccgtacctctttttacagcagtgccctcccggtcattcttcccacgaggcttcctttgggatgaaggctttcaccagctggtggttcagcggtgggatccctccctcacccgggaagcccttggccactggctggggctgctaaatgctgatggctggattgggasggagcagatactgggggatgaggcccsagcccgggtgcctccagaattcctagtacaacgagcagtccacgccaaccccccaaccctacttttgcctgtagcccatatgctagaggttggtgaccctgacgacttggctttcctccgaaaggccttgccccgcctgcatgcctggttttcctggctccatcagagccaggcaggcccactgccactatcttaccgctggcggggacgggaccctgccttaccaaccttactgaaccccaagaccctaccctctgggctggatgactacccccgggcttcacacccttcagtaaccgagcggcacctggacctgcgatgttgggtggcactgggtgcccgtgtgctgacgcggctggcagagcatctgggtgaggctgaggtagctgctgagctgggcccactggctgcctcactggaggcagcagagagcctggatgagctgcactgggccccagagctaggagtcyttgcagactttgggaaccacacaaaagcagtacagctgaagcccaggccccctcaggggctcgttcgggtggtgggtcggccccaacctcaactgcagtatgtagatgctcttggctatgtcagtctttttcccttgctgctgcgactgctggaccccacctcatcccgccttgggcccctgctggacattctagccgacagccgccatctctggagcccctttggtttacgctcccttgcagcctccagctccttttatggccagcgcaattcagagcatgatcccccctactggcggggtgctgtgtggctcaatgtcaactacctggctttgggagcactccaccactatgggcatctggagggtcctcaccaggctcgggctgccaaactccacrgtgagctccgtgccaacgtggtaggcaatgtatggcgccagtaccaggctacaggctttctttgggagcagtacagtgaccgcgatgggcgaggcatgggctgccgccctttccacggctggaccagccttgtcttactggccatggctgaagackacwgaagggagggagaggaggggagccaagacactcatgccactctggctctgaagggacaaaggcttctggcttttgcccccagcccctwggataccagtrattcaaaccttcctcatttcatctcaggtgtctccttgctgtcatcccacatagccctggggtgaatgtgaatccagagtctatttttctaaataaattggaaaaaacattttgaactctattgcttttgccagatttgcctcaccaagaggccttaggtcagtccaggcctcagcactgtctgctgtcctcagggaaggtggggtcaagtggccataacctgtccccttcaaacccagtcaggtcaagtgcaatgcagtgagttgagctttagtccacccaaatccacaagtagctggttcacatctctttaatgagatcaaaggctcctgtgtatgtcctgcgggggtaaagctagcacagtcccccaatactgcccctctmcagccctttcaggcagattctaggtaggcagggrggggccaaargaacgcaaggagttgggactagggctgtttctggtgggcaagtaacccatccaccctctcaaaactacttatgggatgtccccttcactggaagayagccccatgggaaagatctgcggtacagactctgggggtagtgcacacggggagtagtcctccagatctggcagggtggmactaaccctcacctccttgactggctcaccctcaccggaggcaggacaagggcagagctcaataccggagtcgccagttaaacggcgatagcggcaggaggggggtgtggaggcaggggwcacccctgccccgggctcaccctcctgatkrgggggggcactctggtgggaggaaacaccttccacatttgttccttcaaagtgggcagggcagctggatgaggaggaacagcaggtttgttcactggaagcagtcaaggggcggcctggggccacagtataaggggggggtggtgtgcctgggcggtgaaccacatcctcgtaggctgggggcttgaaggtgctgaggaagcctgcaggggagaaaattggcatgattggttgaagacaaccaggtatagggtgctagtttttatattagggaaaaatactttgaaatgtgtggaaaagggaatgtgagacgatttggggttctggtttggggagggccactggtagctgacccagggcatcaagtcactcacgaaggtcaagcagtgaaccggtagggaaaggaccagccccatggcatgccccatgataggccaacaagttgatttcacgctgccgctgctgttgttgcagcctgagtttagctcgtcggtggcggaaggcgcaacagcagctaaagaggatgaggacagtccagagcagccagaaccctgcaagaggcaaggagggagcaactcaggcatctttcatgcagagaaggggccctgaaggccgaaattctgaggtccaagggagggtggacacagggacctggaaatagccctcttggagacttacaccagagctcatagtagtaggtgcagcagccagtctccccgcagcagtgaccactctcacagaggtagggctggttgttcactcctgggcacagctctcgaagctgcgggcaaggaggcacttagaactaagggggattccagcccagggcactgtccacccccacctcctgcatgcacatacacaatcccaccctgtgaaccaagttcagcttggagagatgggggaagtggaggatgctgagaggagtgttgaaatatctgaagggctgtcaacgtggaagaggatttggaatagcaagaatcagtctagagaacaagacaaaagtgtggacatacaaagagggagatttcagctctgcatatatgagacttccttcacactcaagcctcactctccccaacccccctacccccatcccctcggtgctttctgttaagggagtgttttggcagaagccagaagacagtctgagataatctcagtctcagacaacgggtagcggtaggtcatttccaaagcaagttgctttcattatcctgcgcggttcactaccccccacccgcaactggatctttccacccctgggcctcaggctccctaggatagaggaggggcagtgtgagacccagagcagtgctcccaaccagatgggattgctgtggatgataaaggatggcatccagggcgcgagtctgggttccagctcttctccaaattgctccctcaagagaagacgctgccggactctgttgtgacaataggcacatagaaaaagatcacaaataactgttgcaagacagagggagcctccctgggacctcactatgcctctggtcactggagagccaccgcaagcttccactgcagccatgggatgggttctatgaggctacaggcaaagtcagctgcatctacgttacaaagtttagacaaagagtggaagagacatgtttaggaacttcacagtacctttggctccgtgagttcctcccccacccccaaaaggaagggacaaggaaaggggaaagagacaaatggctgtcgtgataggttttggagctattgggatacctgctgttgcggcgcccgaagtgccccccakgcctcctcgctgccgttccygctgctggcccgagccatacctccacctacagccccctgaggaccacagcctcctctaccgccagccgccccgcccctgccacctctgctgccaccgccatggtccctgcccggcccatcttcgctgaggccaccatcactccgcggccggagcttccatcygggcagaactccaccaactaggactcagattgctctgccytaccaatcatcatcgtcccttgacggacgggccaataggaacagatcagaggtttctccctgtgaccaatccacagcagcgcctccgccgctcacccagacamcaagagcttgtacagacaaagagtaggtgaaggttcgacccacggccctgactgacagcggcaatagccaatacagacaacagaacaggctctggcatatcaaccaacgaacagccgccccgaagagcaaggttgccgctgattggcttgcggtatgttttcggaatgacgccaaaggccgaagcacgccaggtaatcccggctggaagaggcggagtcccaaaagtcggtccgctggtttgcagcctggttttttgcggtggtttccaagccccaggcatcgacgcaagctccgacaggggcaaaatacgtgtataccggagactggtctgcccacaacatcccactcccccagttctgtacaagccgaagcaccggatgtaatttaatagggtggggaagatactcaagagcgggcatgggacggggcgcagagtccgggttaagggccttacgtagccaaaaggggggatccaggaccctcgggcccccccagccgcatctgcaggttgatgcggtagcactgaaractacagagtgcctggcctktgcgggagcaagcgtagcggcgcggatggggacagccggggacagagcagcgcggcggcgggcctgagggggatggccgctgagacactgccgtgggggcggggacsccaggtgggaaggaaagggtggaaccctgtgctccgctgcagtagcgcaccatgggggccggagccgcagcccgccctccccgccgctcgccccgtgcgcccccccggcctccccgcccactggtcgccgcagtcttggtgaggcgctcgatagtctggttcttgtgctcttctgcccgccgcgccgcctggagccgccgcttccgcgcccgctcctcgcgcttcagcagcatctcctctgtgagggcgggaggtgggcagccctcagctacaggcagcggcagcataggggaaggttgactccgcgccttctggagcagagctcgctagggagagacagagacggggtgctgtctgaaaatggaggaagatggagaggcgaggtcggccagatcgggggaggggaaagaagggacatggaaggcagggtcttgagcagtgcaggccttcggaggcgggatattaattaatgagcaccctctccaggacaccttccataggttcctcttcataaatactgcctcctcccagatctcctgacatttagctttaggtccttatctctcaaggggagaagcatcagtaatgttacctgcctgacctgtgcaccaaaactgtaccagctttcccagaggtctgttgttatttttaatcttatctcaatagagagtatcaggtggataactgctcaagccaaaatcccaggcttagccttgatatattttctctccattcccctccccacaagtatctacttccaaaatatagccataattcatctgattttctccatctccaccactttcgtcttggttaaagcaaccactgcctctcagctgattacttcaacagcttcctagttgttctccatacttctatctcttgtctccacgaagattcattctctacaaagatgccaaagtaatctattgaaatgtaaaccaagtatgtcacttctctgcgtacagcccttcagtggcttgtccactttttcttctcctttgctagacatgttccagtctcaaggtctgtgcgcctgctggtctctgctcaaaagctcttctggtattgcaaatgttatctcttcaaagaagccttctctaactaccctaatgtctctcttccatcatttctatctgtttgtttacgccactttctatttcatcacccttttctttttgtcataaaccatatagctttttgaaattatttacttatttacttcccagccccccaacacacacactagaatactagctccaggagaacagaaactttgtcttttctctactatcgatatccccaatgccacgcaaagtgcgtgggtcgtggagagttctcaatactgtatacatttggtgagtgaataaacaatgaaccaacatacctgtcgagcagtaagcagccgctcattgatctccttcttgaggtctccattgtcatccagctcccccttctccagggcatccagccmcctctgttcctcctcttcctcctgaccccctaaccctcctgataggtcccgaagtggagagggagagagattactgtcttcatctgggaaggaagttggagaaagaaaaacagaattgttcagatggggcaccctaatttggctgagttaatactgggacatggaaaatcctaacccatttcagaaccaaccttctttctttaggcgggtataataagaaacccagtttccccacctccagatcctcacccagccaggcacggtactgctcaagggggactccttccataggttcctcttcattatccacaaccataaggggagagggtgagcgaggcccctctgggatcacagtgaaggtaggaacactgcagagaagcaacactactctttaaaatgagcaagcgtctcctcctcctactccgtagctacacccaactttccccaccctcttagactcttgctgcctaaatctggaccctgaagtcacagtgtccattcggtcttctagaaagcccagtcggcttctaactactatctctgctcctaaagttccccttataaaactatgaccctcttggcctcacctcttggtccccaggacttgtcccccaagcttgattttgagtttgagctgaggcttggcaggggacggctgcgtgggcccggcgtcttcttcctgatggtgtttcttcttgtgtttcttcttgtgcttcttgtgttttttcttgtgcactccatggccatgggcacccgccaggctcaactccagggcttctcctgtggaaggaaagcctgtcracagtgtttggccggagggtggcaggggaagccctgaataacctaagcccctactggatcccacccttcccgcagtactcgctgttaccataacaacagcaccgcctttctccttgccacctgtggccgaagtaccctggactctccgaggagcaagaacgggacttcttttctaacacgacctaaattgcttgatctattcgcgcttacccggctcaggggcctccatagccccagaggtgctcccacgccgccacagcttactcatgaggtcctgcgaggaaaggggactagaaatggttgggacacacgcagacacgccttttccg

SEQ ID NO: 96010 - DNA, 22891 bp, Homo sapiens
aactgctttccttgaatttcttcatggagtcccatcccccaataacattaggagggggtgcataattgcctcactggatggatgataaaactgaggccacagtgtcgtgaccttctggaggtctcgtagtgaaccagtcacagtcatgactagaccctgggcccctgcacccccaacaccaggcagccaacacaacctatgggcctagccctatgccaggtacaatggagaatatgaataagaaaatatacaccctgttctcaagaggtttgcaaattacttggggagacaagagttgtcttttgagggcagtgccaattcaggtttcagctaagagacatcagtgggagctagaatatggggaaggcttcctggagaggatggatggcactggagctgggcctgaataggtgggacttgccctagagaaggaagctgcacatttcagagctggaaagtatcttagaaaccatttgttccaactcctcatttcacatcagtattataaagtcttaattaactataaaatactacataaatgtaaagtatctctggctttatcactgaacctggttgctgaagactaggaaaatgtagatttgcccaaagccatccacctgtttagtggcagagccaagactcaaagccaggtcccctgcctcccagggtggggaaggctcccagatgggtaggggaagtccactcacctgtccctgggcaggctcggtggcaatgtctgtgattggcatctggtgcccagccagctcctygctcagtacaatgttgggaccctttgctgggatgtcaaacaccagcacccggcctgaccacgttcctgtatccagaaccagtactccagtgatgacttcctgaccctcctgggtctccagccaccatactcaacacttactccatcccagaaaccttagtaacaaaaccccctctcactgctccaacggccatgccccttcattcactagccttgtcttatcccaccctgaccctctgaacccttccatggtttactggagtctctgattccactccacttccacccttccctctaactttccacaatttcctcaggccctcattattctcctggccacagcccacatgccccagcacccctccatgccctgcacttggctccctcacccacacagatgaagtggccactggcagcaattccccgggcaaacacagcctgtactgaatatgaaaggggagaatgatcagaaatatcccctcctgcagccctagcaaacactccctgcccccaccccacttggtcctgcaggtacctggggaggcatctccagagtccagtgcatgccagtagaccatggtgtagccattggactcgtacatctggaagaccggggcaagaaccagggggcataacccaactgacctctgctgagtacttcacatatccgtgttagccttagcccatttaatcctcaaaacaaatctgggatgtaggtactatttttatcctaattttttcagaggacaacagtgagagtgagaagttaatagtgtaaggacatacagctagtaaaggggcagatactggaggtggcacttggaaactggaaaagatggaaagattgaagataagaaatagaaaaagagtgagtgggccaagcatgtgaaaagtctggaagtgtttagaggcaagtgggaaagtctggaagcctggcagggaagctgagaaggctctggtggggcaagcaggagagtcctcttcttacctgtattcctcgatgtgaggtgagtaccagcagcactcggaaggggaggacacaccagtggacctggagggaggtgcatcagtgtagggagaaaatcaaagcagggaagatgagtttgtttgtttttttttttttttttggggacggagtcttgctctgtggcccaggctggagtgcagtggcgccatctcggctcactgcaacctcagcctcctgggttcaagcgattctcctgcctcagccacccaagtagctgggattacaggtgcacgccaccacacccggttaattttttttgtattcttagtagagaagaggtttcaccatgttggccaggctggtctcgaactcctggcctcaagtgcccgtctcagcctcccaaagtgttgggattacaggcgtgagccaccgcgcccggcaggagaggggagattctgaggttaggacatgcctggggagattctgaggttaggacatgcctgctcctgaaggtttggagagaaaaggctgggggtaggactgggttcagcaacatcactcccagctccatgcctcacctgagtgataagtgggggactcactccagcaccctccttagcgtggagctggcgctgggccaagggcacaccctcaggagcagcgctgagaagctgggcgcttggtccatgaaccacgccaaaatacgtgaggttgcgagccggcagctgcagcacactgaggttgttgcacagggcggcggccgagcctcgcaggggaatggagcgctcccagcggaacatcctgtgtgggggtgcagccgaatcaccaggcgcgctacaaacagacgcagcggagatgcccgagggcggctatcatcgagcatttcggaagatgcctgagactgggtcataggatggggtgcccagaggacggtgatgggggagggtctcgaggagcaagacaggggagtcccagggctgttttggggcgacgggggaatcgcagaggaggaatggggatgacacaggaccacccgatggccccaagcccgcgagccaaataagtgtgatgaagcccccaaggctttctccctcggctcggatccctgaagcccccggcctagatcagaggtaacacctgcagccccagatcggctcgcctgactcctggttcgtagggtccctccaaatccgccgccaccatagagacgacgcacgtrcgcacggcccttgggcggggtgagcggccggaacgtgycgcgggcggcgcggttgccggggcaactgtgggcggggcgagcgaccccgagcccgtggttgcccaggcgactgttaggtggcttacgcggcccggatgcagcagaaacaccagcgttgctgcgaccgcgttggcgatggcgcacgaaggctcggtgagcttcagttcagctggggatgcgccagagccagggtcggccgttaaggtcggtgtcgggaacagtgggctggctctgggccgcccagtgcccctacttgctcccgcccaccgcgcgggagtttagatgaccaaggaagccacgtcggtactcgggcagaaaacctacacctgcacggtgcccactcaaacgctttgttacactcaagccatgagggaaagggtcagtgggtggtgtagagcccgagaacaggaagtggattttgaaacagctaatgaatgtagtaagtctcttacatggtggtgcgtatttaaatggatgagcatttagagagggaagataacagaaaaaatctatttcgagaatttcaagaggaagaaatatattaaataattcagagactgcacttgaaagtcaaattgtttaagagccaatcaattttaaaataaagaaaacggggccggtctcaatggctcatgcctgtaatcccagcactttgagaggctgaggcgggaggattgcctgagctcaggagttcaagaccagccaggccaacatggcgagaccccgtctcgactaaaatacaaaaaattagctggatgtggtggcgcggtgcctgtaatcccagctactcgggaggcagaggcaggagaattgcttgaactcgggaggcggaggttgcagtgagccgagatcgcgccactgcgctctagcctgggtgacagagagagactgtctcaaaaaaaaaaaaaaaaaaaaaaaaaaaagaagaagaagaaagaaaacggatttgaagagcctttgtgcaaaaatatctctgtcccttctggtcaccatcacgggtgtcagatgcgaggctgggaggggaggtctaaggaaacaactctctttactcagtccagtcagccctgctctagtcaagcttggcctgggctatgggccactcctggtgcttgctacagggctgttctcactggtggatagggttaatgagacttcagggattttgagttctgcaagacttaggaaacagcagatttggggggataatgaattttaggaaacagatatgagacaaggttttagcggggcaataggcaaaggtttgggaagatcacatttggaagtacattttggaaggaaccaggttcagggagactgttgtggggaattgagggagctcccaagagattgtttgtaaactttttatgtctctaaagtgagttttggggactagtctttttttttttttaagtgattacaaaaggaaacaaactcattgtagagaacttacaaaatagaaaagagcataggaaggaaacgtatcctctgttatcattttgaagttttccttttgttgaacacatagtggtttacatatatgagatcataattgatgtgtaagtttgtatcctgcttctttcaattaacgttacatcataaacatttgctttatgccattgcaaattctttctaaagattacctttaatggctgggttggtggctcatgcctgcaaggtgggcagatcacttgaggccagttcaagaccagtctggccaacatggcgaaaccccatctctactaaaaatagaaaaaaaattagccaggcctggtggcaggcgcctgtaatcccagctactccggaggctgaggcaggagaattgcttgaacctgggaggcagaggttgcagtgagccgagatcttgccactgcactccagcctgggtgacagagcgagattccgtctcaaaaacaaaaacaaacaaacaaaaaaagattacctttaatcattgcataatatttcagtatatatagcatgtcaattatttattctctttttaaagacatgttttcaatattctgctattataaaaataccgcagagaatttgttggagaatatatttttatcttcatttcagaaaatgccttttggttgtatttatagaactgaaattgcagggttgaggaagtgaaaacattttttaatgtcttcatgcatactgttgcagcatggtatcacactaaacctttgccaatgctgagtattcttgtttttaaaataattccaatttgatgaactagaaatcagaatgtcaatactatatttattagtcatctacagtccctctcttgtgaaatgtcatgtcctttgcttatctttgggatcttaaatggtttttcttcttatagtttaaatttttattgcaatatagcccaagctggacttgaactcctgggctcaagcaatccccctgcctcagcctcccgagcagctggtactgtgggtgtgcgccactgtgcctggccatttttcttcttctattttttattttattagttttttttttcttttttgagacagagtctcgctctgtcacccaggctggagttcagtagcatgatctcagctcactgcaaactctgcctcccgggttcaagtgattctcgtgcctcagcctccctagtagctggaattacaggcgcccaccaccatgcctggctaatttttgtattattagtagagacggggtttcaccatgttggctaggctggtctcgaactcctgacctcaaatgatccacccacctcggcctcccaaagtgctgggattacaggcgtgagccactgcgcccggccatttttttttttatatgagcttttaatttactcggggatatttatcttttttcatatttgttgcaaatgtctttgagaggctctggagtcagacagacttgcatgtgaatgcattctgacttcactacatcctacttgtatgatactgggtaaattaccataaaatggagataagaatagttggttaaaaaaaaaaaatgtagagaactttttaagctcccctgagccggggctgtgctcttctaagtgggactccgagcctgggctatttctggcgctggcgcggctccaggaaggcatccgcatttgcgaccaggggcggctgcggtggagactggcctgtcctcagcgcccagcaccgctgctcccggcaaaccggagcatgcaccgcaggccagcggccgagttcgcccatcccagccatcacttttccaactagtccttagagaagggaagatgagcgagtcgagctcgaagtccagccagcccttggcctccaagcagaaaaaggacggcactgagaagcggggccgtggcaggccgcgcaagcagcctccggtgagtcccaggacagcgctggtagggagtcagaaggagctcagcgaagtgccaacacctaagagacctcggggccgaccaaagggaagcaaaaacaagggtgctgccaagaccgggaaaaccaccacaactctgggaaggaaaccaaggggaagacccaaaaaactggagaaggaggaagagaagggcatctcgcaggagtcctcactggaggagcagcttccttctgggactggacagctttgatctgctcccaaccccccacctcccaccccccaccccttccctacacccaccatcaccaccgcctccagccaccaccctcatcttccacctgcaccttcaccaccacactacacaacacaccagccgctgcaggtccctatgggctgagtggagaggacttttcccctggcctcttcccatccctaccccctcctccccccgtccacccactcatacacatgtgccctcctggacaaggctaatgtcctgcttagccrcaccctgcacctgctgcgtccctgatcccttggtggtgacattgctctctgggcttttggtttgggagccacttctctgctcctccactgttgcctctggcttcccatagaggggcctgggagggttcccctggtcttaaaaggggcccaagcccccattctggcacaccccactccactgtcctggcagcagcaggtgtggccaatggaggggggtgctggcccccaggattcccccagccaaactgtckttgtcaccacgtgaggctcacacctttcatccttccccaccttccctagtccctgcactaggttggacagcccccattggctacaggaaagcgggaggggtgtgagtcccctactccctctttgcagtggccccagcccccttaccgtctgcctgggatctgagtacatattgcagtgatggagatgcagtcacctattgtccaggtgaggcccatgagccctgtggcagctacctgaggtgggctggggctgctcccccaaccctactttgcttctaccacttggccattttcctctcctcagatggggcaccaataacaaggagctcacccttcccactcccagccctcctgctcctgccacccccscaggttctggttccatttttcctttgttcacaaactacctctggacagttgttttgtttttggttcaatgttccattctttgacatctgtcattgctgctgctagcagcgccaaatgttcatccacattgcctcctgttctgcccatgatcccctcccccaggttactcttcgtggagaagaggggctggggcatggcaggctgggtgactgactactcccctaggatgctgcagcagagagagcaagggggcccaaatccaccataaagcatgtaggggccacctgctcccccgggtctgtcagggaggggtagccatgatttgtcccagcctggggctccccctctggtttcctatttgcaattacttgaattaaaaaaaaaaaatccttttctggaaaacaaaatgtagagaagactctaaatagcaccaataattccaggactgtttactgaattgtctttctcaagtaatttgaacactcaagaattttgaacactttgctctggtataagggccatgaagttaaaccttcacattgtctgggcttgctcactgtgtgctcctaagcaaggctggttaacttctgtcagacttcggtttcttttttctttctttttctttttcttttttttttttttttttttttttgagacgcagtcttgctctgtcgccaggctggggtgcagtggcgcagtctctgctcactgcaacctccatctcccgggttcaagtgactctccttcctcagcctccccacttcagtttctttatctgtcaattgtggttagtgggctgttaatgaaaattattaggtcaaacatctactaagtatctgtcacatagtaggctcttcgtcaattggcccttttccttcccactagacaacttgagaaagcttcctcctagcctatagctactcttccgttccacttcttggtttcctgctctgattgccatgttttgttctcacagaggcaggagaggcaggtccgagaccgcggggtgacccggtccaaggcggaaaaagtgcggccgcccactgtgccagtgccgcaggtggatattgtgcctgggcggctcagtgaggccgagtggatggcgcttacagccctcgaggagggcgagracgtcgtaggggacatcttggccgacttgctggctcgagtcatggactctgctttcaaagtctacctgactcagcaggtgggccgggatccgggtccttcagactcgtctccctctcccgcccctccctgccgacctgagatcctctctcgcctccgcagtgcattccattcaccatcagccaggcccgggaggccatgctgcagatcaccgagtggcgcttcctggcccgggacgagggagaatctgcagtagctgaggmccccacatggggtgaggacgaggagccttcggcatgcacgacggactcctgggctcagggttsagtgcccgtgctgcacgcgtccacctcggagggcctggagaacttccaaggcgaagtacactcctcaggagcctctccggactcctctgccattgctcctgctctcccctttccgacatctcactgcccgagtgcatttccccaggaccctgggggcgtggaccggatccctttaggaaggtcgtggatgggtcgaggctcccaggagcagatggaatcttgggagccttctccgcagctgagagtcacgtcggcccctcctcccacatcagagctgtttcaggaggcagggcccggaggtcctgtagaggaagcggacggccagtctagaggcctctcctcggccgggtccttgagcgcgagcttccaactgtcggtggaggaggcgcctgccgacgatgccgacccttctctggatccgtacctggtagccagcccccaggcctcaactgggaggggacaccccctcggcttccatttgtcgttggaagacctctactgttgcatgcctcaactggacgcggctggggatcggctggaactcaggtcagagggggtgccctgcatcgcctcgggcgtgttggtgtcctacccctctgtgggcggcgccacccgcccctccgcgtcctgccagcagcagcgggccgggcactcggatgtgcggctgagcgcccaccaccacaggatgcgccgcaaggcggccgtgaaacgcctggaccctgcgaggctcccgtgccactgggtgcgccctctggctgaggtcctggtcccagactctcaaacacgccccttggaagcctaccgcggacgccagcggggcgagaagaccaaggcccgggccgaaccycaagccctcggccccggcacccgtgtctccccggcagcgttcttccctctccggccaggcattcctttccgtgacttggactcgggccccgcactcctgttccccactttaaatttaggcctatcgtcgccatccctcgagtcaaagctgccactcccaaactccaggatccgcttcctcaccacacacccggtgctccctgatgtggcccgcagccgcagccccaagctgtggcccagtgtcaggtggcccagcggttgggaggggaaggccgagctgctgggcgagctgtgggctggccggacccgcgtgcctccacagggtctggagctggcagacagggagggccaggatcctggcagatggcctckaaccacacccccggtccttgaagccacttcccaggtgatgtggaagccsgtgttgctgccagaagccctgaagctggcccctggtgtgagcatgtggaaccggagcacccaggtgttgctcagctctggtgtgcctgaacaagaggacaaagaaggtagcacctttcctcccgttgagcaacatcccatccagacaggtgccccaaagcccaggtgaccgtagcacagctaatgaagaactcagcccccaaagtgtggtcacgctcctctaagcctgctgcctccctctgatccctgagcctctggcagtagtaactggtccctccctctgctagccagaaataaacacctgagttgccttaggaactagtctgatgtctcttgtcagtttcttccaagggtgtccaccctctcactgaaccccaaggggagcagttatcctgcaggcctagaagaagatagaaccagggttcaggaaataaccctctcgccacccttaggagaccctgcattagggccaaagctgccccattgcagaggcattctagagaaacccctgtcccccaaaggagtagacataagggctgccagcgggtctggctctgtagagagaacttcgagtctcctttcagtaggggaggaaggagaaggccccgcataagcacagagtgattcgagatatgaagaacttgatttcttgcttccctggtccctggagcttggtcacttcaccttagactgcaaatccaaatttcacttttgaagttaaggaggaactctcaaactcaaacagtatattgaacaaactcaagagtcagtgcctccttaaattttatcttaggctccacacctgcctcattgctagtctccactctgcccagatttatcctgcacccacttcctcctacagcatttccccagcaggcccaggaagtttctgctatgttgctgtgggctgcactcagcatcctggtctggggcgctggctctgtcttccttattctggtcttcttcaactacatgtgcagctctggcagaagtctcatccctgggacctccagtgctgctccacagatctgactgggaaaatagccatagtgactggggccaacagtggtgagtgctcctcccaccctgaatcctcactatgggcctcagcctccaacaactctcacagggaaggcagggaggagcatccactatcaacacccttgtccctcccctagagtgtcccttgttcactgtagtcaccacccagccgaagttgtcctcccacaggcatcgggaaggttgtatcccaggacctagctcggtgtggggcccaagtgatccttacttgtcagagcagggaatgtggacagcaagccctggctgagatccaagcagcctcaaacagcaaccgcctcctgcttggcgaggtggaccttagctccatgacctctattcggagctttgcccggaggcttctacaggagaatcctgagatacatctgctggtaaacaatgctggagtcagtggtatgtgcctggcttgcttctccaaacatgtttctgcagtctcctttctagctcaggaactctaaaacaggtatcctcaaagcctagtctatgcaatcttgccaaaacactaatccataccctcccctaaaaagctgacattgagttatagccttaaacttcattgcccccatcttcacatgtatgtgcccctgtggcatttctgctgaaggtaatatgtccctcccagaccttgtctccctcaaggtggtccctttatcactcaatgccagtgttttcatttcctcccaggattccgaagacacttaccccagggggcctggatctcacctttgtcactaactatgttgggccctttctgctcacaaatctactccaaggtaaggaaggatgggcaccttctgtgctgccctcttccctatacccctggcattctagtaactgtctcccaggaccacctcttgcctcttggcacccagctgtttgctgagtggtgacccaacacactttttgtgtcrcacatcagggaagcccagctggcacaagtcagtattagaaggctgrtagaagaatcattcagcccaaaatataatcagcaaggggatatgagatcccagacctccttctcccatcccctagttctagccagaccagtagagtagtttttgcaatgaaggcttcttgagggggacactaggcaccagaaacagagaaagcaagaagactcagtttctgttctcagggtcggccagaggtgtaggccatacagatgatacagttgatacattactgccttgggcctaagtcctttgaagaggccctttctgattgagaaagtttggctcctccagggaaagtttcggggagtgggtggcaggaacattctctctgacattttctcctagattgtataatagcccctttattattattattattttttaattactcatccccttgcaatgtgatagyctccttaaaagaaaagcaatttttcttttggtcaggtaatacatatccaaagtacaaaattgaaagtgtacaaaaggatacagagggtttttttttttaaactatttttctcttctggtacataagccacctgttcccctcctgagaggcaactactgttgccggagtctcacgtatcctttagcagtcaactaaattaatcccaattggaaagtgaacaaaggcaaaactctatgcacctgcaagtatgattgtttttgtccctttccacaaattgtaacatgtcacgacactatctgcatcttgcttagtgacagtttcttaaacttctttcctgtctcatcttctctaatctattctccccactgccacatcgagtaatcacctttcatcatgacactttcttgcttaaaatcctttgaaggtaacctctcctttgtaggatgaactctaagccccttctctacacttagaaggctgtgtgctaggctgggtgcagtagctcatgcctgtaatcccagcactttgagaggctgaggtgggcaaatcacctgaggttgggagtttgagaccggcctgatcaacatggagaaaccccgtctctactaaaaatacaaaattagctgggcgtggtggtgcatgcctgtaatcctagctactcgggaggctgaggcaggagaattgcttgaacccgagaggtggaggtttcagtgagccaagaccgcgccattgcactccagcctgggcaacaagagtgaaactctgtctcaaaaaaaaaaaaaaaaccctctgctgactaagagccttgccttttgcccttccttaacccacctcctagtctccagccagacaatctgcagctcttggaccacggtctgttttttttcaccctctggctgtgtttttgcacatacggttccttctatctggaatatcctttctcatcatgttggcctggctaactttagttcacctgccaagacgcagcacagatatcacctctgctgtggatctttccccaaccttcacctcccccagtcacccctatttatggggctccattagcccccttgtacatatctctgtgactgcactgatgttgctctgtgaggatcagtctctccaactgagcagagaacacttttggtctctatgtcactgtctgcaaatttaaagtccattgtcttctttaagaataattttctttccagcaaattttggctaaataccacctgctcagtttctcatttgtaatttgtaatttttaaattttattttgtattaatttttttttctggggagagaaggagcagtgctggaagcagtccatgcagcaggctggcctcccactgagtgagtcttaatttcaaaatagttttagcattttaaaaacaatactgtaaactcatatgtgacaacaactattttttatactttacataatccagacttttttttttttttttttttttttggagacggagtttcgctcttgtttaccaggttggagtacagtggcgcgatctcggctcactgcaacctccgcctcttgggttcaagcgattctcctgcttcaccctcccgagtagctgggattacaggtgcccaacaccatgcctggctaattttttgtatttttgctagatacggggttttgccatgttgggcaggctggtctcaaactcctgacctcaggcctcccaccttggcctcaaactctcgccttggcctcccaaagtgctgggattacaggcatcagccaccacacccagccaatccagacttttttgtatacttattgatatggtttggctytgtgtccccacccaaatctcatctccagctgtaatccccatatgtagagggagggacctggtgggaagtgattgggtcatgggggcagttcccccgtgctgttcttgtgatattgagagagatctcacaagatttgatggttttaaaagtggcagttttgacctggtgcggtggctcacgcctgtaatcccagcactttgggaggccgaggtgggtggatcacgaggtcaggagatggagaccatcctggctaacacggtgaaaccccgtttctactaaaaatacaaaaaaaaaaattagccaggcgtggtggcgggcgcttgtagtcccagctactcgggaggctgaggcaggagaatggcgtgaacccaggaggcggagcttgcagtgagccgagatcgcgccactgcactccagcctgggcgacagagcaagactccgactcaaaaaaaataaaaaataaaaaataaataaaaagtggcagttttcccctgcctgctctctgtctcttctgccaccacgtaagacatgccttgcttcccctttgtcttccaccatgattataagtttcccgaggtctccccagccatgcagagttgtgagtcaattaaaccacttttgtttataaattacccagtctcaggtagcatcttaatagtggtgtgagaacagactaaaacacttatgtactattttaaacattttttttaagatttaactttaggattttaattttgtttttgtttgaaacatagttggtttttttttttttaaatattaagcttgttaatagttttccagtgatgaccttccctagctttgtttctttaaaaacattttctcaagtatctctgcacacatatttcttttcccccaaacctagcaccgttatgtccttagcacctagcttagtgtctgccatattccaggtgcctaatgaacatttgtgggatggataaatgaaggaatgaatgtatgaatacatgaaagcaactttcacagtgtttccagcttctccttccccttcttagccatcagtgaaataaaacatataaatgaggatcaattaaggtagctccaactagcaagtagaagaaaagaaaggcaaaactccaaacactaatatgaaagaagaagaagatcattaggaaggcagctaataatgaaaatgaggtcccagctaacattaagctctcctatgcctagcccaggtttctggatagggaccccactgccccttcttagagagccctgctctcctatcttctggagaagcaggttggggagtgagcatgggagtttactctagaacttggattgaagcagtgtggtccctcccatctctacccaggggccctacgacaggcagggtcagccccagtggtgaatgtgtcttccgttcggcatgcacatgggtacattgatgaggggcacctgacaggctggaggccctttgacctttaaccaaaactatgactgcagcaaactgctattgacttcattcactggagagcttgcccagagacttcaaggaagaggtaactgcctctgacaccccttactccactcccagcaccacctcccaacctttcgcatctcctgccaacatgtcctggccataaagtactcccaatgtgccccaaaccagcattttattccactccaactatcatctttgtaccctctatttctctcaaccctgtattcacatcatttcaaccttttcccactcttttcatctcccacaatatttctttcctgctggtgttttccaataccagcatcgtccaccatgttcctcctacagttcacccaacacttccaatacccatccttccttactggcttgggtaccattaaggtaagctacagagcaccagtgtcccctgcaccaccctcaagtcactggtcaacactacccaacagacttggtaggatttgcacgctgctgaactacacttaaccccttttatcggtcatcctcctctctcttcactttgcactctccttgtgtctcaccttcttaggaatgactgtgaatgctgtggagcccggtgttgtatacatggggattatgaggcatttctcttagccataatgcttcctcttctagcttgtcagcttcttcatgaaggtaggtgggggaaagaactggtttggcctagaggaatggggcagggctcaacttctcagtgtgtcccagcaggccaaagtttgcctggcatgacttctttttcgcttgtccctcccaacaggatctcaaacaaggtgtactcccagtcctctacttgagcttggcagaggagccgggtggtatttctggaaaatatttcagcagttcctgtgtgataactcttcccgttaaagcctctcgggatcctcatgttgcccagagcctctggaatgcctcagtccgactgacaagcctagtcaagatggactgaccctctgtgacctctgccctaacttgccaccctgcctctaacttccagcacttactctgattatgccctttgtttgctggcttctaggaccaattactgtccagtataatgaccacttcctatgcctgttggcttagtgatgacttgagagtcaagaatagtcggggccagctgcgatggctcacacctgtaatcccaatgctttgggaggctgaggtaggcagattgcttgagctcaggagttcatgaccagcctagagcaacatggaaaaaccccatctctacaaaaaaatacaaaaattagctgagcagggtggtgtgttcctgtggtcccagttatttgggagtggaaggtgggaggactgcattgagaccgggaggtcgaggctgcagtgagccaagatggcaccactgcactccagcctgggtgacagagcaagaccctgtctcaaaaagaaaaaaaaaaaagaataattcacacagtttaatcttccactttattgccagttagccggtggaagtattcatcttttgggaactaggatctcccaacctaccgggtgctgtggtgggttgtggtaacttgaagtaagactccttccggggagcgctggggataccagtaagaagggaaactttcatttgtacctcttgattcccagacctgtgcttcttgcctatggggaagatagccccacacagtgacctctggattaaggcatttaccacatcctgtagcacagcaccccaacctcacagggagttgtctcccaactagtattgtactgagcctgctctgggtgatgagtcataaaatccagttaatttagggagtatgagtccattgctccttttctgggatctttgttcatgtatataaattttagaatcagctctttgaatttcaccacacacacacacacacacacacacacacacacacacacacacatcctgttggggattgcattgaatctatagatatacttgggaggattgacatttttatgagattgaggcttcctaaccatggacaaggttgactcttatatctatttaaatcttctaaatacctgtacaaaattttaaataattttatccacaaagatcttgtacagaagttttactgcatttatattcaggcactttcatttttatgctattataaatgatattttaaaatgtgtatatctgttgacggctgtgtgaaacctcagttcttagtttgaaagaatttaaacaagggacacagcaaaagaagtgcagcatagagtaatttattgcacaagaaaaagaatattttgaaaggtaggtgcagaacagacagtacaccgaaagtgagagaattcagggcaggctgctcataaggatgagacagcaaagactggcactagggagactcttatggaagtctgacatgattattcatgaggtgggaagaggtgttactagtaagcatgttctgggtggtcctctgggtgtggatgtgcagtagctgtatatgcttgttcatatgtcacatgtctcattagcatcttcaatatccaggggtgtactttttactaataaaatgagcaaagggtcagtttgaggacaggtaaatcaaactgcacatgctgtctgcaggggaaattccctactgaagatagctttgcttgaatgagctcagttacaatgcatatgctgaggtttattgtgttgattgtacagtcaccactgttgctgccttgactacttggtcacttccttgactacctctcctgcctcatattgatcttatatcaaacaactttattaagttatctagttctaataagtcgtccatagattctcttggtttttctacatggaaaatcacatcatccaggaataatcacagttttatttcttcctttgtaactattccaacttatatttctttttctagaaaactttaatagattttctagtattgaaacaaccttacatttctggaataaacccaactttgtaatagtgttaccttttttatgcattgctaaacagcctgctcattttttttaaaactttttactatgttcataaaggagattggcccaaataaataaatagaaaaaagaaaaaatagtaaaggagattggcctgtatttttccttatttatgtggaaactgcctagttttgttgttatgagtacttttttttttttttttgagacagagtctctctctgtcgcccagggtggagtgcagtggtgcgatctaggctcactgcaacctccgcctcccgggctcaagcaattctcctgcctcagcctcccgagtagctgggattacaggcatgagccaccacgcccggcctagaatttttaatctacatatttaacttaatgtctttaatcaatatcttcattcttctttaaaacaattcatagattttagagttctttaacattaataattctctttgaatttatacatttttgtaaccctatattttaattctactattttattaatctcacaaatcagatattattattattattattattatttttttttgagactgagtttcgctcttgttgcccaggctggagtgcaatggcgcaatctcagctcactgcaacctccgcctcccaggttcacgcaattctcctgcctcagtaatcccgagtagctgggattacaggcatgcaccaccaggcctggctaattttttttttttttttgtatttttagtagagacagggtatctccatgctgaggctggtctcgaactcctgacctcaggtgatccgcccaccttggcctcccaaagtgctgggattacaggtgtgagccaccatgcctggccacaaatcagatattattttaaataggtgatacttgtataggtttgctcatatgtttaatgttaatacttaatattgcttgctcttctttcttgtatctcagatcttccatcttgtgttattttccttctacctgaagtacatctttagaagttactttaggccaggcttagtggctcatgcctgtaatcccaccactttgggagactgaagcgggtggattgcttgaggacaggagtttgagaccagcctgggcaacatggtgaaaccccgtctctcaaaaatgcaaaaattagccgagtgtggtggcacgttcctgtagtcccagctattcaggaggctgaggtgggagaatcacctgagcccaggaggtcaagtctgcagtgagctgtgatcacgtcattgcactccagcttaggtgacagagtgagaccctctctttctctctcaaaagaaagttactttagtgaggatttgtggtagacagaattctaagatggcctccaaagttctcatcttttgtttatgtaccctataaaatcccccttccccttaagtctgagcagaactcgtgaatatgatgggatttctctcctgtgattacgttatttacctgacataagggatttttctgatgtagttaaagtctctaatcagttaatcaaattggtgattattttgggtggacctgacttaatgaagtgagccctttaaaaggcttcaagcctttacagaagttagaaagattctctcctttaccttaaagaagcaaattgctacactgtggagagggccacatggcagggatggcagatggcctctgggagccaggcctcagttctatagtcacaacaaattgaattctgccaataaccagtgagcttgaaagaggaccctgaacttcaatgagctttcaaccctggatgacttcttgatttcagcctggtgacctcctgagtggaggacccagcaaacatgtacccagactcccgacccacagaaactgtgagataataaatgtgtttttttaaaaaataaacatatttattatattttttagagacaggctctctctctgtcacccaagctggaatgcagtggcactatcacagctcacagcaacctcacactcctggctcaagcaatccttctgcctctctgcctcccaagtaactgggactacaggagcatgccaccactctggctaattattattttttattttttattttttcagaggtaatcgagttagaattaaatttttttttcttttatagagatggggattcttgttatgttgcccaggctggtctcaaattgctggcctcacaggatcctcttgccttggcctccaaagtggtgggatcacaggcatgagccatcatgcctgrcctatgttgcttcacccactgaatttatagtaatttgttatgtagcaatagaaaactaatataagatctaatataataaacttcctcagttttatttgttggaggatgtatttatttcaccttaatgttggggtatcagtttgctactggctaaggaattataggttgacagtttttttgttttgttttgtttttttgtttgtttgttttgagacggagtctcgctctgtcgcccaggctgaagggcagtggcgcgatctcggctcactgcaagctccgcctcccgggttcacgccattctcctgcctcagcctcccgagtagctgggattataggcgcccgccatcacacctggctaattttttgtatttttttttgttttgttttgtttttagtagacacggggtttcaccctgttagccaggatggtctccatctcctgacctcgtgatccgcctacctcggcctcccaaagtgctaggattacaggcgtgagccactgcgcccggccgacagtttttgtgtgttttttttaatcctgttaaatatagtattgctttttttttcttttcttttttttttttttttcgagatgggagtttcgctcttgttgcccaggctggagtgcaatggcgcgatctcggctcaccgaaacctccgcctcccgggttcaagtgattcttctgcctcccgagtagctgggattacaggcacgcgccgccacgcctggctaattttgtatttttagtagagatggggtttctccatgttggtcagtctggtctcgaactcaggtgatccacccgcctcggcctcccaaagtcctgggattacaggcgtgagccagtccacccggcttgttttttaagatggagtcttgctcttgttgcccaggctggagtgcaatggcacgatttcggctcactgcaacctctgcctcctgggttcaagcaattctcctgccttagccttccgagtagctgggattacaggggcctgccaccacaccctgctaatttttgtatttttagtagagacggggtttcaccatgttggctaggttggtctcaaactcctgacctcaggtgatccaccggcctcggcctcccaaaatgctgggattacaggcgtgagccaccaaccccgtacaaatacagtatttctatgtcttctggctttcattgttattgagaaattgatgttaatctaacagttattttgcagggattttgccttttctcttttcctccttttaagattttatctttgtcattgcttttctagtttcattgtaataaactcacgaatttattacatgtgaatttctttttatttattctggtgggaattccttggatttcctgaatttgaggatatgtatctaacctgtattactctttaaatacaacaatctcttcattaccttcctttctttccttccttcctcccttccctttttccctccctcctttcttccttcctttgcaccccccactttctctctctctctctttttttttttttttttttggagacagagtctccctctgtcgcccaggctggagtgtagtggcacaatcctagctcactgcagcctcaaactcctggcttcaaacaatcctcctgccttggcctcacaaagtgctgggattacaggagtgagccactgtgcccagacctttttcttctctctttatagaattgcaatttagataaaagctagatcttcccactttatctttcatgtctcttaatttctctttcatattttccttg

SEQ ID NO: 96011 - DNA, 16322 bp, Homo sapiens
agggcttaaaacagaattatcatttgacatagccatcccattattgagaatatacccaaaggaatataagtcattctaccataaagacatatgcatgcatatgtttattgcagcactgttcacaataccaaaaacatagtatcaacctaaatgcccatcaatggtagactggctaaagaaaatgtggcatgtatgtaccatggaatactatgcagccataaaaaagaatgagaccatgtcctttgcagcaacatggatggagctgaagtcattctcataagcaaactaacataggaacaaagaaaaaaataccacatgttctgttttttattttttgagacagagtctcgctctgtcacccaggctggagtgcagtggtgcgatctcggctcactgcaacctctgcctcccaggctcaagtgattctcttgcctcagcctcccgagtagctgggactacagttgtgtgccaccatgcctggctaattttttttatttttagtagagatggggtttcaccatgttggccaggttggtctcaaactcctgacctcaggcaatctgcctgccttggcctcccaaagtgctgggattacaggcgtgagccactgcgccatgccttttttttttctttttttgagacagagttttgctcttgtcgcccaggctggaatgcaatggtgtgatcttggctcactgcaacctctgcctcccaggttcaagcaattctcctgcttcagcctcccgggtagctgtgattacaggtgtgcgccaccacacccagctaattttgtatttttagtagagacggggtttcaccatgttggtcaggctggtttcgaactcttgacctcaggtgatctgcccgctttggcctcccaaagtgctgggattacaggcgtgagccaccacacccgcactctcatttataagtgagagttaaacaatgagaacacatgacacaaagaggggaacaacagacaccagagattacttgagcgtggagggtgggagaaggagaagattaaaaaactaactattgggaactatgcttattacctgggtgacaaaataatttgtatgccaaacccccaagacatgcagtttacctatataacaaacctgcacattaccccttaacctaaaatgaaagttaaaaaaaaaaaaaaaactgctggcttgacacagtggcatacgcctgtaatctcagcactttgtgagtccgaggctggagaattacttgaggccagagctcaagaccagcctgggcaacacagcaagcccctgtctctacaaaacattatccagggtggtggtgcctgcctgtagaccccatatttggaaggctgaggcaggaggattgcttgagcctaggagttggaggctgtagtgagccatgattgcaccactacactccagcctgggtgtcagagtgagaccctgtctctaaacaaaaacaaaaaacaaaaacaaaaacaaaaacagaaaaacaataatgcatttgcccctatttctgtgggagagatcactagaatgggtttgctgggccaaaaagtatgaacatcttaattttaatagatactaattgcacatgttttttaaattaaggctgagatatggaatgttgttttaaaaaaaacgccattactggctgggcgtggtggttcacgcctgtaatctcagcactttgggaggccaaggcaggtggatcacctgaggttgagagttggagaccagcctgaccaatgtagtgaaaccctgtttctactaaaaatacaaaaattagccaggcgtggtggcatgcgcctgtagtcccagctgctcgagaggctgagacaggagaattacttgaacctgggagatggaggttacagtgagccaagatcacatcactgcactccagcctgagtgacagagtgagactctgtctcaaaaaaaaaaaaaagccataagtcaatcatctcactaactttatttaaaatgctaagtatatgtaagttatttgtcaagtaaagaactgggttcttagacaatttcttattaacagagcttttggtgttgaaaatcccatggtttattctgtctcagagcatcttatgtcaattttgtgtgtgtgtgtgtgagacggagtctcgctctgtcacccaagctgcagtgcaatggcatgatctcggctcactacaatctccgcttcccagtttcaagcgattctcctgcctcagccttccaagtagctgggattacaggcgtgcgccaccacgcctggctaattttttgtatttttagtagagacggggtttcaccgtgttagccaggatggtctcgatctcctgacctcaggtgatccgcctgcctcggcctcccaaagtgctgggattacaggtgtgagccaccatgcctggtctcttgtgtcattttttaaataatattttttaaaattaccaaccactataagaagcgctgctcttatattattaatacttccagtttggtatacagtacttttctatactaaaagaagaatcattttatttttttccagctttattgaggtatgtttgacaaataaatgtatacaattaaagtgcacaatgtgatgatttgctatatgtatacactgtgaaatgattaccacaatcaagctaatgaacatattcatcatctcaaataggtgcccttattttctaggagaaacattttatattgcctcttcatcacagtctgaattctgagtgtcatttctgtccttcctggtccctttttgcgaggacagagtggttctctgcattctttaaaagatatttttattggtatcttttcttttttttctttttgtccctgtaattttaaggtccttttatttgctggtcttcaaattcaaaataggtgcttgtttataaccagtgaaacaatgcaatacaaggatgtataaagacaaagctaatcatccccacctcaacctcctgatgtaatcaatattaagagcttgctgagtattcttccataactctctttgttcatacgaacagatcaaacctatgtgcacgtttgtttccaccaaaacataatcatataatatgcagtattctgcaatttgtttcacttaactatataggtatatatacatacatacatatatattttatataatatgtgaaatagactatattacttaacaaaatataatgaaaatattccacggtcttaaattcttttccagttctaaaattcattttttcttttccagcgggcccactgtcagaaataaaattcattttggtattcctttagaaaacataccaccattataattatttgtaataaattgtttaatgtctttcttccccacttgactgacagctccatgaagtcagggtacttattttgctcaccactgtatctccagattttaagatagtgttgccaggatagtaactacctacaatatatttgttcattgtttcagagttccctgaaaccttcagtctacttaaactaggtcactgacaacactcaaatacatgtgtgtctttaggaactcaggcccgagtaagtcaccactcaattttatcttaatggaacctagtaacaatacactttaaataattgtaaaaatttgggctttttagcaaaaagccttctgccacaaaaatgaattttttttttttttttgagatggagtcttgctcactctcccaggctggagtgcagtggcacgatctcggctcactgcaacctccacctcccaggttcaagcaattcttctgcctcagcctcccgagtagctgggattacaagcatgagccaccacgcccgactaatttttattttattttattttattttattttattttattttattttttttttttgagatggagtctcgttctgtcgcccaggctggagtgcagtggcgctatctgggctcactgcaggctctgccccggggttcacgccattctcctgcctcagcctcccgagtagctgggactacaggcgcccgccacctcgcccggctaattttttgtatttttagtagagacggggtttcactgtgttagccaggatggtctcgatctcctgacctcgtgatccgcccgcctcggagtctcgctctttcgcccaggccagactgcagtggcgctatctcggctcactgcaagctccgcctcccgggttcacggcattctcctgcctcagcctcccgagtagctgggactacaggcgcatgccaccgcgcccggctaattttttgtatttttagtagagacagggtttcaccgtgttagccaggatggtcttgatctcctgacctcaggtgatccacctgcctcggcctcccacagttttgggattacaggcgtgagccactgcgcctggccaaaaatgaattttaaaagacagatcggtggctcacacctgtaatcccagcactgtggaaggccgaggcgggtggaacacctgaggtcaggagttcgagaccagcctggccaacacggcgaaaccccgtctctactaaaaaaaaaaataataataaccagacgtggtggcgcacacctgtaatcctagccactagggaggctgaggcaggagaatcacttgaacccgggaggcagaggctgcagtgaaccgagatcccgccattgcactccagcctgggcaaaaagaacgaaactcggtctcaaaaaaaaaaaaaaaaaaaagagacacatcaaatatttcgtggaaagagagctctgcactcttaattagaagacctgggggccgtgcgcagtggctcaagcctgtaatcccagcactttgggaggccgaggcgggtggatcacctgaggtcaggaattcaagaccagcctggccaaccccgtctctactaataatacaaaaattagccgggcgtggtggcgggcgtctgtaatcccagctgctagggaggctgaggtagaagaatcgcttgaacccgggaggcagaggttgcagtgagccgagatcgtgccattgcactccagcctgggcaacaagagtgaaactccgtctcaaaaaaaaaaaaaaaaagagacctggattccagtcccacctctgccattaacttgctgtgtggacttttgaaatttccttatcctttttaggcctggttcctcagctgtagttctaatattcattaattccactaatatttactgtccactgcgtgctggcactgtggttaagtactagaaatactggggtgaataataacagccagtactttttagtaaatgcttactctaggcttgaaattttgctaagggagtcatatgcactatctcatctaattttctatgaaataggcactactgtgacattttctgtactttacaaatgagggaactgaggcacagcgaggtgaaataactttcctgggatatcaaaaggtgtggtgaagacaggattggattccaggcagtggggcttcagatctcattccagtaataataggaaaccgttggtgtcataattacgtgactatttcagtggcttgcgttttggtctcagcccaggagtactgggggggtgggcaatatgagggttcaaggacgcaggggtacatcagagaaaccatcaagaggtctgataaaaagcgacaccgggagcaagaatctctcgctctcgcaatttccatgccaggaaggtgaaatgggaggtgtcagcgagtcgtacgcacggcctcttctctggacgcccgttgggtaaaggagagcgtccgggtcacgcaggcctatagcaagtctctgaactcggcagggggcggggagaaagggcacgcagtgtgcgcgcagcgggcgcgccggcccttccgacgcctgcgcgggcgggcaaacggacggctccgcccagccgccggctcctttaccccgccccactacccccgccttcgcggcgctcgtttcctggcgctccccacctttagcgagaccaacgagagaacaccgcctgcagctagaacagcctggtcaggagcgtaacggagtggtgcgccaacgtgagaggaaacccgtgcgcggctgcgctttcctgtccccaagccgttctagacgcgggtgagtggcggggcctcgacccccaccccaagcgcaccctgactcccctccctctcttgggggaggcctgggccccagccctctcccagcatgctccacgcgggatgcttgggcaggtgcagcgggaggattgtcagcacaggagaccgagagtcttcttcctgggggcgctctcttggtccctcagagggatatcgaggttaccatgtcctccctctcacttctcttccctatttcgtcttcgttttccgtacttcaccccaactaccttcacccaaaaaggttcatctaaaaaccattggggtagtttctgtttcatttgtgctcgtgtgcagttttgtttccttctgcacaaagtatcctatcatatgcatccctagtgttatattttttgcctctgtgatggggaaaaaatctccttagaataatttttgcaaattattttatttaaaatgtgtagacttactgagttttgatcactatttttgcagccaggagtaggatcaccatcaggaagaattctgacacatatgccataattgagcaaagaaacatgtgaattatgtattggccagaaataatgaaaactgcgtgacatgaaatacaaaaatcctatataaattaatcttagagtgcacctgacaattctttttcttttttctttctttctttcttttttttttttgaaacagagtctcgctcttgttgcccaggccggagtgctgtggtgcgatcttggctcactgcctgcaacctccgcctcccgggttcaagcaattctcctgcctcagcctcctgagtagctgggattacagtcatatgccaccatgcccggctaatttttgtatttttagtcgagacagggtctcaccatgttggccaggctggtcttgaactccctacctcaggtgatccacctgcctcggcctcccaaagtgctgggattacaggcgtgagccaccgcacacagccgacaattctaatattatgccgagcttgttttctgtcacttctcttcttggaactgtgtttattgaccaagttctgtgagtgacacaggaaagtcttcctgcctcttgccccacccaccgctcagaaattacatctgccaagctattccacaccttgtctttctggtagaagtcaaaattccatttcctctagcagaaaaccacaggagtggtttccttgtagcaatatggtgctgttgggtgcaaaatatcagttatggtcaacagatcccacttttttcccatttgtatgaaaacaaggatattcagtaacccatttattaaactctaatgtggtagaagcactatggcaattattcttctgtaatggaaaaaaaccattaaactgatattgagaaatgtggtttctagtccacttataccactgtctaactgtgtgactgagtcagttatttaacctctgtggacttccatttcctctctgtaaaatgagagaagtgactgacattgggtagttttctaaggctcctttcaaccataagagaaaactgggaagtctaagtagctcaatagattgcttttttctgaagatggagggaagattggaaaattcagcctttactagaataaatggttaacatacaatttttttcaacaagtttatttaatgtcagcttttaatttcttttatttatttattttttctgagacagagtctcactctgatgccctggctggagtgccgtggtgagatcacagctcactacagcctccgcttcccaagttcaagagactcttgtgcctcagcctcccgagtagctgggattacaggcacccaccaccacgtctggctaattttttggattttgggtagagacaaggtttcaccatgttgcccaggctggtctcgaactcctgaactcaagggatccacccacctcagcctcccaaagtgctgagataacagccatgagccactgcacctgcctcttaatttctaattgaaataaaagtgtaaatttttccatttttacttccccaaagaagaagaaaattccttttgaggaaatgaaaatgtttattaatgggccccagatatatctatcaatattcctttttgatccaaaagatgtaactttttattatgggcttctattacatcaatagttgggatactgtattggaaaccatttagttttaggaacaaaagggtaaatattaacctatatggtgttattctcaagaaacttggtttagatttactcaaaacacttaaggacagcagccatcagttaaagaaagcactatgttgagaacagaaatgtcagcacaataccattggtgatttgccatttataggtggttttatctgttcaacccaaggttttggtgtaaaagttcactatatttttagaggtatttaaataatgcaagcttgtgatgtgaaattctttaaagagaatggtggatggataacctctgtaacactggtttcaagggtttattaaatccccatagatgaagtgcaaaacaaacttctccatagaggagttgttgcaaagttccagtttataccaaacagtaatcagattccattggaagctaaagattttgagagccttttgtactatatgcaactaacttgatttcaagcttgggaaccttttaaaaaaaacattaaaagcaaaatgtaagtatataaggaataccaaatcaaatttatagactaatctttttctattaagtattttaagagtctttttcttctttataggaaaaatgctttctgaaagcagctcctttttgaagggtgtgatgcttggaagcattttctgtgctttgatcactatgctaggacacattaggattggtcatggaaatagaatgcaccaccatgagcatcatcacctacaagctcctaacaaagaagatatcttgaaaatttcagaggatgagcgcatggagctcagtaagagctttcgagtatactgtattatccttgtaaaacccaaagatgtgagtctttgggctgcagtaaaggagacttggaccaaacactgtgacaaagcagagttcttcagttctgaaaatgttaaagtgtttgagtcaattaatatggacacaaatgacatgtggttaatgatgagaaaagcttacaaatacgcctttgawaagtatagagaccaatacaactggttcttccttgcacgccccactacgtttgctatcattgaaaacctaaagtattttttgttaaaaaaggatccatcacagcctttctatctaggccacactataaaatctggagaccttgaatatgtgggtatggaaggaggaattgtcttaagtgtagaatcaatgaaaagacttaacagccttctcaatatcccagaaaagtgtcctgaacagggagggatgatttggaagatatctgaagataaacagctagcagtttgcctgaaatatgctggagtatttgcagaaaatgcagaagatgctgatggaaaagatgtatttaataccaaatctgttgggctttctattaaagaggcaatgacttatcaccccaaccaggtagtagaaggctgttgttcagatatggctgttacttttaatggactgactccaaatcagatgcatgtgatgatgtatggggtataccgccttagggcatttgggcatattttcaatgatgcattggttttcttacctccaaatggttctgacaatgactgagaagtggtagaaaagcgtgaatrtgatctttgtrtaggacgtgtgttgtcattatttgtagtagtaactacatatccaatacagctgtatgtttctttttcttttctaatttggtggcactggtataaccacacattaaagtcagtagtacatttttaaatgagggtggtttttttctttaaaacacatgaacattgtaaatgtgttggaaagaagtgttttaagaataataattttgcaaataaactattaataaatattatatgtgataaattctaaattatgaacattagaaatctgtggggcacatatttttgctgattggttaaaaaattttaacaggtctttagcgttctaagatatgcaaatgatatctctagttgtgaatttgtgattaaagtaaaacttttagctgtgtgttccctttacttctaatactgatttatgttctaagcctccccaagttccaatggatttgccttctcaaaatgtacaactaagcaactaaagaaaattaaagtgaaagttgaaaaatatccctgagaaaaaaaactgaaaattacttacaaaattgagtaattttcctggaagcgaatttagtgtcattcctcagagcatacgcaatttcagtgtaactgtctgtacttcagcctgcagatactgacattggattggtgcctatgaagaatgtcatgtcatttaattgtgttgtttctcagttaatcaagctcccagctgcaatttggataaaaatgtagtcctgctgggtcaatgagttctgtggaaatttgaagaacttgttttggccatctggcagtttcacttacctgagttgaatctgttctgtattttgttttgttttgttttgtttttttgacacagagttttgctctgtcgcccagactggagtgcaatggcacaatctcggctcactgcaacctctgcctcctggtttcaagcagttcccttgcctcagccttccaagtagctgggattacaggtgcccaccaccacacctggctaattttttgtatttttagtagagatggggttttgccatgttggccaggctggtctcgaactcctgacctcaggtgatcacccgcctcggcctcccaaagttctgagattacaggcatgagtccctgcgcccagcctgttctggattttgtttccttgtacaagttcagggaattttcccatgttcacagctgtaccatatctgttttcagtgtggaggtcctaacctatctattttgcattaccataccttttcccaaatttcaatggctactcagaaacttaatccagtggtaaatgcaatagctcctgtactgataaatgtgtgaaatacttagagctgacttgttctgcaatctggccagcacatgctgtgagtccgcatagagtgttagagcatgacattttagagatcaatatttcttgtaactggcctcatgatggtaatggtctcccacagctttagcaaaccagaaagaaaatttccttaagatggccttgggcttgaagttattgatcctcagggtagtgtgtaaaactttgctttatttctgattattctcattgagggttttggttaagatgaagcgttattagttttgaagaataacaaaacccctttatgaagccccctaatatgtggtctcagatgcaattactacaatcaaatcatgttcaatgtgagtacagtaataaacagtatctctcagagtgtgacacagcttatctgtcaccttgcccccaacaccagtatatttaaaatttttctattgcatttatcatcttcacttacattagtacatcagagtatcatcataaacatgtcagaatgcattgcattgtgtgttttgctaatgagtactaaggtaacattgccttttaagccaaattgatgctcttgattgtatctttatacatattttttttttttgagacggagtttcgctcttgttgcccaggttggagtgcaatggcgtgatctcggctcatcccaacctccacctcccgggttcaagcaattctcctgcctcagcctcccgagtagctgggattacaggtatgtgccaccacgcccagctaattttgtatttttagtagagacagggtttctccacgttgatcaggctgttctcaagctcctggcctcaggtgatccgcccgcctcggcctcccaaagtactgggattacaggcgtgagtcactgcgcccggccgatactgagtatttttttaacgaaatgttaggtgtctcaaataatatgctgtctctctgaacttacttgcagccagtcttgcagataaaatctgaatcaataacagaaaatagtactactgaggttgtggttacagatttgatcaccatatatgtctgttagctttacatagaaaaataatatattcagtaaccgaaaacaataaccctaaccccactcatgatgagagagttggaaaaaatggaggtctgatggaaattgatcgggattgtgaatatactctacatacggctagtggctgtcatattggacagcacaggtctaagcaattctaagtgtaagatcccactcctggctgagatgtgaataagagaaaacttgaagtttcctctaaaagttgtatttgtttgtctggttgtctcaaatgcaatggaaaccacagcatgacttttagcaggccccagaccattgccttgtgtgagttcaatcactgaatcttccttttcaaaagtaaaacattggatctggagcaaaatatagatttagaccccttggctattttctggggcggtgggctggcaggggagtaagctaaaaggttgcttgtgtatcaaatctgattcataatgcccagatttttctataatgcatttaaacaaactcagttattgggtgttcttaaagcagggcatacctgtaatagaaaagttgctgaaaatatagtctaatgatgatgtaccgctaatttccctttcatttgttaagaatattgtgttctggctgggcacagtggctcatgcctgtaatcccagcactttgggaggctgaggctggcagatcacctgaggtcaggaattcaagaccagcctggccaacatggtgaaaccctgtgtctactaaaaatagaaaaactagctgggcgtggtggcgggcacctgtaatcccagctactcgggaggctgaggcagaagaattgcttgaacctgggaggtggaggttgcagtgagccaaaatcgtgccattgcactgcagcctgggggacaagagcgagactccatctcaaaaaaaaaaaaaacaatattgtgttccttttggtatgggctgactttgatgcactcagtacttgcctgagtggttatgtgagaagcatatgtttatagaagttagctttcttttggcatacaaagacattcagcaatgtttatcaactcccccccaaaaaaatattgccccaaattttaaaaataactatacttgacagtttttacaagtttgaaaaaaatgacaaaaaataactatagtcaataactctaatataaccaaaaatagaatactataaagcatttaaagggtaatgggaaaatgacttgtttggaaagtataaaatgatgacatagtgtatctctagggtctctaccataataaaaaaaatccagctttactagtgtggcatccatacactataattttctttgtatatattgggtatctatgaggtcaacagtaggcagtaggcctggtactttgtggaaagcagaaagagcccaaactcataattcatcatagtcaaataatcatttcacataagctttgcatgagcaataagacaaactgtaatttaataatgtagtactagaatatagtggtcagcccttttgtcttaaaattcctggatttgatcaatgcttttttttttttttttttttgcccaggctggagtgcagtggcacggtcttggctcaccgcaacctctgcctcccgagttcaagcgtttctcctgcctcagcctcccaaatagctgggattacaggcatacaccaccacactcggctaatttttgtatttttagtagagacgggatttcaccatgttggccaggctggtctcaaactcctgacctcaagtaatccacccgtcttggcctcccaaagtgctgggaatacaggcatgagccactgcgccctgcctgataaatgctatttcttctaacccacatagttcccatttctttaggtttctactgattacatgcaagaatagccacattggttatgccattgctttggaaatttggcaaaaaccctagcagaaagagcaggacttaaaaataagactcaggttttagagagataaataggataactgcctttaatgagtgacagacttccattagaaaaaaaaaatgctttgatctagtgagtgaatgatacagacatccacctagttacccaaagtgttgaattaatggaaatattctaatagtcaaaataccacccctgtaccatctgaggggaagagggaaaaacttcctggcttgatggaagactgaatgctggcactgagaatctttttcatacttaccactttaaagcacttgcctctagcacgaagcttcagggaatactgccttttctccaacccatcgccgtccaatagataaaacatgagccatatataatttcacatattctttctttcttttgagatggagtctcactctgtcgcccaggctggagtgcagtggcgcaatctcggctcactgcaagctccgcctcccgggttcatgccattctcctgcctcagcctcccgagtagctgggactacaggcacccgccaccgcgcccggctcattttttgtatttttagtagagacggggtttcaccgtgttagccaggatggtctcgatctcctgacctcgtgatccgcccgcctcggtctctcaaagtgctgggattacaggcgtgagccaccgcgcccagcctttaatttcacattttctaatagtcacatttaaaaagtaaagacacaggtgaaattacttttagtaatatattttatttaacccaaacatatccaaaatattatcatttcaatatataatcaacaggaaagaatagataatttacattatttattaagtctttgaaatccagggtgtattttagttacagcacatcttaattcaaactagtcacatttcaagttctcagtggccacatatggatgggcagaggctaccatattagatagcataggtctaagcaagtccagaagtatgagaccccccaatagctaaacatgaatgggagaaaacttagtttcttctaaaagttgtatttatttttctgattttcttgaatgcaatggaaactgcaacctgacttttagcaagccccaggccatctccttgcatgactttaatcactggatttttcttcccaaaaattaaatcattggatccggagcaaaatgtagattaggcccctcaatgttttttcccttaaattataactgaacccaaactcttcctgtcattaattttaatatcttttttttttttttagacggagtcttgctctgtcgcccaggctggagtgcagtggcacaatctcggctcactgcaacctccgcctcccaggttcaagcaaatctcctgcctcagcctcctgtgtagctgggattacaggcacgcgccaccacgcccggctaatttttttttttttttttttttgtatttttagtagagacaggatttcaccatgttggccagggtggtctcaatcttctgacctcatgatccacccaccttggctcccaaagtgctgggattacaggcacgcgccaccatgcccagctaatttttgttttttgtttggttggtttttgagacggagtttcgctctgttgtccaggctggaatgcagtggtgcgatctcagctcactgcaagctccgcctcccgggttcatgccactctcctgcctcagcctcccgagtagctgggactacaggcgcccaccactgcgtccggttaattttttgtatttttagtatagacggggtttcacgttagccaggatggtctcgatctcctgacctcgtgatccgcccaccttggcctcccaaagtactgggattacaggcgtgaaccaccgtgcccggccttccccagatatcttcaaagcaactgctagtcctgcttttgcacattacactctacattctcattgccccacttaactaaccctccctcatgtccttttctaaagatgtagaagactttgaaatagcataacatttaaatggtcacaaatcacctggcttgaaagtgactaataataggaaaatcagacctcaggactgagttcaatttcaagattctcccactccactttgctaagagggaaacagaaaaacattactccagccacacaaatatgatactgtgcaagtatcccactcttactcattcaaatcctacccattttttcccatcgtggaacagagtcttgccaacttatac

SEQ ID NO: 96012 - DNA, 34305 bp, Homo sapiens
cttacgtggatcattgctgtaccccctcctatgtttccctgtttcttttagacagctcggtacaaattaggtacccaataattgtgtagaggtttgctggttgatttgtgtttatttcatggtagatcatttaccccgggcctctcaatccaaataattccataagtgataattttattctttcctcttctcccagatttacacacctatatttcttagtttctaatttaggttggaagatgagatatttctttgcaccacagatgtctccattcttcagacttgttttcattatagctgacatcagaaatgggcttcgagaaaagcaggagatcctctcgcttcagcctcctgaatagctgggactacaggtgcgtaccaccacacctggctatttttttttgagacgaagtctcgctctgttgcccaagctggagtgcagtggcgcgatctcagctcactgcaacttccccttcccaggttcaagcgattctcctgcctcagcctcctgagtagccaggactgcaggcatgcgtcaccatgcccagctagtttttgtatttttagtagagacagggtgttggccaggctggtttcagactcctgtcttcaggtgatccgcccacctcggcctcccaaagtgctgggattacaggcgtgagctaccgcacccagcctacatacctggctaatttttaaactttttgcagagatggggtcttgcaatgttgcccaggctggttttgaactcctggcctgaagtgatccttctgccttagcctctgaaaatgctgggattacaggtgtgagccactatattctaaacgaactttaaaacttgtaaccaaatgacctcacctacagtaatatctattctcagagtttttgaatctggagttgattgcagataattttttattcatataatgacatttccttaagtgtgtacaatgcttgaacaacttattattgttattattattatttttggaatctctctctgttgcccaggctggaatacggtggtgcagtctcacctcactgcaacatttgcctcccgggttcaagcgattctcctgcctcagcctcctgagtagctgggaccacaggcgcccaccaccatgcctggctaatttttttatttttttagtagagacagggtttcaccattttggccaggctggtctcaaactcctgaccttgtgatccacccgcctcagcctcccaaaatgctggattacaggcataagccaccacacccagctaactttttaaactttttaaaataaattttagagataggatctctatcactcaggctggagtacagtaggggatcatggctcactgcagcctagaaccctgagctcaagcaatcctcctgcctcagactctggagtagctaggactacacgtgcgccactgcaccccgctatttctttttaaaattttttgtagaggcgaagtcttgctatgttgcccaggctggtctcgagcctcttggttcaagcaatcctctgcctcgacctgccaaagtgctgacattacaggcgggagccaccatgcttggcttsaactatttatttatttatttatttatttatttaatttattattttgtttttgaaacacagtcttgctctgtcgcccaggctggagtgcagtggcacaatattggctcacttcaacctccacctcctgggctcaagcgatcctcccacatcagcctctcaagtggctggtactacaggtgtgccacgctcagctaattttctggggtttttgtttgtttgtttgttttctggttttcgtttttgtgtttgtttctttgtttgagatggagtttcactcgtgttgcccaagctggagtgcaatgaygctatctcggctcactgcaacctccacctcccgggttcaagcgattctcctgccccggcctcctgagtagctgggattacaggcatgtgccaccacgcccagctaatttttatttatttattttttttttttggtacttttagtagagacgggtttttaacatgttagccagactggtctggagctcctgacctcaggtgatccacctgcctcagcctctcaaagtgctgggattacaggcgtgacccacttcccctagccagtttgaacaatttaatccaagattttaaaactcaaacattttacttagctgttcaaatatggctattatttaacaaatcatttaatttatatatatggggaaaactattccttagatcattttgaaaattgtgtttcaaaacttgtctgcaaggttactttcaatacgtaagtaaccaagcacattactggaagtggggggaagctaattttgaagtaatcttcaaaaggtcaactttaataagaaatgaataaatgcctaataccaaaggggaaagaacttttcattcttgtgataatgtttacattccattaatgttctgcttcaattgttctaaaatatttttattttaataacataattattaaagatgcctacttagggaattttccaataatccaaatagctatttgaaagaaaactagtaacattcatcaaattacctctttacctacggagaaattattatgttaattctccgtgggatcttaaatgaaaaatgttaaacccagcatccctctaattttaaaaaggcagataacaattgtgagcatttaagaatttccttcatctgtcggtaaaaagcatcagtttgggccgggtgcggtggtttacgcctgtaatcccagcactttgggaggttgaggcgggcggatcacttgaggtcatgagttcgagaccagcctggccaaaatggtgaaactggctctactaaaaatacaaaaaattagctgagcttgatggcgcgcctgtaatcccagctactcaggaggctgagtcaggagaatctcttgaacccggaaggcagaggtcgcagtgagccgagatcacgccctgcactccagcctgggaaacagagtcagactccgtctcaaaaaaaaaaaaaaaagaaaagaaaagcataaatttaaatacatctaaatatctaagtacatccttgtataaatgccttgggggagagatggcaggaattttcacatggttgtgaaattagggcattttaaaggaacagtaaaaacacaggtgtaagtagcttcatctcattcgaatttctttattggtcatgaaaaccaatcaccgtcagcgcgggtaaaggtcctgatctttttttttttttattttttcacccaggctggagtgcagtggcacgacctcggctcactgcaagctccgcctcccgggttcacgccattctcctgcctcagcctcccgagcagctgggacaacaggcgaccgccaccaccctgctaacttttttgtatttttagtagagaccgggcttcaccgtgttaaccaagatggtctcgatctcctgacctcctaatctgcctgcctcggcctcccaaagtgctgggattacaggcgtgagccaccgcgcccggccaaggtccgattttttaataaacaagggaagggtgatgaactgaattcacagcttcagttttttttctcctggcagcagtgcccacatttcaccaggcgagggcagaaaggagagaccgcctcgccggtccacatccagaaaggggcgttcccaagggcagaaagaggccgaccctccacctgcacccgccccaggccctgcgcttgcgttcaaaccgtgacaaaccgtagagtccttgagagccccgggttactcctacatggtcatattcccgcgcgggatgccgaagtggggcagatgaggtccggagctgctgagggatcccgggtccttctgttggtctgagaccctgrggcgggcggaatcccggagaaagccggagggactccccaggggaagcctgggagctgccgttctcctccctgcctgtgcaaacaggaaggggytggtgatgctggctgcgggcctccctcctggactgcgacattgtcaccaaattctataaagacgtcatgcaggaagtgataacgtgtgctgcgacgttctggaagtaactcgaagctaaaaaagaacaaaaaatcaatgaaaaaatgaaactaaagaaacaatgagatgctatgtcaatatccgtagttatggaatggaaaataaatcttacaaagagatgctggagttatctaagaaatttacaccatactggcctgtgtgcatcagacttttctggaggtcatttattttattcactttttttttttttatgaccaaccgaactttctaatattttgggctggagtcccactaaatgaaataccccttttgaatggcacatatgacttttagggatgcatcttagcatttttatttttttatttttattttcaaaacttcattgatgttttggagttttgtttgttttttgtttttgtgttttttggacatggcctcactctgtcgcccaggctggagtgcagaggcacgatctgggctcactgcaacttcaaactcccgggctcaggtgatcctcctgcagcaggacgagccgcagacaaaactcagacaccggattaaagaagggctgtattaggccgggaacttcggcagacttgcaaccgaggtccctgaaaaagaaattcttggcccttttaagggcttgtaactctaagggtctacgtgaaaggttagtgagagatcgagcaagcgtggggaacatgactgggggctacaggcaacagctaacagaacagaaagttttgcaatgcttcctcatacaatgtctggaatttttatttatttaatttattgatttattttttattttttttgagacggagtcttgctctgtcgcccaggctggagtgcggtggcgccatctcgctcactgcaaggtccgcctcctgggtttacaccgttctcctgcctcagcctcctgagtagctgggactacaggcgcccgccacgacgcccggctaatttttttgtagatcaggtgttctcactatgttacccaggctgctttcgatctatagcgatcctgagctcaagcgatcctcctgcctcggcctcccaaagtgttggagttacgggcgtgagccaccgcacccggctaaaaacctgtttgtttgtttgtttgtttagagacggagtcttgccctgtcacccaggctggaatgcagtggcgccatctcgctgactgcatcctccgcctcccggttgcaagtgattctcttgcctcagcctccccagtagctgggattacaggcgtgcgccacaacactcagctaatttttgtatctttagtagagacgggttttcaccaagttggccaggctggtctcgaactcctgaccccgtgatccgcctgccttggcctcccaaagtgctgggattacaggcgtgagccaccgcgcccggcaaactttttgtttaaatcggagattttattctttcagctgtcagyggaaggagcagtcacgtagggttaaacagatggaagccatgacgttaggagagtgagtgaggtcccagcccagccacttgtcactgtgtgacctcggcctggtcactgggcccccgagcttcggtgcggcagggagggtcctggtgatggaacagaaacagggtgcggggcaggggtaatgactcacgcctgtagtcccagcactttgggaggtcgagacgggaggcggggaggagtttgagacccacctgggcaacgtagcgagaccccatctctacaaaaaataaaaattagcccaagagttcaaggctgcagtgagctatgatcgcgcactgcactccagcctgggcgacagagcaagatcttgtttctttttaaaaagaaagaaaataaaggacggaaggatcatggtgtggggaggacttcagccccgggcggttgcccggcgcgcggactctagcggactagggctccccagcagcccggcccgcgagctggcaccgcccggaatcccgcttacgtccagtccggggcggcgcctggaggcggagccgcccgctgggctaaatggggcagaggccgggaggggtgggggttccccgcgccgcagccatggagcagcttcgcgccgccgcccgtctgcagattgttctgggccacctcggccgcccctcggccggggctgtcgtatcctttgggctgcgcggggctcgggctggatccggcgccggcgccgccgcctgagtggtggcccyggtccgggtgsaggcctcggggtcgcacgcttcgcagccccagcgcctcctcgctcagcgccgsgtccccgcctgggtcgcgtctcttccmggagccggggagcgggsaagaggctgcgtcccccgaggacacgcgcggccgccctggggtcsgsgcaattgccgcgtygccctgccctccgggatccctgggggcctctgctcctctctttgtggagacgtcgtttcaccggcggcgcgtgaccccggcagctgtccagagacccagagatgtccaatcacaggcgcacggtgcacaggcgckcagggctgcctggaacsggcccaggcaggcagtgaccgggacctctccggaggggagaggacggtgccctcccgggcaggagctggccaggcaggcgctgccyagggcggcctccctgctggactacggcattgccactgagttatataaagacactatttggggaaggacagcgggtgaggactggcgcggcggcacacgccttgcctgttgtctcrgctcttctgggggccaaggccaggagtccagggttacagtgagccgtgatggccagtgcgttccaaaagagagaaacagagagaaagaaaggataacatgttaattgatgagagtgacattccgaaagtaaccgattaagctaaagaaacaatgcaattctatgtcaactctctgcagttaccggatagaaaagagatctttaaaaggaatttctagggttttgcttttttggtttttttttttttttttgaaacagggcctcactctgtcacccaggctggagtgcagtagtggtacgatctcggctcactcctgggctcaagagatcctcccacctcagcctcctaagtagttgggactacagggttgcgccacgatgccaggcgaatttatgttgttgttgttattgttattrttattattattattattattattttgagacggagtcttgctctgtggccaggctggagtgcagtgccgcaatgtcggcccactgcaacctccgcctcccagattcaagccattcccctgcctcagcctcccaagtgtaatttgtattattattagtagtagtagtagtagcagtagtagtagtagtagtagtagtagtagtagtagtagtagtagtagtagtagtggtagttttttttctgagatggagtctctctctgttgcccaggctggaatgcagtggcctgatctcagctcactgcaatctccacctcccaggttcaagcaattctcctgtcttagcctctccagtagctgggattacaaatgaacgccaccacgcctggctaatttttgtatttttagtagagatggggtttcaccatattggtcaggctggtctcgaaatcccgacctcaggtgatccatccgcctcggcctcccaaagtgctaggattacaaacgtgagccaccgcccccggcctaatttgtatttttagtagagatggggtttcaccatgttggccmggctggtctcgaactcctgagctcaagtaatcctcytgcctcagcctcccaaagtgctggaattacaggcatgagccaccgygcctggccttctatattttactttatttgccttaattcacatcctaggtagctcatyccacttcagggactatttcctctgccagtttccatcctcaacaattccagtaagtagtttgagttttgattttgaaatatattatgtatataaaagtttcttgagtggtaatgaagatataccacataatatgttacctgattagaattttattatacaaatcctctgtttccaggacttattctaattagtgcacttgtggaaaattttggagaccgactaattttctgtatgtattttaagattcagaaagaaggaaaaataccagaaaatacataatccgacatttatttatttatttttaatagagacgggcccttcctatgttgcccaggctggtgttgaactcctgggctaaagcaatcctcctgccttggcctccaaagtgctgggattgcaggctgagccatcacaccagccttataatctgacttttaaaaattcagttaaacatctcatttaaattaacttgtggccgggcaccgtggctcatgcctgtaatcccagcactttgggaggccaaggcaggtggatcacttgaggtcaggagttcgagaccagcctggccaacatctctacaaaccccacctctacaaaatgaaaaaatacaaaaattagctgggcatggtggtgtgcacctataatcccagctactcaggaggctgaagtgggagaatcgcttgaaccttggaagtcaaggttgcagtgagctgagatcacgccactgaactccagcctgggtgatagagccagactccatctcaaaaaacaaaacaaaacaaaacaaattagcttgtaatttggttatatggacatattagctagcatctttggtttatcttaaatcacctttaaaggggaagatcttgaccttcctaaatattctcatacaaccacaattccratcttaaggaataggttgggtgatttgagtttatgggtatgctgtacatttatttggattttgttactttaccttcttggaatgcatcaactggacagttaaaaatatacaatttattgaatttgtttcccatctgaaaaatcatatgtattcattacagaaacatcagagaaatagaaggaattttaaaaaatcatccctaattccatttctaaaggcaatcactgttaaaaattgctttggtgtatttctttgcaggcttttctttttttcatatagtgtcttggttttacataattgtaataatattttattataataagcattgtccatactattttttattttattatattttattatattttattttattttgagaccgagtctggctctgtcgcccaggctggagtgcagtggtgccatcttgcttcactgcaagctccgcctcccgggttcacgccattctcctgcctcagcctcyccagtagctggactacaggcgccagacaccatgccgggctaattttttgcatttttagtagaggcgggtttcaccgtgttagccaggatggtcycrayctgacctcgtgatccgcccrcctcagcctcccaaagctagsattacaggcatgagccactgtgcccgccatccatactattatatggccttaatttttaatgtctgagtcatattccactgagtgaacatagtgtcactagttaatttttcttccactaatgcacttttttttttttttttttttctgagayggagccttgctctgtcacccaggctggagtgcactggtgcaatcctggctcactgcaatctccacccccacaggttctagcgattctcctgcctcatcctcttgagtagctgggattacaggcacgctaatttttgtatttttagtagagatggggtttcatcatgtgagtcaggctggtctcgaactcccgacctcaggtgatccacctgcctcagcctcccaaaaagctgggattacaggcatgagccactgtgyccggcccactaatgcacttgttttggtgacataaagcgtaagttttcagattatttccttggtcttagaaatgctgaattgaagagcatgaacgtttcytaggttcttgtttttgtctttgtttttgttttttgagacggagtctggctctgtcgcccaggctggagtgcagtgccatgatcagagctcactgcaacctccgcctcccaagttcaagcgattttcctgcctcarcctcccgggtagctgggattacaggtgcccactaccatgcctggctaaactttgtgttttcagtaaacatggggtttcaccatgttggtcaggttcgtctcagactcctgacctcaggcgatccacctgcctcggcctcccaaagtgctgggattataggcatgagcccccacgcctagcctcaggttcttgatacatatttttaggatgtaatttaaattttttttttttttttgagacagggtctcactctgtcgcccatgctggagtggagtggcacaaccagtattttttgtagagacagggtttcatcatgttgcctgggctagtctcaaactcctgacctcaagtgatccacttgcctcggcccgctaaagtgctagtattagaggtgtgagccattgtgcctagcctgtaatttaaaaatgtaacttattttgggattctttttctcctttaggtatactctggataataaygttctaaccctggaacagagaaaattttatgaagaaaatgggtttctagtaatcaaaaatcttgtacctgatgccgatattcaacgctttcggtacagtaacactatttgttattttacaatagtatgtattgtgtgcatgtaatgagaatacaaggtggattcgctcctggctttacagatgttttttaatgatttggtttgttgggaagtgtttagaagcatgggctctggtgccagactggctttttattttttrtagagaaaggktctcactctgttgtgtaggctgagtgcagtggtgcgatcatagcttactgcggcctcaagttcctgggctcaagcaatcctcttgcctcagcctcctgagtagctgggaccacagttgtgcaccaccatacccagctaattttttatttctttgtttttagagacagggagtctcactatgttgcccaggctggtcttgaactcctggcctcaccctcctgagttgctgggattacagtcgggagccaccatgcctgggcttcagtctcagctccaccacttaatatcatgtgtcctggggcaatttacttcacatcccatgcctctgtttcctcatctgtaaaatggggataataatagcacttatgtcctagtgttgttaytaggactaaatacggtgaaatatatggaaaccactttgaagagagctgggcacatggtaagtgttacagaaatgtttgctgttattattattacaatgtaaccaaattataaaaagacttccctactggtatgctaaactagggaataatttaattctgggaatggattctagccagacagtttctcctccctttcattggaattattctacctcaagctggaggccaacttagtgcagagaaaccacccctcaagtctgcaaccctttccacagaggagggcagggcaggtgcttggagccagcggtaacgacatcatttgcaaattaaattttctaggaatgagtttgaaaaaatctgcagaaaggaggtgaaaccattaggattaacagtaatgagagatgtgaccatttcgaaatccgaatatgctccaagtgagaagatgatcaygaaggtccaggatttccaggaagataaggagctcttcagatactgcactctccccgaggtcagagaccacccttgctttgcgtcggcttaattgccagtgtgtatgtctgcctgtaaaacccgctgatttggccgggcgcagtggctcactcctgtaatccgagcactgtgggaggctgaggcaggtggatcgcttgakcccaggaaccactgctcttagagctggatatggaaaggagttgaattgagtaaaatcagtgggttttattttgttttcttttctggagacagagtctcgctctgttgcccacgctggagtgcagtggtgcgatctcggctcactgcaacctcttcctcccaggttcaagtgattatcctgccycagcctcccaagtagctaggtttacaggtgcctgccacyacacctggctaatttttstatttttagtagakamagggtttcaccatcttggccaggctggtctcgaacttctgacctcgtgatccaccckcctcggcctcccaaagtgctgggattacaggcatgagtcactgcgcctggccaatgtcctacatttctgaagaatgggaccagtatctggtggtctatgccatgattttaggaggtataaattattttaatagatatttatttttaaatgtattggaaaaaaactcaacagtctaccaaactcatgatttcaaaaatgttgttaattaggacaagattaaataaaaaggccaggcgaagtggcactttggaaggctgaaacaggagaatcacttgaggccaggtgttcaagaccagtctggcaacatagtgagaccattgtctatattggaaaaaaagaaaaaaacaaagattgaataagagaagtgagctaactgccgggcgcggtggctcatgcctgtaatcccagcactttgggaggccgaggygggcagatcacgaggtcagaagtttgagaccagcctgagacacatggtgaaacccagtctctactaaaaatacaaaaattagctgggcatggtggcgggcgcctgtaatcccaactactcagtaggctgaggcaggagaatcgcttaaacccgggaggcagaggttgcagtgagccgagatcatgtcattgcacctagcctgggcaacagagcgagactccatctcaaaaaaaacaaaaacaaaaacaaaaaacaaaaaacaagtgagctaactaagggtagggaaatcattggctaaataacagtacaagttatgtcagaagttgtgaggatggctcttgaatggctggcatttagaaaatcccagcctagatgaatacaaaaaaataccaggctttataaaaagcaagtgtgtgcctgactgctaggcttttaataacctttccagggtttcatactcaaattgccaatattccttatacacaagagatcaaaaagtgaggaagcagtagaaggtggcttattttttggagtcttttttttgcagaatcaaaatttgaatatcatgggttgttttattttcttcttcttcttcttttttttttttttttgagacagagtctcactcttgttgcccaggctggactgcagtggtatgatctcagctcactgcaacctctgcctcctgggttcaagtgattctcctgcctcagcttcccaagtagctgggattaccgacgtgtgccaccatgcccggcgaatttttgtatttttagtagagatatggttttgccatgttggccaagctggtttcgaactcctgacctcaagtaatccgcccgcctcggccacccaaagtgctaggattacaggtgtgcgctaacgcacccgacctcagtgttgagccctttctgctttttccctctccgttgctgggttctgtacacaaggtagcggcagcccagctcccaggccccacgactaaaccagctctccctgtcacggttccccatgttagccttttcttcataatgcagtgtccctcggccactctgacccatgtcattactgggttaacatttttcatctaackcctgggacctgctttgcttgttcactcttgcttccccatttcccgtcacctcctggttcccagatctcagtaatgagttgtcaagtgccaagcgtccccgattgtcaaatgtcctccaagccaccattctrctttcttccgggctattcatgacagctgtgaattgtatgggactcttcgtatgcagaggctccaatgaggaagaggaaactgccctcccactgagcaaccttctgttgcttgggttgacaagaaagctatattaatatctcatcggaactcctatgtttcttgtagagaaaaaatggtttcattmccagctagctcagaaaaagcccatttcattccgtgttatagatttagaatgatttccaatggctgggtttttcatgcyttgtttgcaatgttgtgaaataccgcttggttcttaaactattgccttcttggttcttgtgtggatagctactgtactttgtaccagttgtcaatacttctgatttcccacaaggtttgtttttgttttttttttgctttcttagattctgaaatatgtggagtkcttcactggacctaatattatggccatgcacacaatgttgataaacaaacctccagattctggtaattgtaagggagaagaaaaaaaaatggtttcattaaaatgtgtaaggttggctgggtgcagtaactcatgcctgtaatcccagcattttaggagaccaagggaggaagatctctgaggccaggagtttgagagtggcctgggcaacatagtgaggctctgtctctaaaaataaaatttaaaaatatccaggcatggtggtatgcacytgtagtccctgctattggaaggctgaggtgggaggatcacttgagcccaggagttgaaggctgcagtgaacctataatggcatgctctccagcctgcgtgacacagtgagaccctatctctacataataaataaaacaaaacaaaacaaaataataaaatagctgatgtctaactgtaatcatgtgtacaactgtcaaactttggataaggaagtcttaaaataacttacactataacaacagtgaaatgtggtaattatttcagatattaactgtaggactgttgctgaattttcagatgactggctccccaaaaatgcagtttaaccgacataactgttcatatatcaaaggttcctgccattcgacgtctctaagcttgatcagctctttttagctgtgatagtgtggattcttgcattcctgataggaagacattattattactaacacaattaaaattgttactatgagtcacaaactatagtggtctttttttttttttttttttttttgagayggagttttgctcttgttgcccaggctggagtgcgatagcgcgatcttggctcactgcaacccccacctcccaggttcaaacaattcctgattctcctgcctcagtctcccaagtaactgggattacaggcatgtgccaccaagcctggctaatttttgtatttttagtagagacagggtttcgccatgttggtcaggctggtctcgaactcctgacttcagatgatccacctgccttggcctcccaaagtgctgggattacaggtgtgagccaccgcgcccagcctatagttgtctttaaaatgtcttgtgcttgctaaaatgtagaatctaagacctcattggcagacagactgattgagaaatataacccaggtttctgtattttaataaccttcctcaagctgggcgtggatgtgcacctgtggtcccaactactcaggaggctgcggggggaggatcgctggagcccaggagttcaagtccagagattgtagtgcagatcacttggactacactgggaaattcctctatgcctgcagtaaaaatcagccatgagagagtcccctatcctttctgccttttcttccttctgatctgcaggaggggtttatgtgatagaaggcagcttagcattaccaggtctctccctccytgaggagagcaggtgttcgggagccacactcagggagcaaaccaggggaaaatgtcagygtggtcwtgggcactccgactggacatggaatgactatagttgtggggggtgaggacctcttagataactttttttatttttattttttttgaaatggagtcttgctctgttgcccaggctggagtgcagtggctcaatctcggcttactgcaacctctgcctctggggtttgagtgattctcctgcctcatcctcctgaatagctgggattacaggtgcccaccaccacacccagctaatttttttttttttttttttttttttggtatttttagtagagacagggtttcaccatgttggtcaggctggtctcgaactcctgacctcaggcaatctacccggctcagcctcccaaagtgctgggattaccggcgtgagccaccgtgcccgtcctgttttgtgtgtttttttttctttttcttttctttttttttttttttgagacagagtctcactctgtcgcctaggctggagtgcagtggtgcgatcttgactcactgcaacctgctgcctcctgggttcaagcgattctcctgcctcagccctcagccttccaagtagctgggagtactggtgtgcaccaccatgcccagttaatttttgtatttttgtagagacgaggtttcatcatgttggccaggctggtctcaaattcctgacctcaagagagctgcctgcctcagcctcccaaggtgctgggattacaggtgtgagccactacacgtggcttagaactttttttgacatcagccacttcgaaggggatttcaaacttgactccatatcactctcttcaatgtaattaatgcaactggtttttgaacatgcattactgcatgctaggtactgtgcccaatccagggtcacaaaagaataaagcacaaggccgggcgtggtggctcacgcctggaatcccagcactttgggaggccgaggygggcggatcacgaggtcaggagatcaagaycatcctggctaacacagtgaaacccmgtctctactaaaaatacaaaaaattagccgggcgtggtggcgggcgcctgtagtcccagctactcgggagrctgaggcaggagaatggcgtgaacctgggaggcggagcttgcagtgagccgagatcgcgtcactgcactccagcctgggcagcagaacaagactccgtctcaaaaaacaataacaacaaagaataaagcacaacagagatgaggatgttataccgcttgctggaaaatagtgtgcataagtacttagctaccagcaacccggaagaagggagtgcgggatttgaagatgtggagccagtgtgttgatttccaatttggtgtttatctctccggggctgattttctctagcattatttcatttgtttggttcttctggggacaggtcattgttttttcaggcaaaggataagaattctgagaccagcttttttttttttttttttttttttttggttgggggtgggggacagggactcgctctctgtcacccaggctgtaatgcagcagtgcaatcatagctcactgcagcctcgacctccaggctcaggtgatcctcccacctcagcctcccaagtagctgtgactacaggtgcatgccaccacacccggctagttgtttttgttgttttgttttgttttgttgttttgttttctgtagaaacggagtctcactgtgtttcccgggatggttttgaactcccaggctcaagccatccatctgcctcagcctcccactttgggatatatttttatatcccaaagtgctggggttacaggcgtgagccactgcactcggcctcgagtatcctttagtagcaggttttcttttcaggcaagaagacgtcccgtcacyccctgcaccaggacctgcactatttccccttcaggcccagcgatctcatcgtttgcgccyggacggcgatgsagcacwtcagccggaacaacrgctgtctggttgtgctcccaggcacrcacaagggctccctgaagcccyacgattaccccaagtgggaggtagktctgcccggcggctgagtcttgatccgaatctccttcgcagtttctgtttcacatcagtacctmtaaagagtttacaaatgagatggcatttcctttctgagcaaaacattgtcctaagatttgcagtgaggatcagagaaagttcaaggatgtcagagaaaacattcatcacacctattttcaacactttttttgtttgtttgtttttgagacagggtcttgctcaactcactgcaacctccaactcccaggttcaagccatcctcccgcctcagtcgccctagtagctgggactacgggtgtgcaccaccacgcccggctaatttttgtggttttagtaaagacagggttttgccatgttggccaggctggtcttgaactcctgacctcaggtgatctgttcacctcggcctccctaagtgctgggattaaaggcatgagccactgtacctgcccttaacacgtgtttgaaagccagccaaggtggggagcttgggtaggtactgtataggatccgagattgtaagtcctagctgcagaggtaagacataaacccttcgaccccagatgtgtgtggtagacaccaagtcagtcttactcactaactgatggctctcagagtaaggaaggagagattgtctccttgcaactgcagagaccagcaaaggatctggggaggctggtgtctgacctgagccttgcaggacagtgtacaatgtcccatagggaagagtcgatataggaaggcacaaggtcaagggcaagcctgaacttgaccaaagaacaggaaagacccagggagcttgcagtctagatgggctgggcgctgggggtgtattttggggagcagcagaggaggtgagcccaaaaatgtacattaggaccagattagaaaagactgttttactaacaagtctgcagtttatttgggggaagaatgggaactttttagttcaaacttttaggaagatcgaagaccctttttgtttttttgttgkgttttgttttgttttgtttttgaggagtctcactctgtcaccaggctagagtgtaatggcacgttctcggctcactgcaacctctgcctcctgggttcaggtgattctcctgcctcagactcccgagtagctgggattataggcgygcaccaccacacccagctaatttttgtatttttagtagagacgggatttcactatgttggccaggatggtcctgatctctttaactcgtgatccgcccacctctgcmtcccaaagtgctaggattacaggcgtgagccaccacacctggctgaagagcttttaatyaaaaaacaaacaattaaacaaataaacagtttcattgaggtataattgtcatgtaaattgtacatattttgcatgtataatttgatcattttccacacacacatacctgtgaaatcatcaccacaatcaagatactccatccttctccctgctctaggcaaccactgagctgctttctgttactgcaggttagtttgcattttctaaaatgtcatagacatgtaatcacatagtatagatttttttgtcccgttctggcttccttcactcagtgtagtgattttgaggttcattgatgctgttgtgtatgatagtagttttttgttgttttttttttttttttgagacagagtctcactctgtcaccaggctggagtgcagtggcacgatcttggctcactgcaacctccgactcccttgttccagcaattttcctgcctcagcctcccgagtagctgggactacaggcacaagccaccatgctcagctaatttttatatttttagtagagacgagttttcactatgttggccaggatggtctcgatctcctgacttcgtgatctgcctgcctcggcctcccaaagtgctgggctcaccgcgcctggccaacagtagttctttcccttcccttgctgagtagtattccattgcatggctgcaccgtgaaccatggtttgttcatccattcagctgctgatgcttggaaatgttaaatgcatttgagctcatgagtgatgggatcaaatcggctcttcaaggacagtaatgtcacgttctggtgcaggacgcgttrgaggtataggcatctagaagcaaagaaaccagagagatgactattaacgcgttaggtctaaggtgaaaagaccctgtgggagccaaagtgggaggatcgcttgagcccaggagttcaggaccagcctgggcaacacggtgaggtctcatttctaaaaataataataataataattagctgggcatggtggcgcatgcatgtagtcccagctattccagaggctgaggcaggaggattacttgagcccaggaattcgaggctgcagtgggctatgttggtgccactgcactccagcctgggtgacagagcaagttcccgtatcaaaagaaaaagaaaagatcctgggctgggcgcagtggctcatgcctgtaatcctagcacttagggaggctgaggtgggcggatcacytgaggtcrggagttcgagaccagcctgaccaacatggagcaaccctgtctctactaaaaatacaaaatcagcctggtgtggtggcgtgcgcctgtagtcccagctactcaggaggctgaggcaggagaatagcttaaacccaggaggtggagtttgcagtgagctgagatcgcgccactgcattccagcctgggcaacaaagcaagactccatctcaaaaaaaaaaaaaaaagaaaagaawagatcctggaatcccatgatgctgcgaatggaaagagcccccattgttaaagcagggagaatgagttgtagttcrataggaaatgaggaacatggttttaggaactcctaactcgtctggacacagtggctcacgcctataatcttaacactttgggaggccgtggcgggtggatcacttgaggtcaggagtttgagaccagcatggccaagatagtgaagccctatttctactaaaaatacaaaaattagccaggcatggtggtgtgtgcctgtactcccagctattcgggaggctgaggtaggagaattgcctgaacctgggagatggaggttgcagtgagctgagatcgcaccactgcactccagcctgggcgacagagcaagactccatctcagtaataacaataataataataatagaacgtctcagatttcttgcaccaataattagtgtcaaatgaaaatatgtgagtgtctggatcctgatataaaaccatttaatgtgaaactcatcagtgaagccaaggtttaaagtttggtgcatgcaactgcagtgggctttggctgacagaaggcaaagggaaaagtttgcagggcttccagagcgtgtggagtctcagataccctgctcagatkcagagtgggaggtatgattagcttagtgtgggtcacacattcaccctggccaggagagaagggctctgggtcagagtctcagcactgtctaagagggatgtcgtcattcccagaaggaactggggatgctcttaggaagaggaatgggctgcttcccttaccctgactcctaaggtgcttctcatgtcaatttctttaataaagacataaccgcattacctaaagtagcaactaatttgggaaatagttacaaacaaacacagtgttttaatttactattctttcattattctggatgtaacataagtgcctttgagctcagaaaaattgagcattttctcccycctattttggggaaatagcttctcagagacactcctgagtaagagatgaaggatttatttaaagttctgggcgaggaggagaacacactgggaacactcacagtttcaggctggaaatgcccaagagataggtggttgcctgcattaaccacaaaaggcaaagctaagctagatcttcatgtataatgcagtcatgaagggcaggtggaaattccacactgttcatttcctccaaaaaatcagtgattttaatatcaacatgtgacttctttttttttattaccattatttttcgagacagagtcttgctctgttgtccaggctggagggcagtggtgtgatcatggctcactggaacctccccctcccggctcaatcgatcctcccacctcagcctcctgagtagctgggaccacaggctggcaccaccacgcccagctaatttttgcagtttttgtagagatggggttttgccatgttgcccaggctgatctcaaactcctgagcataagcarttytcccaacttggcctcccaaagagatgggattacaggcatgaaccaccatgcccggccaaaatgtgactcttaaaaaccagatatctgagaggcttttgtatactgaaaaaaatgtaagcatttaatttagacatttatttctcttgggagaragaaatgctttctttccctgatgtttgctttccctgatgaaccattgacaatgtttttaattatggtactccctcaaatgtagacttcacttgcctcttgttctaggggggagttaacaaaatgttccacgggatccaggactacgaggaaaacaaggcccrggtgcacctggtgatggagaagggcgacactgtttycttccatcctttgctcatccacggatctggtcagaataaaacccagggattcyrgaaggtaagcattcacattgctgcacctgctgcagaagtgtgggttagaaacaaaaattgtattcaattcattgaattcaaattaattgaataaaattttaattaaattgcattaacattttaaagatttgtggcttttaaccaacctggactttagtccagyttatttaccaggaaatatatttgcttaccttgggctttctgtgctcttatcagtaagaagccaggtgacctcaggatcctaaccttgtcaatattgattatgggccgggcgcggtggctcatgcctataatcccagcactttgggaggccaagrcgggtggatcacgaggtcaggagatcgagactatcctggctaacacagtgaaaccccatctctactaaaaatacaaaaaattagctgggcgaggtggcgggcgcctgtagtcccagctactcgggaggctgaggcaggagaatggcgtgaaccccagggggtggagtctgcagtgagccgagatcgcgccactgcactccagcctgggcgacagcgagactccgtctcaaaaaaaaaaaaaaaaaattgattatgaaagccaggtgcagtggctcatgcctgtaattccagcacttccggaggctgaggcgggaggatcacttgggaccaagagctctagaccagtctgggcaacatggcgagaccccacttctactaaaaaagaaaaaatcactgttgtctcctgaggccatgggttaggggccaaatttcgtcttccattcattcatatttccaccagcctcatcagggtcaggattagggtgggacaagttggggcactctctccaggggtaaaatgtaaggggatgccaaaaaaagactctgcaatcgagtttagtaacattttaatgcgaaatttaaaaaaatcaaaattaatgcaaaatacccaatgtattggctgcgcacaatgccaaaagtttaaataaaagacactattggaccccacactagcacaaccttcagagctgtgcaagtagcgaggtgcargcacaacgacacaaatcatgttgtgggttttaatatatagacttggcaattttccttttttyttttttttttttttttgaggtggagtctcactctgttgcccaggctggattgcagtgatgcaatctcagctgactgcaaccttggcctcccaggttcaagcaattctcctgcctcagcctcgtgagtagctgagactacaggcacacgccactatgcccagctaatttttgtattttttagtagagatggggtttccccaggttggccaatctggtctcgaactcctggccttgagtgatcgtctcaccttggcctcccaaaatgctaggatgacagatgtgagccatctcgcctggcccaatgttttttaatgcttttattttaaaacattttattatttgtttatatatttatttgagacagcatcttgctcttttgcccaggctggagtgcagtgstgcaatcatagctcactgcatcttggaacactgaggctcaagccatcctcccacctcaacctctcaagtagctgggactacaggcatgcatgaccacacctggctaattttattttttcattttttgtacagacatggtcttgctatgttgcccaggcgagtcttgaactcctggcctcaagtgatcctcctgccttggcctcccagagtactggaattacaggcatgagccaccgtgcccaggcttaatgactttaatgttctgggaaaatattactataatttcataaagatacagatataggggtgcgtgttttccctttgccttgggctctgttacagtgccgtatggcaccagggcttacagaggcaatggagtttgtgactccactccctagaaatttgttgtttggggcaaagtagaaagtctttctgacaagtgtgatcacttgtgacaaaaaaggtaagttttaacgattgccttgcagcttagatctgtttataactttttctaaaatagggagaaccaagcaatttcatccttaccctcagaaggaagcaagaggggtaatatatgtcactggtattggcttttaaatgtccttttgatttgagagaaggtgtctgcattattttctatctcaaggtatttttagttcttttcataatctattgccactgaaataacaattcatcccaaattggaccaggtaactaacttatgagataaactgccgtggaatgcagtccttcttaagactttgggatattcattcattaggaaaataaaatgctaaaaaaaaaaaaaactaaatacctcttactgacataattccattccctctcccatatatacctttcaaaaatacatgtcacatctggttaacgatcttttgaaatttctcaattaacttctagctggaaacaaaaacaggcttagttacaaagagattgacacaggatgcaatggacctgactttccacttagaaatcaaatactgagtgaaataaatgactttctaaaagaaagactccctgcttggtcactggtattcatgggatgtttttctccaatatcaatttgttcactttgcacaggcaatttcctgccatttcgccagtgccgattgccactacattgacgtgaagggcaccagtcaagaaaacatcgagaaggaagttgtaggaatagcacataaattctttggagctgaaaatagcgtgaacttgaaggtatgtttgtatacaatagcaaggtaaaaatctcaggtttttcttttcttcagatgcttcataattctcatacctagtttatttgacagtatatagtgcttgggtttagattcattttagggacatcgctgagcccccaccaaaaatgacaatggaatttccatttacacttgtgcccccgtgcaggaggcttgagaacttcctgctgcttctttatgtcttggggctgtccagaggtgtgctggctgtcctgtttcacacaggacagtaaaggaaaacaaaactacagattgagatgagagaaaatcaaagacaaaaccttgccttctggctgggcatggtggctcatgcctgtaaatcccaacactttgggaagccaaagcaggagaatcacttgagctcaggagttggagaccagcctgagaaacacagtgagactccatctctactaaaaaagaaataaaaataaaaattagtcaggttgggtggagcatagctgtagtcccagctactcgaaggctgagttgaaaggctcacttggagcttgaggtcaaggctgcagtgagctgattgcactactgcactccagcctgggtgacagagtgagaccatgtgtcaaaaaaaaagccttctgaagggatagaaggaaagttataggtttgagatccaatcataggccatgtttattaatatagaatagagtatttatggctgggcgaggtggctcacgcctgtaatcccagcactttgggaggccaaagcaggcagatcacaaggtcaggagatcgagaccttcctggccaacatggtgaaaccccgtctctactaaaaatacaaaaattagctgggtctggtggcacatgcctgtagtcccagctactcgggaggctgaggcaggagaatggtgtgaacccaggaggcggagcttgcagtgagccgagatcatgccactgcactccagcctgggcgacagagcgagactctgtctcaacaacaacaaaagaaggaatcttgcttctccctttagaacctggaaatgtgtcgcatctctgaaaatgctctgattttgcatttgcaggtcctagaaattcttgtccttcctcactttttgttcagtrcctaaaatgcctatacattttgtcaactggagctttgagctaacatcctaaattttaagggagaacaaatatatgtacattatgtttgaggtttgtcaaggttgtgctaaatgaatacctcccacatttagtttaattactctgtaagttatatttagaataacaatattaacctctgctacatagttctctgtaaagtacaaaagcacattcatattcattttcttattttcttcaccaaaacccggtggggcagtrtaaactccatgctgtcaatgacaagaaaacaaatcccagaggctgatctaagctagctaagcgacaaagcttgattttagagtcaggtcaaatctgaaaattattctttccaccataccttgctgtttgctcaaaaataaacaagaaccaagaaataagaacatctaaattattttattaagggcagagggggaagaaacccaccaaacaaagcagtaatccttgataccatgttcactattatcatctcatcaagagtagaacactcaaaaaggctcagacaagtaacataagagtcatcaggccaggtgcagtggctcactcctgtaatcccagcactttgggtgtttgaggcgggtggatcacctgaggtcaggagtttgagaccagccttaccaacatggtgaaaccccgtctctactaaaaatataaaattagccgggtgtggtggcacatgcctctaatcctagctacttgggaggctgaggcaggagaatcatttgaacccaggaggcagaggttgcaatgagccaagatggtaccattgcactccagcctgggcaacaagagcaaaattccgtctcaaaaaaaaaaattatgcagaaaaatggcagtgaactgtttgttctgtaacccgacatgacattgacccagttatgttagctggcaccaacaaatatcctgaataaaacagaactgacagcagctgggggacccactgacttaatttagttaacactgttttagaagtyggttaagtagaccaggagtggtggctcatacctgtaatcccagcacttgggaggctttgcaaggccaaggcggacagatcacttgaggccaggagtttgagatcagtctggccartgtagcgaaaccctgtctctactgaaaatacaaaaagttagctgggcgtggtggtgcacacctgtaatcccagctactcgggaggctgaggcaggagagtcgcttgaacccgggaggcagaggttgcagtgagccgctgcactccagcctgggcaatggggtgagactgtgtccccaraaaatttttaaaaaagagttgagtaagtagtttaagttgagttgttttgtttactaatgaatataacttacagggattattttccctatgtaacctttcatagaagctagaaatcaattttgtgttatggtgaaattgaaggtwaatggagggcagattgaagtgttccataaacccactctgtttgatattatttccaggatatttggatgtttcgagctcgacttgtgaaaggagaaagaaccaatctttgaaatagccatctgctataactctttcaacagaaaaccaaaaccaaacgaaatgtctaaggaaaatrttttcttaatgagatgatgtaaccttttctatcacttgttaaaagcagaaaacatgtatcaggtacttaattgcatagagttagttttgcagcacaatggtgttgctttaatggaaaaaaaaacagtaaaagtgaaatattactgttttaaggaaaactaatttagggtggcagccaataaaggtggttggtgtctaatttaagtgttaaatcaatttctttcattcagttagctctttacccaagaagaagtgaatgatttggagcttagggtatgttttgtatcccctttctgataaacccattccctaccaattttatgtcataagagatttttttcccccaaatctagaacaatgtataatacattcacatctagtcaagggcataggaacggtgtcatggagtccaaataaagtggatattcctgctcggacaagggctttctcctgtgatttcttcaacccaaccattcccttaacaagaagacttgttctttccagtcctttcctctgttcctgaagaatgaagacaagggccaggtgcagtggctcacgcctgtaatcctagcactttgggaggccgaggtgggtggatcacctgaggtcaggagttcaagaccagcctggccaacatggcaaaaccccatctctccaaaaatacaaaaaaaaaaaaaaaaaatagccgagcgtggtggcatgcacctgtaatcccagctactcaggaggctgaggcagaagaattacttgaacctgggaggcagaggttgcagtgagctgagatcacaccactgcactccagcttgggtgacagagcaagaccctgtctcaaaaaaaaaaaaaaaggaatgaaaaataaataaataaaaagaacgaagatgagggtgacttcatttgatgtatcttattgggtagggctgctggaaactttccacatttatgaatgaagcctaacctccttcaagctatagggaactttttagatacttttccctggatttggagtgagcatggactgaacaaacttatttcaagacagcaccatattttcggtaccagctgagggcagcaaggagacatagtccttatttttacaaattttagttagggctttagtaagaaagaaataacagagtacctttcttgtcattctgctaagcacaagttttcctaaatctagtgttgccatgagtgccgttttgtttgtgaggacagccaagtgaagctcatctcccactgggaactggagaaggcagatcactgacagaatctaaggaaattagattatgggatgattggaaataaaacgtaataaaggaatgcctgtgtaaacaacatgtggggagccctgctttgttatggaataaactctaaattgtttcaaatttaaagtgaatatgaaaaactaaatttcagtaggaatattgaagagcaatttgttatttcctgtgtgcctttgtgagtgaaaaccaactggttgccatcaggaaacattcatttcccatctgatccatgtcccttttgtccattagtgcatgtaagaaatattcaagcacccactctttttttttttttttaatttttttgaagacacggtcttgctctgtcacccaggctggagtgctgtggtgtgatctcagctcacagcaaactctgcctcccaggttccagtgattctcccgcctcagcctcccgagtagctgggactaaaggtgcacgccaccacacccagctaatttttgtagttttagtagagacgaggtttcaccatgttggccaggctggtctcaaactcctggcctcaagtgatccacccacctaggcctcccaaagtgctgcgattacaggcgtgagccaccgcgcccggctaaaatatccaagcacctactctatgaagtgggactagatgtcaggatgaggtagggtgcctcaaactgtccgcgcggacctgtcctgtgaaaggtggcagtcagggttggctggaaaatgaagagtcagggaaggaattccaccagatttcatcagactgaggggaggtgggaggggatttgtcctgggctcatgtccatttcaccaaagtctagtctaaaaggactttataaggtgctcgaacaaatcacaaaacaaaacaaattgcaaggatcctcttctgtgaattttgagactaatagcttgtgaaaactggaggcctttgctccttgtgtgtgcttggagcctccccctcccccactcttttttctatggtttttttttggggggaggagttgtttatttgtttgttttgttttgttttgtttttgagacagagtcttgctctgcacccaggctggagtgcagtgatgcgatctcggctcactgcaagctccgcctcccgggttcacgccattctccttcctcagcctcccgagtagctgggactacaggcgccmgccaccacgcccggctaatttttttttattgttagtagagacggggtttcaccatgttagccaggatggtcttgatctcctgacctcatgatccgcccgcctcggcctcccaaagtgctgcgattacaggcgtgagccactgcacccggcctacttttttttttttttttttttaacaggtggagtcttacttttttgtgtaggctagtctcaaacttttgacttcagcaatcctctcacctctgcctcccaaagtgctgagattacagctgtgagccactatgcctggccttattttttactatctaatagaatagtggtatatatgattactgtaatttgcatttatttgatcataatgagatagaggagttttcatatcgctatgggcgttctgtggccgacttgctgaatgctggtctcttaggcccaagaggataccttgtggtagaaaagccagagaacagatttcaactagccgtatatagctggaatgtctggagagagttagcttatttttccatctcattcatttcaagcctgaagccgcctgatgtcaagtctgaagcccattgaaggcctttgttaggtgtcctggaagggaggggaagaaaaagccaagggtttgtacctgatgatgttcaaaatatgtaacagagggaccatcagtcagataccatgagtacaggaatgtggcacttcagttgataacagcattgtcctgagcaaggcaggtcccacaggtggcccctgctcagcatatttggaagagggttgagaaggttcccacccatgtctgagattccatcactcaccatgagtttgaggaccaagcctctttctggacattctctcttttttttttttttttttttttttgagacggattctcgctctgttgcccaggctggagtgcagtggtgtaatcttgactcactgcaagctccgcctcccgggttcaagcgattctcctgcctcagccaacactgtcttttaagatgcaagtacctctggaatgacagcactggatcctaatatcttcgtgaagacatttcttctgcatccagagaagaaataaagcagcctttgggaacaagggaaggatgaaaagtgggtgcagaaaagcaaaagggaagagggtcacgggagctgtaggacagcgccgcaaagtatcctcagctgaggttggctttccccagagctggcgctgagcttgggagcatggctgctacatccgctgccaacacattgatagactcttaggccaggcgcggtggctcacgcctaaaatcccagcactttgggaggccaaggagggcggatcacgaggtcaggagatcgagaccatcctggctatcacggtgaaaccccgtctctactaaaaatacaaaaaattagccgggcgtggtggcgggcgcctgtagtcccaggtactcgggaggctgaggcaggagaatggcgtgaacctgggaggcggaggttgcggtgagccgagatcgcgtcactgcactccagcctgggcgacagagcgagactccgtctcaaaaaaaaaaaaaaaaaaaaaaaaaggaaggactgtcatggctggtaagtagccttcatcttgagctcctcagtccatgaagtgctgcccctccttcccacctgctccagcccctctcctgagattcctcccctccctccccaagtccagcaacccaactggtagtgccaggctgcccaggagcctccaggacctgtcctggcgttgtagacacttgctctaagcctcactggccgttctacattttattttgttttgttttattttattttgagacggagtcttgctctgtcacccaggctggagagcaatggtgcaatcttggcttactgcaacctctgcctcccgggttcaagcaattctcctgcctcagcctcccgagtagctgggattactggtgcgtgccaccacacctggctaatttttgtatttttagtagagacggggttttaccatgttggccgggctggtcttgaactcctgacatcaagtgatccaccggccttggcctcccaaagtgctgggattasaggcgtgagccaccacgcccaacccattctaaattttaatatcactgcttccaagagtggtctcattgatcataaaacaaatcaaaagagattctgctacgtattcaaacagttgttggcaaatgactgcgtcagtcatctaaaccatcttttaatcccagataatttcccctccccttctctgccactctgggacaggaattgatgatcggatatttcttttctctccctgccctttattttttttagaaacaggctctcactctgtcacccaggctggtgtgatcatagctcactgcagccttgacctctttggctcaagctagcctcccacctcagcctcctgagtagctgggaccacagatgcacaccaccatgctcagctaattttgtttatttacttatttttttgtagagacagggtctccctatgctgcccaggctggtctcaaacttctgggctcaagcgatcctcctgcctcagcctcccaaagtgctgggattacaggcatgagctacccacacggtttttgcttttttattgttttattttatttttattatttccttactttctggcactacaaggtgctccaggattattttgtatcttcctgccctttgtcctataatgagccatttctccaaagagccctggttctacctgttgggaactgttggaaaccaagatctgggcttgagatgcactctcaatgtgcattgttaccaagctcgtacagtgattcttaaagcgctccaaaactggcgatcccctggcccagcatctctggaaagtcacagtcattcagagacaatagtgctctggcctggggaggtttatatttgctccgagagattccagagtcttgcttgggcctctgaaaatttcagacctaccttcattcttcttcaggcttggcatttcttggaacacggtgtttgttggggaggcaaagaaacaggactttttgcattgatttaattttgatttgaagcacatgaaatttactactcgtttaaaagctaaaataacattttaaaataaaataacggacaggaagaaattgggagtgatttgggggctggatacccagcaggacaggccacactgtctcccagcctgtttgggtatttctgccttcagtcagaagatgcaacctttttcctgtcaagagccagatagtaaatattttcagctttgcagctgggccatctctgaggcagctgctcaactgtgccgctggagcaggaaggcgtccagagacaacatgtaatccaacatgcgtggctgggacccaataaagctctatttacaaaaacaggcatcccgccagatgtggctcggaggcgctagtttgcccactccgctctagatgaatgcacaaattcagtaaagccaacacgtgccttgtcccttggcaggaggcaccttgcaccactgaagcgatgctttgggggcctcacacctcgcagcttctgagagacgggcaggaagtttctgctatcctcccttccttggtgcggagaagagcttgcttacctgtgacatgcagctgtttgttttgtttcctcgatgtggccagtgtttaatctggattaagtttacggcaatgtgttaagcccaccccaccaccccaccagatctctctagtgtaacttgcaacccacgaaggacctactttgggctgtggtgggagatgatattttcatggattccatttaaatgtacctatcagtagcagtcagaatctcggttgcgagcaacagaaactgcccttgaccgtgagaaacagaaaacagatggtgtcagcaggctctctggggctcggggacgtgctatgagtggcgctggggggcagggcacagcacaaaggggcaggctaggccagtggctttggggataagatgacctctacccccacccctgtccctggg

SEQ ID NO: 96013 - DNA, 17994 bp, Homo sapiens
ttccccatgctaggaatgcccttcctatgctccttagactccaggggccttctctagttctccactctccggggagcatccctttaacacccctcctgccccagcctcctcacagctcctgcagcatctccagactcatcacaggacttgtctagggtatgactcccatctctaccayggggcaggggtttgctgtggatcttgcttgtcttccagtcccctttgcccacagccttcagcagggctcactgaaagccctaggctgatgattttgctgggctaaggcctctcagctgtctcgatctctccagcccagagccctttcccctccccagcacttctgcccctgctcctggtattgatcactagggaatcctagccaaagagcttctcacgcaaaggcatgcaaactttgacccaggaatgagtgttcagctccaggccaaggtcctctaacctcctgcctgactccctccttctctgcccagtgctcagtgtgggcccccttcctgttattgtgaactgttagccaagatacggcttggtgatgagaagtgcaacatctcttgtaaccccagtgcaccagtccaggggtgtggagaggtgaggggccctggcccaggggctgagtctgtctacctttggccccctggggcttcactcatagtctgggatgataagttatggtgagacgggccctggcctagaagcaagaagctggagttctaggctctgctttgatttgccatgcgtacttgggccttttcttttctggcacccatctctccacctaagaagtgagagacgaattggttttattagctaatgagtttttgaggagtcaagagcctcttagataatgcaagcaaagcaacgcactttctatcaagagaagggtccctggttgggagccctagcactagttggtcttccagccctggtgaccaggctgccatgattctccagcgctggggcattggtggggaccctgggaagctgaagaagaggttgtgctgcagagcatgttggaggatctaggagtgccttgctttccacttccttgccatggcttccacacaggctcgttctctgtggctctagctccaactaggattgaaggacagacctctcttgggtaccatgaagctcctcagactgaatcaaagatgcagagagtagaataattggaagggtgctgagaaagcccagcaatacctcccttgtctcctgcctgttctgttgcctaaattccaccattatagcatgagcactttggattcaacatctctcttgccatttggcctgtgtatagtatagctgtgtctaattcctttaccagttattaatatcttgcctggacttggcttatcagatcaatttcctgcaggttggttttccttgttagagcatacggaaagaagtggcaggttgggtcggggctatagcaagtatccagtgtcctaagaattaccgtggagaagtgctggaaacagcgaccaggagaaacataattttctggggggagaatccaggaaggcatcccagaggaagtgatgttttatctgagactcaaggtaggggacactagaactagaggcaggcaggcctggtaggttctgctaaagatactttttttttttttttcaagagtgcaggatggatttattgctcgtggtttgaggaggcttcaagcatgtccttatttttttttttttttttattgatcattcttgggtgtttctcgcagaggggtatttggcagggtcataggacaatagtggagggaaggtcagcagataaacaagtgaaaaaaggtctctggttttcctaggcagaggaccctgcggccttccgcagtgtttgtgtccctgggtacttgagattagggagtggtgatgactcttaacgagcatgctgccttcaagcatctgtttaacaaagcacaacttgcactgcccttaatccctttaaccctgagtggacacagcacatgtttcagagggcacagggttgggggtaaggtcacagatcaacaggatcacaaggcagaagaatttttcttagtacagaacaaaatgaagagtctcccatgtctacctctttctacacagacacggcaaccatccgatttctcaatcttttccccgcttttcccctctttctattccacaaaaccgccattgtcatcatggcccgttctcaatgagctgttgggtacacctcccagatggggtggtggccgggcagaggggctcctcacttcccagtaggggcggccgggcagaggcgcccctcacctcccggacgaggcggctggccgggcggggggctgacccccccacctccctcccggacagggcggctggccgggcggggggctgacccccccacctccctcccggacggggcggctggcctggcgggggctgacccccacctccctcccggacggggtggctgccgggcggagacgctcctcacttcccagacggggtggctgccgggcggaggggctcctcacttctcagacggggcggttgccaggcggagggtctccttgattctcagacggggcggccgggcagagacgctcctcacctcccagacggggtcgcggctgggtagaggcgctcctcacatcccagacggggcagcagggcaaaggcgctccccacatctcagacgatgggctgccgggcagagacgctcctcacttcctagatgggatggcggtggggcagagacgctcctcactttccagactgggcagccaggcagaggggctcctcacgtcccagacgatgggcggccaggcagagacgctcctcacttcccagacggggtggcggccgggcagaggctgcaatctcggcactttgggaggccaaggcaggcgggtgggaggtggaggttgtagcgagccgagatcacgccactgcgctccagcctgggcaccattgagcactgagtgaaccagaatccgtctgcaatcccggcacctcgggaggccgaggctggcggatcactccctgttaggagctggagaccagcccggccaacacagcgaaaccccgtctccaccaaaaaaatacgaaaaccagtcaggcgtggcggcgcgcgcctgcaatcgcaggcactcggcaggctgaggcaggagaatcaggcagggaggttgcagtgagccgagatggcagcagtacagtccagctttggctcggcatcagagggagaccgtggaaagaggggacagggagagggagggagagggagagggagagggagagggagagctgctaaagattcttattcctgccttcagagtggtgggagctaccaaagaaatttaagcaaggtggtgatggaatgagattttgcatttttgacaggaccactctgggtgccacaggatggagaagtaattggacggagcaaaaggcaaatgggaacctaggtggaggctaagtgctccagggagcaatgatgggccctggatgagttgtggcagtggagctggacagatgccaaagcagatgccaagcagagaaatgtgcctcctattcttagcacagtagcccgagtgaccttgcttctcttacaccccagccatgtctctatctcgcacagaggaagtctcatgtctctcaatggggtgctccctgcacatgcggcagggcgctgtgcctcatgggcatcccatccccctggactacatgccaggagaactccccagtcacatgacctctgcacatccctggtactgctcggtccttcaagaaccactgtggtggggggtggcgggaggctttgattttgcttattccctctgccagttgcagtcttttatttgagatggagtctcgctctgtcacccaggctggagtgcagtggcgtgatctcagctcactgcaacatctgcctcccaggttcaagcaattctcctgcctgactccactccccccaaacccccctcaccgccccagtatctgggattacaggtgagcaacaccatgcccggctaatttttgtatttttgatagagatggggttttgccatattggccaggctggtcttgaactcctgacctcaggcgatcctcccgactcggccttccaaagtcctgggattacaggcgtgagccaccgcacctgcccaggtacactttttatccagatatctatgcacattgattcttgactccacactcctgcctctctccgcaaggccttccctgacccccttgttttgaattgcaatctgccctcacataatccgtacgccttttctgtttaatttttttcaaccgcactttttaccctctcacattctctagatttggggcatattacttgtctccttccatcagaatgtaaactccacgagattaggagtgctgtcagctgtgttcccttctctgtcaatcgccagcgcctccgaacagctcctggcacatagtagttgcttggtaaatatttgtgcaatgcacgaggccgcatatgaccggaatgggaggtgaggggattattttctggcctggaccagcgacggatggtggtgccaccgggttggggagcacgtcggggatggcgcgtaacgatgttagctggggccaggttgagctaggcacgcaaatacaactttttttttcctggaaaccctgtaacaggaaggttccggagggcgggacagcgtcggaggcaggcagctaggccatgccaaatggcactggggcttcgtgtcgtgccacaggcgtggaccgaaaatgcggacacatgcaggctgcctctcctcgcaggcagaagccacacgcagacctagaccctttgcaccgcatccccttattcaatcgcgcacccgccacccttcgacagttcctctccctccaccccaaccccacgccgcgcgcgaggctggccctttaagagccccgccccgactccctyccccctcgcgtgactgcgagscsccgcgccgggccggggaatgggkcggctgggtggctgcgcgggcctccggtccttctcacgcaacgcctgggcaccgcgcctccgggccaggtggggcggggacgggccgcctgacctctgccccctagagggatgtcgccggcgcacgcaagctagccgggggtagggtgggggctccgcgccaggtgccccctccgtggtccctgggcccgagtctttccgtggccccccgccgccggatttctgtgctctgccaatcaaagcactagccaccccgggagccaagagggaccctcaagggccggtgggtcctggctggagggaccgcgcgttgcaatcagcactaaggcgatcctagaggctgcgaggagccgctagtgagcgctcagcgagcctgccccttcgccatccattccgatccttcaatcaagaggcgcgaacctcagctagtcgcccgggctctgggggacaggtccagccccgcggcgcctctggccttccggcccccgtgacctcagggctggggtcgcagcgcttctcacgcgagccgggactcagtaaccccgggaaggaggtcaccacggggcagccccgcccccgcctgccgagtcctggtaggctgtagcgctggggaggcatctgcacgcccagcgttccagtgggtgcaaaaatgacgaagaggagtccccgcgccccaggatggagcttcccgtaccctctcttcgggctgtcctgggacttctccctcaagccccctcctcggctgggttctgcactgcccttgggacgccttggaattgggacttccaggtgttcccagccctcacccctctatgtacaggcaccgagatgtgtcccatagtgggttcttgcccacccgaccccccacccccgccgccctccgccacctttctctccaatcccagagagaccagcccggttcaggctgcttctccctccatctcagctcgctccagggaaggaggcgtggccacacgtacaagcccgcctataaaggtggcagtgccttcaccctcaccctgaaggtgacagttccttggaaccttccctgatccttgtgatcccaggctccaagagtccacccttcccagctcagctcagtacctcaggtgagttgctgggggacttctggcttgccctttctctcccaataaaaggaacattttggtgcctccaggacttcttaggtagctacctgtctagcacctccaaaaagggaggctcagagtgtttttagtgaccaggcagtctagccccctagtggggaaactgaggccaggggaagaggaggacttgcccatggtcccacagctggtaccagacctctagatacagatggcatctcattcaggacttcaggacccaggctccagctccatcccctagtgagtgtctccctgcctaccctggggcttccccatcaaggccacstggcaggctggaatatgtgcagcccctccctcaggctttctgatgacaggggcttctccttgggtggacagggtggatggagggggtgggctgggttcttaccagctgtaccctgccctagcctaagaagctacccctggcagattttaccctcctaagggtggcttgtcagtgctgagatgtcctagacagctgggacaatagaggcagatctgtgcaggagtcccaggcctttcctatctcattgaccatcttctttgtcctttgctgggagacaatcaggktgacagattgccaactgcagggagctggaaataccagtccctaaaaactcaccagtcacatctcccttggcctcctaccatcttacaaaggctgcaggtccttgggatacccactgtgcagaaggggacaccatagcacaccaaagcctggcactgtcccctgttgactcagggatctagtgtgctttgatatttagcccctccaggaagcctccctccactataatacttgtggtaggaaccatccatctccctgtcttgtgaggttctcctgtggggagcctaactggtaagactgtcaggttccccacagcagatctgggttttctcttccctctggatccagctgggtactctgaactgagagatcttgtcttaccctctctcagatgttgaaattggaccccagaaaagtaaaatgtgcagtccaagatcactttgactagaatgttgggtctactgacctctagtccagggtaacaggcagagatgcctgatatgttggagagagtggtttatgaatttaaacaccctttttaggtcaagcttacagagaaagtattgcctcagtttcctttcagtttagatccattcctgatttccctgattccagtctggggttttcttacagcctagtgggaaccttccatttattctctgctctctggtaacctgcaaaagggggaggtccaaactgttcattcattgagaattgagccaaaaaaaaaccctggcctggatttctctgactaaagagctcaatctagctggtctccagctgcctttaaactgtggatcagttgaactcagagagctggggctgaaagcaatgtggtttgggaagtggccatcctgtcccctatctcttcctcastctgtcctggggtctggtgggatttcctgcatcctgggattgagcagcagagaactgagggttctgggaaaattccttcattgatctgaccactcttcaaaaggaggtayatgtgacagcagctggaaatttccagggaagtgtccctaaggagtctgagtcctggctctgtcactgattgctgggggactttggacaagtcagcgctgcttcccccaaatgttaaatgaggctaaaggatcagatgatccctaattcccctgagaacatgattttcctaagtgtggtgggtaggactcggggtgatacaccttgattatgtgtttattttaatgtgttaggggaaaaatcaaacttgtactttcacatagatattgtttatgatgatatgtaggtagatttaaagttgattttaggaaaatrtgaagtaaataacagtactggtactatgtgyaaatcacagattgacattggaagatgtcagtttagattggtacagcagttaagagaaagcgttctggamttaggcaacttggcttgggagtctgcatccaacactttctggctgtgtgaccttgggcaagttacttaccttctctgagcctcattgcaggctacttcatagatttgtggccagggctgaatgaagaaggactgtgaaattcttagcccacagtggtagttcaacaacttctccccacctcaccctcttcttcatgcccagtaagcagttctggtggaaaggtttcccctttccctgacactctagatattggcttttctcatcccccaatctgacggcttgactttttttcttcctgcaccttctctcagcagccacctccaagatccctacactgatcatgcttttcccaatctccatgtcggccacggagtttcttctggcctctgtcatcttctgtctggtattctgggtaatcagggcctcaagacctcaggtccccaaaggcctgaagaatccaccagggccatggggctggcctctgattgggcacatgctgaccctgggaaagaacccgcacctggcactgtcaaggatgagccagcagtatggggacgtgctgcagatccgaaytggctccacacccgtggtggtgctgagcggcctggacaccatcyrgcaggccctggtgcggcagggcgatgatttcaagggccggcccgacctctacaccttcaccctcatcagtaatggtcagagcatgtccttcagcccagactctggaccagtgtgggctgcccgccggcgcctggcccagaatggcctgaaaagtttctccattgcctctgacccagcctcctcaacctcctgctacctggaagagcatgtgagcaaggaggctgaggtcctgataagcacgttgcaggagctgatggcagggcctgggcactttaacccctacaggtatgtggtggtatcagtgaccaatgtcatctgtgccatttgctttggccggcgctatgaccacaaccaccaagaactgcttagcctagtcaacctgaataataatttcggggaggtggttggctctggaaacccagctgacttcatcyctattcttcgctacctacccaacccttccctgaatgccttcaaggacctgaatgagaagttctacagcttcatgcagaagatggtcaaggagcactacaaaacctttgagaaggtacagtctggggaaaggcaggtgggtggtgggaagcagatggcrtcagggcctgggaggtcaaaggtaagaggaactgcatggggcttggcaagttctcaggaaggcttcaacctgggatcttgaagccagttgtggaatagtcttcttccttggcagggaaatagaactttatcttgactaacccttccatgcttccacagacagcaatagccactgaagagtcattacatgcaggaccctggggcagttgctgagggagccaggaagagttaaagagttcatctcctggcctcataatagaaagaagataaagagcacatccagatgataacagtacaagacgctgtgtgtcaaatgtcccatgagttggggctagcagcattctaaggtagtaggagagagccttgcagaggcagagagaagctgggacaacagcctcagggggcatcacctccagaacaaatgtgctaggaatagtgaaggaccagacctggatggagaggtagctctgggtttgagatcttgctcacctgtggactttccctacctaagggccacatccgggacatcacagacagcctgattgagcactgtcaggagaagcagctggatgagaacgccaatgtccagctgtcagatgagaagatcattaacatcgtcttggacctctttggagctggtatggttaccccattgtgtccttcctgtgctcaagtgccctgacctgctgctgcctgcctaacttcttctgttctaccctgtccagggtttgacacagtcacaactgctatctcctggagcctcatgtatttggtgatgaaccccagggtacagagaaagatccaagaggagctaggtaggtagtggctcccttcaaaggggtcagtgccaggggtctggccaggtctaggcagcccctgcatccatcttgtccctgtgttctgcagacacagtgattggcaggtcacggcggccccggctctctgacagatcccatctgccctatatggaggccttcatcctggagaccttccgacactcttccttmgtccccttcaccatcccccacaggtaaggccccatggagccactgctgtctgttactgatcttmctccggaccacatacctgattagggttagtgggagggacacggcatgggagacagggagatttgcctgttgccctgagcctgactgagcttcctttctccctagcacaacaagagacacaagtttgaaaggcttttacatccccaaggggcgttgtgtctttgtaaaccagtggcagatcaaccatgaccagtaagttcagagatgcagaggaaaggctgggtccaccctcttaagctcttatatatgattaatacaatcattgcattgatcctcctgtccatgggctgcttgcctgtcctctatcctttggggctggagctccactcacttgacacttctgagccctgaactgccacttcagctgtctccctctggttacaggaagctatgggtcaacccatctgagttcctacctgaacggtttctcacccctgatggtgctatcgacaaggtgttaagtgagaaggtgattatctttggcatgggcaagcggaagtgtatcggtgagamcrttgsccgctgggaggtctttctcttcctggctatcctgctgcaacgggtggaattcagcrtgccactgggcgtgaaggtggacatgacccccatctatgggctaaccatgaagcatgcctgctgtgagcacttccaaatgcagctgcgctcttaggtgcttgagagccctgaggcctagactctgtctacctggtctggttgggcagccagaccagcaggctggcctatgtggtctaagrttcagcctgaaactcatagacactgatctggctgcagttttgctatctgggctgtgggcaagcctaagggatcctgcctgcccctaccctggacttgcctytgcacaccctccagagacaacaggtaaaacagggccacatagatgctgatggagccttcccaagttgtgcttgagccaggaggcctgctagggttaggaggtccttaggcctctgagaagctctgaagaactctctggaagcccctgggcccagtayctagctggctctgtgrgggtgctgactggcttcagcaagttagaactagccaaaccaggaccctgtccaatctttgacaattgggagctgccaagagtgaagggaagagacagcccaggatactggcacagaggtagtctcactgcttgaactaggctgagcaatctgaccctatgggtctaggacacagttcctgggaacatcacattcctctgcccttcctgcaggcaggaacaaacagggctgccttcyggccttgtaagacccttattgctgtcctggaggggctggggacttgtgtctgcggggatcagagcgcacagggagtgcacatatccaggcaccaggactagggctggagtgaggggggggtatttcaattaccttctattggtctcccttctctacactcttgtaataaaatgtctatttttaatgtttgtacacaacaatccttctattctagcctgcattgagcttgcatgcttgcataagagcttaagaaccattgatttaatgtaatagggaaaattctaacccaggtatccaaaaatgtgtaagaacaactacctgagctaaataaagatattgttcagaaatcctataggtggagattttttgaatcataaatgattcatcactcgtctaaatactcaccctgaaccccattctgtgttgggttttactgtagggaggaagaagaggaggtagcagtgaagaggtgtagccgctgcacttaagcagtctgtttgagggacaagactctattttttgagacagggtccccaggtcatccaggctggagtgcactggtaccattttgtttcactgtaacctccacctcctgggctcacacgattctcccacctcagcctctgagtagttggggccgcaggcacacgccaccacagcttttttttttttttttttttttttttgtagagatggggtttcaccatgttgcccaggctggtctcaaactcctgagctcaagtgatccacctgcctcagcctcccaaagtgctgggattacaggcatgagacaagactcctaatcactgtgctgacttacgccctctctaacttatcacaaattgatgaagcgtattctccgaattaggcaataagggtatcaagtgaatatagtacagtccctgctttcaagaacctcccaaaatggttgagggaactgacacataaacacatcattcaattcattgtggtcagaactctaccagacagatgcatacgggaggtggggtccagaggctgggttggggagtgggcaccgcgagatttccaggtcttttttttttgagacggagtctcactgtgtcgcccaggctggagtgcagtggcgcgatctcggctcactgcaagctctgcctccggcgttcacaccattctcctgcctcagcctcccaagtagccgggactacaggcgcctgccaccacacccggctaatttttttgtatttttagtagagatggggtttcaccatgttagccaggatggtctcgatctcctgacctcctgatccgcccacctcggcctcccaaagtgctgggattacaggcgtgagccaccacgcccggctccaggtcttgagactatctgagccaagccttccttgaaggatgagagacagtctttcatttgggactgatagcattagatgctgaagtccaagtgggtaggctctggtcacagttttgtggggagaggggttctcagctcagcagttgtaatctgctgctcactcttcatgccctggcgtgggttctacaatcacattagaacccacatctcaatgctgaaagcccctgtccatctgagatggcagagtggtggtgatgccaagtatggcagaggctgaacccacatagccaggagctgaagggagacacaccttgggatgtgacctccctaccccaccccagaccagctttcttcctgaagcattgcgtagtggccagcagttgctgttcatgcaccgtggctcccgctcaccaggagcttcaggctactgcaaggaacaaccaagctgaagtcagctgcggcaacctgctttgtgcagcggcggccggggggatgagaaatttggtgctcaatcattcttgtagtgatttatattttctacttaaactataacttgcatttatgctatatacataaacaagccatgaaagcatgctacgtgaaagaagccagacacaaaaggccgtgtattgtatgactccatgtgtatgaaaagttcagaataggtaaatttatagggacagaaagtagatgagaggttgccagggaatgtggggcagggagaattgggagatgcagagtttacttaggggtgatggaaatattctagaattagatagtggtgatggttgaacagctttgtgaatatactaaaaaccagtgacttatgcagttcaaaatggcttaaatggtagaaaaaaggcctggcgcagtggctcacgcctgtaatcccagcattttgggaggctgaggtgggtggatcacttgaggccaggagtttgagaccagcctgggcaacaaggggaaaccccgtctctaccaaaaatacaaaaattagctgggtgtggtggcacacgcctgtaataccagctactcaggaggccgaggcacgagaatcgcttgaacccaggaagtggcggttacagtaagctgagatcacaccactgcactccagcctggacaatatagcaagaatctgtctcaaaaaaaaatcaagaatttattctacctgtcctatatgaactatacctaaaaagaaccaaatagattagaaagaagtatctcttaaaaatactccagctgggcacagtggctcatgcctgtaatcccagcactttgggaggccgagatcacctgaggacaggagttcgagaccagcctggccaacatggtgaaaccgtctctactaaaaatacaaaaattagccaggcgtggtggcgggcgcctgtaatgccagctactcaggaagctgagacaggagaatcacttgaacccgggaggcagaggttgcagtgagccgagatcacgccactgcactccaacctggacaacaaagatcgaaactccgtctcgaaaaaaaaaaaattcaattattatgtgaaaaagaaattatagaattagtgtcattattttgtagtcaccaataaattaatagatctaaacattgtgcctaacaactgctgacatcataaaaggagagaaaatcagacatcatgtgactcctgatgaaagaacacaacagcacctatagtgttgtcaaagggattgcatcagaggctgaccaagcctccggaaccagcagccaatatgcaataaatacagaggatgtagggacgtgaattgcaacatgaatgtgcagtcagtaaaattcagactttggaagactgtgggtcaaaaggcctgggttcttcaacagaaaatctataaggaaaagaaagggatggagggaaaacttgtagatgaaaagaaactataaaaagacatcaaattgcttgaacccaaattttaagaaatgagcaacaataaactatagtgtccagggatacacacttagtgatgaaactgtaaagaacagggaaatgattactacaagagtttggggagtggttactttttgggagagggagtgggtgataattgaaatgggacatgtggagggcctctgggatagctgataaagttctattccttgacccagtgtggttacaaaaatgtttgctttataaaaacgaagaaaaacatataaatagcttgtattgctttttgcttttgagaaatataattaatatatattgtcaatgccctccagtcaagggccaccaggaaaacacctgtagttaaacaagttggatttattactcattgcagtggggaaccatggggtatctcgacaagagggttttgaaaagactgattatatataatacatatataattggctctcatgagccaatacctcaaaataaatctctttatatatataatatatatctttataggtattatatataacatatctttatatgtaatatataatatatatctttagatgtattatatataacatctttatatgtattatatataatatatatctttatatgtattatatattatatatctttatatgtattatatttaatatatatttatatgtattatatttaatatatattttatatattatatatctttatatataatatataatgtataatatataatataatatgtaacatatctttatataatatatatgttcatattctttttccatttataaatatatatctttatgtataatatattatatatattatatatcgatatattatatatactatatatcttttacataatatatcttcatatattatatatgatatatatctttatatataataatctgtatataatatataatatctctttatatgtatataaagagctcatgtaatatctctttatatgtatataagagctcatgagattatggaggctgagacagtccataatttgtcatctgcaagctggagacccaaaaaaaccagtggtgtgtttcaaaggcctgagagctgaagagttgatggtttagattccattccaggtctgaaggcccaagaacgagagcaccatggacagaagaaccatgtccaaattcaaagggtcaggcagagttcactcaaccttcttctgccttttgttctattcaggttctcaacagatgcccacccacattggggagggccacctcctttactcagtccaccaattcaaatgctaatttcttctggaaacaccctcacagacacagccagaaatagtgtttaaccagctatttgggcatcttgtggcccagtcaagtttacacataaaattaaccatcacacccgctgttagagccattcagaatcctctgtgcatacccagtgcatatatatatatatatatatatatatatataatgtatatggaggggtgtgtgtgtgtgtgtatattatatataatatatatatgaacagctgaaacattttggggaaagactgtatttccaaactaatgcaggtatctgctgctcagcaaatttaatatgttcagcatctttcagttgggctccttatcttattaacagtttggaagtttcaccaaaatgaaagccccacatagtgacaactgcaagggaccctcaattcttgagtactcagctctgtcctgtcgtatgctcttcactgatagtcttctagttctgctgctgggatagtatgtgtcaaggacaatagcaagcttcaaatatttccattgacttctcattgctttctctctctctctatctctctctctatatataatatatatatacacatatataatatatattatatatacacatatataatatatattatatatacacatatataatatatattatatatacacatatataatatatattatatatacacatatataatatatattatatatacacatatataatatatattatatatacacatatataatatatattatatatacacatatataatatatacacatatataatatatataatatatacacatatataatatatataatatatacacatatattatatatattatatatacacatatattatatatattatatatacacatatattatatatattatatatacacatatataatatataagacatatatacacatatataatatatacacatatataatatacattatatatacacatatataatatacattatatatacacatatataatatacattatatatacacatatataatatacattatatatacacatatattatatatgtaatatatacacatatatatgtaatatatacacacatatgtatatattatatacatacacatatataatatatattatatacatacacatatataatatatattatatacatacacatatataatatatattatatacatacacatatataatatatattatatacatacacatatataatatatattatatacatacacatatataatatatattatatacatacacatatataatatatattatatacatacacatatataatatatattatatacatacacatatataatatatacatacacatatattatatatattatatacacatatataatatatattatatatacacatatataatatatattatatatacacgtataatatatatattatatacacacgtatataatatatattatatacacacgtatataatatatattatatacacacgtatataatatattatatacacacgtatataatatattatatacacacacataatatatattatatacacacacatagaatatacattatatatacacacatagaatatacattatatatacacacagaatatgcattatatatacgcacagaatatacattatatatacacacatataatatatattatatatacacacatataatatatacattatatatacacatatataatgtatatattttatatgc

SEQ ID NO: 96014 - DNA, 40930 bp, Homo sapiens
  misc_feature (1)...(40930): n = A,T,C or G
ctcaggccctcagcctccttatctgacaaacggggatttgcggctgccggggttggctctgggaccatttagcctatagtgcgagttcggacggaacggaccatgtaaaccaaataagtccactgtgggctgtggctggctctcccactcctttcctggccccccggtagggcccagactcagcccggggcccccagtcccctgcctcgcgagcccacctccttcctgcacgcgggcggctgggtgtccgagcccggcgctgttgctgtgggctttggctccacctagtggcacaaggtttgatctgagaggcgccggctgaggctctggagtgaaggaagcggtatctgaatggctgagagagagactggagcaaggacaaagtggcatttctctgcctcagcttctgccgcagacctggctgagggtggcctcagtccactccgccctctggttccgaggggaggctggggtactgtgcacttgcctgtgctactgtgttagctttttcatgttctccttgtggggtgctgtccttgtgccacgtggaagcctctcatagcccgctggccccatgcacacctgcctggaacactgaggctatagtcgtcgaataagtgtgggccaccgctctgtggccgactatgtaaaccaggcaggtggcccttcccctcctgcccccactacctactgtccccaggagggaagaggtgcccatgccaacctccgtggctcactggtcttgaatcttagtgcccttagcagccccagccactggttgcagtaagaagcttcttgcttacatgacatggcatggcatgacttctgtgcccttgtctgactggccccatcctcttcctcctctggaactggactctgtctccatggtccagccacgatgggtgtttttccttatgtgcctgtgtaaaagggtgcgaggtgtgtcagggggaggacagggaagagctgttggcctggttacttatgtactgcccgctagagaagcccgcagcgggggcctcccaagggcccatgtgaatatttcacagctgaagaaaaaatgattggctctcaaataagaacactgcaaaatggaaatcaataaattcttaatcaagtgtccaactgtaacattatatcaacctcattaactgttaaatttagtattcataaaaatttcattacatctgaaagaatgtgtgggctaggtttttctcatttcacaagaattcccaattgtaatttaaatcagtcactcctagccaaatggtttcaagagcaaaattataaatatcctttcaaaaactttacagcaaatttttaatattttaacatgtttgcactgaggaagtgaagtgaagctgtaaaaataaaaatgaagctgaacgtggtggcacgcgcctgtattcccagctactcaggaggccgagccaggagaattgcttgagcccaggagttcaaagccagcctgggcaatgtatagagggggacarggagccacagtgtgcacccaggcagggagtgcctgggtactcattcacccttcaagttggggtgtgggggttcctctggacttacaggagtgatgaggacttagaggagcagggagaggctgccctgggtagctaagattagggctcaggttccagttcaccatgtggagttaagttctcataggagggctgcaatgggtgggcccctaggaacagccctcagagatgccctttgcagaggctcccaacctggcaacactcctttgccgggggctctgggcctttgacttctgggtccagtcttctcccctcctttaccccaattactcctgcccctaaagctatgtcaactctgtcccgtatttcccttcatttcactcttgttggacagaaggaatagcccaggatccataaaaagaaacagtccccaaagcagggacccctttcctccaggacacagaacattcagtcttcataatccctgactacataagccctggcccgggcaggaacaatgtgtttcattccttccttgggaatgtctctttaccatatggccacatgacccctcccaaggccaaacaaacaaacaaacaggaaaaaccccaaacagcaaaaggaatctatttaataatagttttaacagccacatctgatacttaagctgagaaatgccataaccttgagtcccatctctagggctgatttctctccaaacatcttaggtccttgcctctccctcctccctttaaactgttagagtggggtgacaccgaaacagatgaaatgccctcagagaaagaaatagggtggagtcggggggaccatctgacttagtgaaataccctgagctgtgcatgtgaaaacaaacagggaaagaatcacctaattttcatgtatggtgtccataccctaagctgagcaagagggtgatgtttaaggcaatgatattaggtgggctactttgagaacctctgaatcttttaagtgcttttttttatcttgcaacagctctgagaggcaggtctgattatctccattttaaatatgaaaaaattaagtctcaagtagctcaagtgtcttgccctatgccacgcgaccactcagtggttgaactaggatttgaacctgagtccatgtggctccaaaaccgttgcttgtttcatgatacaaaactgtattattatgtctatggtctggccagcacctctgctagcggatgtattgccatccagagcaaaacgacattgtccagcctccctgtacctacctccctgtacctaggtacagtcatgtggttactgaatggaaggtcttgactgagttgtccaggttcttggcatgttaaagaattgaacaaaacgcacaaagcaacaaaagacaaagcaacgaaagaatggagtaatgaaggcacagatttattgaagatgtgcaagtacaattcacagagcaagagtgggcttgagcaagtggctcaggagccccttcaattagagattttattaagctaaagaacatgaacacccccggtgccctccagaggcctccaatcagttacatccaatgaaggattgatccgtgaccaattagaggcttaagtggcgacttggcctgtggttatcacagaagtgaagatgtggcctgtatgttgcctaatcctgcctagaattggctgtacctgctgttccttttgcttatgtgaactggctgcacctgctcttcttttgttcctaccttaatccttggttgccctaattccctattctcctgcctcaatgtggttaagttcccaccaatcagatatggttggactcgtgtgggactttgaggaaggggcttaaatgaagctggctcttcagggagggccccttttggtcttcttgagttcttccgccttctggccagcaacacggttaatgctccagcagcagcttggaccatcgggtggccttagaaatgccaaccaaatgtcttcgtggtgaagcaggaagatggagcctggcattttgctgggactgacacactcaccctggactgcccagccttggacatcctttatgggagagagaatacacttctatcttctttaagtctgtgatttggattttctgtttatccatccaagctgcctgcaatgaataaaatcatgttccccgtcctaggcaacgtttagatgggtctaaatgtgtacaccctctactctgagaatgataggatagttacagaatgtgggaggcaggagtgggaggagaaagcactataagtatgggcctgtcttgagagagccaagaaggactttggcatagccgagcactaggctaacctcacctagcagaggattcacttgcccatcgtaaggggcttggtgagggttggaccctaacttcccatcacttttgagagggtgaaaatttcagtttgggcactggcaagaacagagagagggagggaaaaattatgtaatatacacatgtatatgtgtaatatatatattttgaaatgtatgtatcattcattaatcttctcaatagtcctgaaacagccactgaaaagttttgaagcagggccagtttaatccactgagcttggaagctgatcctacaccctggtcaagcttcagggatggcagccgcttgtgagaaaccctgagcatgagccactcagccacccagccacccagtcacccagccacccagccacccagtcacccagaaaagctgctcctgggtgctgcaccctcggaagctgtgagataataaacatttattgttttaagccactaaattttgggataatttgttaagcagcagtaaacagctaatacattcagccttgtttggagtgagtgatgtgtttctggaagctctttcagagaagtgagggagctattctcccagaagccacagcaaacctttccctgtgtttcattggcccaaactgaatcgctggcctatgctgtgatgtgaccatggccattggagaggatgaggcaataacctccagcctgggccacttctggggaggcggtcagtgccccacaacactgggggaggtgcggaggcctgaacggaagttggggtggctgccaagaggaccacaagttcttccatgccacatcgattagggctccttctgagggaggaatgtggggctgcgtagaacaatgggattgactttaagtcagaaagttataaatgtcacctcagtgctgagacccttggaggaaaaactagtccttggaagactgcttttctttgtggaagctcatcaccctgccgctgctcgtgagacactgccttccttggctgatgtcattccaggctcaaggtcatcagtgaggcaaaacaggctttctccatactctctttatcagaaggttcatgactgatgaggtagtggtcactccagcgggaagagcaacaaccactcttgataagtactttttttttttcttctaaaaactgttgctctaaatttgttgaaagtggttcaacagtattggagtctggggtcaagtggctgtgtaaggacaacttttgccattgtgggtgatctatgggctgacacatacaacagaagaggccaggaggatgtcactcgtgtgtgtgtgtgtgtgtgtgtgtgtgtttggtaacagctctattgagatataattcacacaccatacaattcacccatttaaagtatgcaattcaatggcttttagtgtatcagagagttgttcaataattaccacaatatactttagaatattttcattttcatcatcctaagaatccctacacactttatgtcccatcctctaattcctctatccccctagctctaagcaaccaccagtctattttctgtctcttagatgtgtgttttaaatgccttatttgccagaaaataagattttggggaaaaaaagcaagaagttgtaccttccaatgataagtataaggtatagtgtagattgctgtcatgaaatgctctacatggcacatgtatgttttctgacctacacatttttaccaagtgggctgtaattttgttgaaatgacttgaaaactctacaggtgactgacccttgttgtttgggaaagtggtaggtgcagggtgatggggggtgggtgtgggggctgacctgggctggaaggatgggtctggggatatgatatgatgggagggggtatggaagcagctctgaggggaaagcagcacagatcaagtgtgtggacagggaagagctgacatcctgagttccatggcaaccagatttgccaaggtcttagagtgtgtccagagtggagcctgaccacagacctcagctcaagggacccagagcccctctgagtcagctgtactgaattacagccccaaatctgggtcaactggggagagacgacgaggattagggttccaaggtgaaactgtgccattgcgctccagcctgggcaacaagaatgaaactctcttaaaataaaataaaataaaataaaataaaataaaatagcctaaggatgcatttctcagaacttatccctgttgttcaatgatgtgtgtctatacagtggggccataactaagacgtatgttgcccaagctggcaagatagctctgaccttctcttgggcccctcatttcccccaaacacaggttgtctgcagtcttgaccaatggctgccagggcatggactccgctgcaggggccagtgggaggccccagctcaggcaaaagcacaggcagatatttcaggagtctgctagggctggcactgagggcagagacagaggggtctccctgtcctttggagaacctcacgctgcagaaattccagactgaaccttcataccgagtaggggaggagctgtctgcgggtttgagcctgcagcaggaggaaggacgtgaacattttatcagcttctggtatggccttgagctggtagttataatcttggccctggtggcccagggctacagtcatcctagcagtccccgctgaagtggagcaggtacagtcacagctgtggggacagcatgctggccaagggtcttcccccacgctcagtcctggtcaaaggctrccagacctttctgagtgcccccagggaggggctggggcgtctcagggtgcccactggcgagggagctggcatctccacccgcagtcctcgccccttcaatgagatcccctctcctggtgacaatggctggctaaacctgtaccatttctggagggagacgggcacacacaaagtccaccttcaccatgtccagaatttccagaagtatggcccgatttacaggtaagcctggcagagggtgggagccgaagggacagggaggaggaggggcctgggtagccctgctgtagtccccactcccccaacaggctgttctctggttccaaactcctgtctaacttcttttttttttttttttttggtaatacaatacagaaatatatcagggatatttcaaaattcaacatttgaatctgtgaatgtcttaagtactctaaaccagacatctacttttgaaacaattggtggcaagaccgccagccatctgtaaggaagctctttaatgggtccaaaccccaggtctggccaggcatggtggctcacacccataatcccagcactttgggaggccgaggtgggyggatcacttgagatcaagagttcgagaccatcctggccaacatgatgaaaccccgtctctactaaaaatacaaaaattagctgggtgtggtggcaggcgcctgtaatcccagctactcgggaggctgaagcaggagaatggcttgaaccggagaggcagaggttgcagtgagccgagatcgcaccattgcaatccagcctgggcgacagagtgagattctgtctcaaacaaaacaaaacaacctcctcggtctgaggaggggagactggtgaggctaagttttgaattcctggccctgtagctgtcagcccagccagcgagttttaaaaattgggagaaggccgggtgcggtggctcacgcttgtaatcccagcactttgggaggctgaggcaggcggatcacttgaggacaggagttcgagatcaacccggccaacatggtgaaaccctgtctctactacaaaaataaataaataaataaataaataaataaaataaaaaaaattagccgggcatggtggcgggggtctataatcccagctactcgggaggctgaggcaggacactcgcccgaacccaggaggtggaggttgcagtgagccgagatcatgtcactgcactcccgccctgggcaacaaaagcgaaactctgtctcaaaaaaaaaaaaaaaaaaaaaatcgggggagggagatttgaaggtcagagcacagagtgaaaaggtcgcagcgtggtcaagtttggcgctagcgacagacccagcattcctcccagcgcacgccgccgcccgggccgcgctattccgaaattgggtccgccctagcgtggcccccggcctgctcctgcgctcttcgcgggtcgctcacctccgcctcccctcgacacagcccgagcccatccgccccccgggtcgacccgcgtttacctcagggcgaggtccaggcgctcggccccgcggaggcggcggcggccccaccgcaggttcctaggtcccagtcactctgccgccaagttccccaacacggactccgtgcgctttgaggtgttacgggggcgctggagcactggcttcgctggccctgccaggaggcggcggcgaagcagggagcgacccggtatgcgtttctctgcccggcctgcggccctgcagcatccactcctcgcctctgctggcctctgccctcgctcgctgcgttcacccgagctcacccgagcccaccggagccgacagtggcgcgctaaggtgacgtccgcgcggccggacctctcctgtccaacttctgatcttcttccaggcctgggatggtggtgggtaaaagggaaagtattcctagttcccaggcctgaggcctcaaccttccccagatcccactccctttgaaactctcggagagaggtggttagagaacaagccctactaaatgcctccctacatccgttaccctccgcacaccttgcaagcgaagtttgttgtccccatggtcagaggaggagactgaggctcagagaggtcacccagctagattcctgtcctgctggggtgctggatctcaccccttggccctgaggctctgagtctgtcccttccctttcccaagaatcgggcttgcttcctgctaggaggaaaggccttttttttttttttttgtctttgggcctctgtgcctccagggcttgtggctttttcctgggaaaactgctaaagctgttcccacggtgggcagcctttcagccacacctgggttctttgctaagagtccggttgagagggaacggaggtggcgcaggggtggttgggggctgggaggggagaccaggagggacagtacgttttcctttaagtgaaaggtctttacaactcagagcattccaatgggtcagtcacgaagagggaagggtaagatgtgttggccggcttgatgactgggctgggggtgggtgagaaggcaggctagtttgtgttggggcttcagctgctccctccctctctcacaactcctttaaagtccaaactgccccttttgatagctggttggtggcagggagctccccccaccccgcaccccaccctattcaaggttgagtgctgggcttgggaggttgcgccccgctgggtctctccttcctccccctctctcctaggcctattagtgcttctgtcccgtgctcacttcacatagatctctagttatccttgcttcctcctctcttcccttttcaccacttcctagaccctcagtagcaactccttattttattaagcccctttgttaccggtggagggtgtccaggttcttggcgtcttgaacaaagaattggacaaaatgcacagacaaagtaaggaaggaatgaagggatttattgaaaatgaacatacacaccacagtgtgggagcaggcggagcgtaggggctcaaaggtcccgttacagaattgtggggcatttacccccagaggattccattggttacttcagatacaccttatgtaaatggagaggatgaagtattcaagttacatagtcatacaccctatggagaggatatttcctgttatagctgaagtgtgaatcgatcttcacacttcagaccctattttcctgcctcatctgccccttcaagagatgtgatccccataaatctttatgggaggcagagggaccgatggtcttttttctgtaactgcttcatgccggcttggggcatagtccctacctattggggatcatggaactctcaccctgctctgtctagtggaggaagggtagcttcttgatgtccaggggtggtgtcttcacttggaactggctggaacctttgttacatgatcatctgaagcttgatggtctctaggtgagaggaaatgaatttggttaaaagatttaatggaaactttagggggtggatacctatactgtcagaaatgtttgttgtagtgatttgcagaagaaaaaacaaaacctagtcttttctagaatctatgtgtttccttaaagtcttggcatgagtggccccattttggttttgtttggtttgttggggcctagtgcatgagatcagtccaaaacaacggcctcccagaattttgttgaaaaaaattccctttttgatcaggttttcacttaggtgagagtgtgaccaaaacctagggcctcagtgccactctcagttaccatcattttgggtttctggtctcagcatgtcatttataggttatggtgtcctcatggttgcatatttctttgagctcctgttattccagttgaagagagaccatatgacattctagagatggctcatgcaagcatttaaaacctttgagagcatacagctcgtcagggagaccattattatggctattaggaggataataccaagaatttgggagtatactccttacccaaggtccccataaaccaaacctcctaaaatcaaatggatctaagaatgagctagatacagtttactcacggctgggtgaggtggctcacttgaggtcaggagttcaagatgagcctggccaacgtggtgaaaccccatctctactaaaatacaaaaattggctgggtgtggtcacgtgcacctgtaatcacagctacttgggaggccaaggcaggaggattgcttgaacctgggagtcggaggttgcagtgagccaagatcacgccactgcacttcagcctgggcaacagagagagacttgactaatcaatttcttcgtcagtctcctaccactgaatttctatagtcttcatttgatgtatttctgtataggccacaagtgccagcagctgcacagatacttcgctgtttagccaattctattataactttcacaagagaatttagagtctgtagcctttagagtagaatttgctatggaacctatcatgagggatacatttctaatcattgcttcttttactttaaaccatggaaaaaggacctaacaaatgatgccctttcagaagagtgaaggacttctggcaatgttctctttaacccacgatgtgggttatgtggagtgaatcaattttttgtttttgattgattatgagctaacacatctaccattaaagtttcttacatacattgggcctttatccatgtataaggctggctgcaaactccttcacaaataaaaatgttccccataagtgcacataacagaccccttttccacttctattgttcgtagaaggcataagcaagaaaaaatattcaaaaataagagtttcatgatagtagaagtcttaatctgtgaacttgggaaaagctgttcacatcaatgatgtcatcttcttcttgggagaaatttccctagttagttttaccttaagcattccagtgggtgcacagctccaagagcatggaggggcccttctcagttgtgagattatgaacccaaagttcaaggtcctgaagttttgttatagtgtagatggcaaggacagtctttctctgatgtttccagcagattcaaaccataaaaagcttttttttttaatctggtgaaaatacactgtagcataataatctactgttataacatcagccctcttgcatgggaaagcttttctacaaccagaaaacatgcatggaaaataacaatggaatgaaatccctttataaaatgtttaaatggctgaccagaagaccaaatatacctgaagctttaattgttttcctaggaatatgggatcaagcattggttataaacaattttttgttgttatttagtttttatttcataatcataaactttaactcaactctgcagtccagctaggcatggaagggaactgcagcgagagcacaaagattctaggatactgcgagcaaatggggtggagggtgctgtcctgagctacagaaggaatggtctggtggttaagataaaacacaagtcaaacttattagagttgtccacagtcagcaatggtgatcttcttcctggtcttgccattcctggacccaaagcgctccgtggcctccacaatattcatgccttctttcaccttgccaaagaccacatgcttgccatccaccactcagtcttgtcagtgcagatgaaaaactgggaaccgtttgtattggatccagcatttgccatggacaagatgccaggacgtgtatgccttaggatgaagttctcrtcatcaaatttctccccatagatggacttgccaccagtgccattatggcatatgaagtcaccaccctgacacataaatcctggaataattatgtgaaagcaggaacccttataaccaaatccttcctctccagtgctcagagcatgaaagttttctgctgtttttggaatcttgtctgcaaacagctcaaaggagacgtgacccaagggctcgccgtgactgcgatgtcaaagaacacggtggggttgaccatggctgatagtacagggctcctggtggcagtgacggcatctgcaaagcgacaggttataaactattttaaacaatttcagtattagctggtttaacatgaaagtcttttcttgatatgtaattaattttttgttgttgttgttttacgtgggttagtagctttatacaagaaaatttggtcatttttgtggtttacaataacttaacataattataattgtgattggtaacatatacttagacattagaatttcagaaatcccatacaattttggaatatattattcacaaaaatataacctaaagaagatttaacatcattttgtcaatcccatgtacctaaacatgtcaaataatcctgtttacctcttttctggatgttttcaggggccctctgattcatctagaaagccaggcattaggaaagacaattttgaaactgaagtttgattttggaattccagattaccgtaaactatttattttgccaaaatgatgactcagaaattttaaagaagcaaaaaccttttgtaaccttccacacacacaaaaaaacccccaacactttctactgttcttatacaccttgcatgtaaaactgtttctagtagtcttaattgcatgttataatggcaaatttgttttttttgagacagagtttcactccttgttgcccaggctggagtgcaatggcatgnnnnnnnnnnnnnnnnnnnnnnnnnnnnnnnnnnnnnnnnnnnnnnnnnnnnnnnnnnnnnnnnnnnnnnnnnnnnnnnnnnnnnnnnnnnnnnnnnnnnnnnnnnnnnnnnnnnnnnnnnnnnnnnnnnnnnnnnnnnnnnnnnnnnnnnnnnnnnnnnnnnnnnnnnnnnnnnnnnnnnnnnnnnnnnnnnnnnnnnnnnnnnnnnnnnnnnnnnnnnnnnnnnnnnnnnnnnnnnnnnnnnnnnnnnnnnnnnnnnnnnnnnnnnnnnnnnnnnnnnnnnnnnnnnnnnnnnnnnnnnnnnnnnnnnnnnnnnnnnnnnnnnnnnnnnnnnnnnnnnnnnnnnnnncacaatggcgaattttaacataaaacctggtaagttaggccaggcgcggtggctcactcctgtaatcccagcactttgggaggccgaggcgggtggatcatgaggtcaggagttcaagaccagcctagccaagatggtaaaaccccatctctactaaaaataataataaaaaattagccaggtgtggtggcgggcgtctgtaattccagctactcaggaggctagggcagagaattgcttgaatctgggagatggagattgtgggtgagccgagattgcgccactgcactccagcctgggggacagagtgagactctgtcaaaacaaaaacaaaaacaaaaaaaactggtaagttctgataaagtttctgataaggtttgactacttccagcacagctaggggcatggctaactccacgtgtccccaggccttacctagctggaaagcaggcaagttaaacaattttcaaaagccaaaggagtagcttatgatgttaaaggatttagcaaacctagtatttgaacataatgtacaccacatgtttacattttgaagacaactgtatttttccaataatcttgaaaactgtctttatttcccaactattgctaaagtcacatgaactaaaaggcattacactttctacttttctgacaaaatatttgacttaagcttttattattattaaaccaattaatttaaaatcttacagaggagatatacgtgacttctactttatatttaaccagtttgcatagagggaaagagcccagagactgactcataagaaattcttatcctttcaccggcatgccagatttcagggttctctctttcacgcgtgtccctgtgaagagaccactgaacaggctttgtgtgagcaataaagctttttaatcacctgggtgcaggtgggctaagtccgtaaagagagtcagcgaagggagataggggtggggccgttttataggatttgggtaggtcatggaaaattacagtcaaaggggttgttctttggcaggcacgggcaggggacacaaggtgctcagtgggggagcttttgagccaggatgagccaggagaaggaatttcacaaggtaatgtcatcagttaaggcaggaacaggccgttttcacttcttttgtgatccttcagttacttcaggccatctgggtgcatacgtgcaggtcacaggggacatgatggcttagcttgggctcagaggcctgatattcctgtcttcttatattagtaagaaaaataacataaaatagtgttgaagtgttggggcagcaaaaattttgggggtggtatggagagataatgggcaatgtttctcagggctgcttcaagcaggattaagggcagtgtgggaacctagagtgggagagattaagccaaaggaagattttgtggtaaggggtgatattgtggggttgttaaaaggagcatttgtcatgtagaatgattggtgatggcctggatgcaattttgtatgaactgaaaaactaaatggaagacacaaggtctgaataagagaaggagaaaaacaggtattaaaggactaagaattgggaggacccaggacatccgattagagagtgcccaaggggattcagtgtaattacttgtttggttggtgagtttttgggctctattcttgacagagtcctttttttaagttggaggctgagtttggtgaggtgtgtttttaaaagaccattagtccgttttacctttcctgaagattgaagacggtaaggggtatgaaggtttcactgaataccaagagcctgagaaactgcttgagtgatttgactaataaaggctggtctgttatcagactgtatagaggtaggaaggccaaaccgaggaattatstctgacagaagggaagaaatgatcgtggtggcctttcagacctacgggaaaggtctctacccaaccggtgaacgtgtctacctagnnnnnnnnnnnnnnnnnnnnnnnnnnnnnnnnnnnnnnnnnnnnnnnnnnnnnnnnnnnnnnnnnnnnnnnnnnnnnnnnnnnnnnnnnnnnnnnnnnnnnnnnnnnnnnnnnnnnnnnnnnnnnnnnnnnnnnnnnnnnnnnnnnnnnnnnnnnnnnnnnnnnnnnnnnnnnnnnnnnnnnnnnnnnnnnnnnnnnnnnnnnnnnnnnnnnnnnnnnnnnnnnnnnnnnnnnnnnnnnnnnnnnnnnnnnnnnnnnnnnnnnnnnnnnnnnnnnnnnnnnnnnnnnnnnnnnnnnnnnnnnnnnnnnnnnnnnnnnnnnnnnnnnnnnnnnnnnnnnnnnnnnnnnnnnnnnnnnnnnnnnnnnnnnnnnnnnnnnnnnnnnnnnnnnnnnnnnnnnnnnnnnnnnnnnnnnnnnnnnnnnnnnnnnnnnnnnnnnnnnnnnnnnnnnnnnnnnnnnnnnnnnnnnnnnnnnnnnnnnnnnnnnnnnnnnnnnnnnnnnnnnnnnnnnnnnnnnnnnnnnnnnnnnnnnnnnnnnnnnnnnnnnnnnnnnnnnnnnnnnnnnnnnnnnnnnnnnnnnnnnnnnnnnnnnnnnnnnnnnnnnnnnnnnnnnnnnnnnnnnnnnnnnnnnnnnnnnnnnnnnnnnnnnnnnnnnnnnnnnnnnnnnnnnnnnnnnnnnnnnnnnnnnnnnnnnnnnnnnnnnnnnnnnnnnnnnnnnnnnnnnnnnnnnnnnnnnnnnnnnnnnnnnnnnnnnnnnnnnnnnnnnnnnnnnnnnnnnnnnnnnnnnnnnnnnnnnnnnnnnnnnnnnnnnnnnnnnnnnnnnnnnnnnnnnnnnnnnnnnnnnnnnnnnnnnnnnnnnnnnnnnnnnnnnnnnnnnnnnnnnnnnnnnnnnnnnnnnnnnnnnnnnnnnnnnnnnnnnnnnnnnnnnnnnnnnnnnnnnnnnnnnnnnnnnnnnnnnnnnnnnnnnnnnnnnnnnnnnnnnnnnnnnnnnnnnnnnnnnnnnnnnnnnnnnnnnnnnnnnnnnnnnnnnnnnnnnnnnnnnnnnnnnnnnnnnnnnnnnnnnnnnnnnnnnnnnnnnnnnnnncctcctttctattattgtacaccttgaaggcaaggttgattaattcccattgcgaggtttgagggccggattctaatttttgaagcttttttctaatgtcaggggctgactgggtgataaaatgcatattgagaataagacagccttctgacccttcagggtctagggctgtaaagcgtctcagggttgctgccaaatgagccatgaactgggctgggtttttatatttgaggaaaaagagcctaaacactaactgatttgggagagttcggataaagaaaaaggagcattaaccttgactatgcctttagctccagccacctttttaagaggaaattactgggcagatgggggagggctagttgcagaacgaaactgtaagctggactgggtttggggagagggggtgatagaaggattatagggtggaggagcagaaactgaggaagaattggagcctgattcagcctggctggggagtgacctgaggagcagtctggggatgaggggagaggtcagatgggtcggtagaaaaggaagattggaaagactcaacaacacttggggttgggactgaagggacaggtgggagggaaaagaagatttgggaccaattgcattggaaatagactagggagggaacaaagaatgcctgggtgtcaggtacctcagaccatttgcccattttatgacaagaattatctagatcttgtaggatggagaaatcgaaagtgccgttttctggctatttggaaccattgttgagtttgtattggggttaagtggcattgcagaagaaaataagatgtttaggttttaggtcacgtgtgagttgaagaggttttaaattcttgagaacacaggctaagggagaagagggaggaatggagggtggaagtttgcccatagtgaaggaggtaagcccagagaaaagagaggatagagacatggagagaaggtgtgggggatgcctgccccccaggaaagtggagagaaaagggagggtagagacacggagagaagggaggtgcttgccccccaaattagtggtgcttgccactaagggtgaaggatcaaggcaggtgtccccgtggtgatcaaacacctctgaaatgtgggtgaataatcaagcaggcatccccgcagtgattaaacaccaagggaagactgtcttcccgagtctgtgaccagcgctggagttttgggttcacggataaaacacgtctcctctgtctctgccagaaaaggaaaggaactgaaattaagggaagggagagattgaaagatggcgccaagattgaaaggagaaagaggttgagagatagtgagagaggttggagaagagagtaaaaagaggctgcttaccgggtttaaaattggtgggatgttccttgggctggttggtctgaggacctgaggtcataggtggatctttctcactgagcaaagagcaggaggacaggggattgatctcccaagggaggtcccctgatccgagtcatggcaccaaatttcatgcgtgtccctgtgaagagaccaccaaacaggctttgtgtgagcaataaagctttttaatcacctgggtgcaggcaggctgaatccgaaaagagtcagcaaaaggagataggggtggggctgttttataggatttgggtaggtaatggaaaattacagtcaaagggggttgttttttggctggcaggggtgggggtcacaaggtgctcagtgggggagcttttgagccagaagagccaggagaaggaatttcacaaggtaatgttatcagttaaggcaggaacaggccattttcacttctttgtgattcttcagttatttcaggccatctggatgtatacgtgcaggtcacaggggatatgacggcttagcttgggctcagaggcctgacattctctccctgagtggccccagggaccctgcttgactgtatgcaaacaaacacattgcaatgaattaagaatattcataaatagtttacaaattttggagaaactaggcagagtgagagaaatatgactaaaattctatttgtgagagtatactcaacacacttaaagtatcaggaagcctaaaatccaaaaagttagtttaaggataaaaaagctagtatgctccattaattcctgcaggcccaacaaaggtagcttgggaattccagaaaaatggaatgaatgatgacttgctagaaatgcacaggaacacagaactaaatgaaaaccttccactaggaactaagaaaaatcatggtttttatatacatgcatacacaagcaaagtcagaggagaacaaatggcaaacaaatgaaaactagaagcaaaaacaaataagcaggaaaccaaccctaaattttcttattcaatttaccctggaggctacagtgttacatagggcccccaaaaacccacataatgaatattttattcctgatacacaattcagtatccttaagttcactaatattatcatacatcctgtgcaattaacaaattcactttaggcgtatgaccaataagtactccagcactatccatgcaaaacagtaaacatagtatgaagcaatgtaagcatgtatgtggaatttggttccacactaaatccagcttcatgcttaactatattaaaaaaaagagttgccaaactgccaatgcatttttacaatacttcttactttaatcaagactaagagctttaactataaaaatgttaattagccaaatgtttccaattctttatcaggttttaaagaatattttattatttaaactgtacctcatctttctcccctacttaatggttccttactacattgtttcataaataaccttttcaaaactgtaacttgaactaacttttagataacttctgaattagacaaaattattctttcctttttttagtaataaccctttcaggcactttttgtatacagaattacgtgttaactagaaaccttatcctttgtaatgtaaaattttagtgaaaccctaaaaagcaagaaatcctgaaatatcagatatgggcatttatagataagaacaattccacaattttagaaacatatttccccatatcacaaccctttcttacttggaaatgacccagatattaaatgagtgccaaaaataactttaaggttttaatttacacaaaaagtttacctaaagcatttatcccatttgctgtactcaatttttacttttaacaagggagacatgagacactaattaacatatgtaaaatgaacattggtttggtcctgaaaggtgggacaactcaaggcaaggagtgggcttggaggctttcagatcacaggtgggagacagatgtttacattcttttgagtttctgattagcctttccaaaggaaccaatcagatatgcatttatctcagtgagactttgaatagaaggggaggcaggctcgccccaagcagctcccaggttgaattcactgacatttaagaatatctagtggtggctcatgcctgtaatcccagtgctttgggaggctgaggcaggcagatcacaaggtcaagagttcaagaccagcctggccaatatggtgaaaccttgtctctattaaaaaatttaaaaattagctgggcgtggtggcgtgtgcctgtggtcccagcttcttaggaggctgaggcaggagaattgtttgaacccagaaggcggaggttgcagtgagccgagatcacaccactgcactctagcctgggtgacagagtgagactctgtctcaaaaaaaaaaaaaaaaaaaaaagatagcaaagacaaacataaaattcaaacaaaatgtatactgataatactgaaggcatttctatttttattccaccaataattttaaagctagcttgtttagtaaagttatactttaagtcacgtgaacttgaaaattgcttagacttatttacttaatttatgagtgctcttttacttataaggcaatttggtagacacaacatataacaatgtgtacatacaaataaacacatctagacatgtatacacacacataaacgaagattcaatagcttggaaccttagccatgagatagcaatacaagcttgccagtttttgccccaacagataatccaatgaaggctgtgaaccaaaattttggctaaagcagtctccatggcagtttgatttttaaaggccaaacctcccacgacttcaaagcagggtgtcacatgttaaccaggccccctgcttagagctgcagcacaaaagcctggatacatgcaactctattccactttccaattcaacagtaaacttcagattccaaacaatgttggggccaaacagcattgcaactgcggagagaaaattctaaggagggctagacctcagaacctctgccaagagcatcctctttggagtggctggggtccgcaggacccacagagcatcctcctgtggggtccaatcttagggtcccagacgtctctggctttaggtgggcatcacatgcaggctttcccctctggagcatactatgaactttataagagtagccatgaactgtaatgtgaactggatgctgcgtgggctttttttgtccttagctagttgagcactataagggaagaatttagcataagaaagtaaggtttaagcccccagaaacatttatgagtttgctccgagcagcaccgcatgtagggatcaggaaccataggcaaaaaagatttttwaaaaaagtccctcccgctttggggcagcgcaattattccctttcattcgtagaccttcaggcagtactggtgaccccagcctcaatttccaaggagctactaggaaacagccgctgaaagactgaaatagaaagagacaaaaaaagagaaaaaaaacataaaaaagacccaggtcccttaagcgaaccgggcggtggcagtcaggctgcttctccacgtggaaaccccttagtttcactggccacggccagaaacctgcagttgtctccgtgtttaggtggggcccagcaagggtcccaagttggaacagaaaagagaaagagagagctcctgtatggagcagaaaggaaagggagaaaaacgaatcccaaactttgggcttacctcttcctcctggctggctggccaaaatacatgttaccggtggagggtgtccaggttcttggtgtcttgaacaaagaatttgacaaaacgcacaaacaaagcacggaagggatgaagggatgtattgaacatgaaaatgcacaccacggtgtgggaggggcctgagtgtaggagctcaggggccccgttaacagaatttttgggagtttaaataccccttagagcattccattggttaattccataygccttatgtaaatggagaggatgaagtaaagttacaaagtcatttacagcatacgccctatggagaggatatttcctgtcacagctcaagtgtgaattggccttatgttccctgcctccagaccctaattatctttctgttttctgagtcacttccatctgaatcttgcaacatatccctgtagttggtgttattatttccccactttacagatggggaaactgaggcccagtgagaagaagggtcttgtcaatgtcacacaactcatgagagcaaagccagggcaggaactggaattgtctgacttccagctctgtgtgtcattatacttgaacttatagctaataaacaataaacttctgaataaatgtgaggaatttaaaatacaacttttgtgggtttttttcctaacacaaaggctgttcttgttttatacagagcaatttagaaaatacagagaaacacaaatgaaaaattgaagtcagatacaatcaattccaattgatttaacatttaagtatcatgaggtatgtgaatatactacatatgctgcttatgttgtctcacaacaatatatcaaggaattctttccttttttctctctctaatataaaattattttatattttaagagaaagtgatgttcagtggtcctcagacttttctggggaaagatctcgtttcgtttatttatatcttcttcctttttcttgatctatcttattaatatttactttttttgaaacagggtcttgctctgtctcccagggtggagtgcagtggtgccatcataggctcactgtagccttgaattcctgggcgcaagtgatcctccctctccctcctcagcctcccaaagtactgggattacaggtgtgagccactgtgcctggcctctaatataattttaaaaggcagcatagtagttcacagtatggattttttttttcgcgggttctttaaagtgaacatacaacctactcttgacttttttgctgttagacatgaggctgcaatggacatccttatccatcaagcattgttgctgatgtcagatcattgccttgggctagattcccagaagtggaattgatcatgataatagcagttcaagggcttggctgaacttggttaggggtatggagctagttagtgcaaagacacatggtagctggaaaaacactgaggggattttctgggaggccacagaacaagtgaaggcctgaaactcatcaaggtaggcccaggctttctggctcagtggttaaagcagcactatgagaggagagagagagagaacatgcacacacatgagcacacttggcttgtatctccatgtttttatgctattttgcctaaaagtgtatcttaattttcttcgataaaaggcagaggctagcaagaagtggaattttctgttgttttttagtagttgtatttttatttcttattttttgcttaaacaacagaattaattttctggcagttctggaaactagaagtcagagatcaaggttttggctgagttgcttgctttcttctgaggcctctctccttggagttagatgccatcttttccccgtgtgttgacatggtccttcctctttgtgtatccgtgtcctcatctcttcatgtaagaacaccagtcatatgtaacagttgtatgtgggtaggcacattggctcaaacctgccatcccagcactttgggaggctgaggtgggaggatctcttgagcccagaagtttgagaccagcctgggcaacatggcaaaacctcatctctacaaaaaacacaaaaattaagcatggtggtgcctgtagtcccaggtacttggccgggctgaggtgagagggtcgcttgagcctgggaggtcagggctgcagtgagccgtgatcacaccactgcactccagcctgggtaacagagaccctgtctcaaaacaacaataacaacaaaaacccagttgtatttaatacagattgtctgcaaagtgatttgcaagcctgtctcccctgcctgtatgttggggcttgatgttttactgaagttttattttaatagagacaaagcgtgttgttgggtggcctctgactcttagggtcagggtggccactctcagaatttcagttgtagagtctgacagggatttggcctggaatatggcctaccttgcaagctatagtgagtcactctagcagtgacatgaaagtgtgccatggttctgagctctgtggacaggtgagaagctggggctgctgtaggtgtggacacaggaagaatgcgcaaggagtggaggacttgctggtccatggaaggctcgggggtggctttgggctggccctggggatgtgctgtgggacagcagcaacagtgatcataaagctstcacttgtagaatgtttaacaaaggtcacatccatatacttcctattgtcttgtccttcagcagcgctgcgagacaggtactgtatttgtctccattttacagaagaggaaactgagactcagaggggttaagggcctcgactcaggtcccacagtcagcaagttgtggaactgtgaggcagctgtgctgagcctgtatcyatagctctcctcggatccttccatcagcccctctcccccacccctccagggagaagctcggcaacgtggagtcggtttatgtcatcgaccctgaagatgtggcccttctctttaagtccgagggccccaacccagaacgattcctcatcccgccctgggtcgcctatcaccagtattaccagagacccataggagtcctgttgaagtgagtcctgggccatctcccagggactggagggaggtggtggggagctgtggagagggcagaggctgggggtgaggggctgaggccaggcttgccctgtgcctcctagcagggcctctaggtgaatccccrtcmttttcctgcctccctaaaacaaatgatggtgatgatgatgatgatgatgatgaattgctctgccagccttcagggaaatggccatgctgaagatcctaatgaataattaaagatctggcaaagttctcactgactggtttgctcactgagtcccaccttactgagcatccttgatgaatcaggacttgtgccaggaactggagatacagtgacaaatagagcagggacctgccaccgtgagtcccatacaggctaaaggggcagtgagacatttgtcctacatggggacagatcagtgtatttaagtgtagtggatactgttttctacgaaattgttcataaatttttttttattttgagatgggatctcattgtgtcatccaggctggagtgcagtggtttgatcatggctcacagcagcctctgccccccggcacaggtgatcctcccacctcagcctcccaagtagctgggattacaggtgcgtgtcaccacacccagccaatttttacatttttagtatagatgagattttgccatgttgcccaggctggtctcaaacccctgggctcaagcaatcttcccgcttcagccttccaaagtgctaggattataggcatgagccaccatacccaccccatcaaaaatgtaaaatgagggtcagggcgcattggctcatgcctgtaatcccagcactttgggaggccaaggcggacagattgcttgagctcaggagttcaagaccaccctgggcaacacagtgagaccccatctctacaaaaaataaaaaataaaaaattagccgatgtggtggcacatgcctgtgttctcagctacttggcaggctgaggccagagaactacttgagcctaggaagcagaggttgctgtgacgagagatggcaccactgcactccaggctgggtgacagagctggatcctgtctcaaaaaaaaaaaaaaaaaagaaaagaaaaggtaaaacgtaaccatatcaagtgtgggtaaggctacagagcaactggggctctcatctgttactggtgggagtgtaaactggagccactactttggaaaatggttggacattttctcctaaaatggaatatttgcatacctgtgacatagcagtttgatttcagggatatactccaaagagtatccctgctttgggggatgtgtagtagaaggtttgcagtggtaccgttcatgatattaaaaaccagaaagctactgaaatgcccaataggattataagtgagtgaattgtggtacacaccagtcaaaatgaagggactcagtctcccacagcaatacagatgatacttggaacggtgcaactaagtgaaaaaagcaagtctggcaaagcatgacagcttttctttctttctttttttttttttttttttttttttgaggcagagtcttgctctgtcacccaggctggagtgcaatggcacgatcttggctcactccaacctccgcctcccgggttcaagtgattctattgcctcaagctccggcgtagctgggattatagatgcccgccaccatgcccagctaatttttgtattttcagtagagacggggtttcaccatgttggccaggctggtctcgaactcctgacctcaggtgatccacctgcctcggtctcccaaaatgctgggattacaggcgtgagccactgtgtctgaccgacagctttttaaaagaagttaaacactagtatatattttgtaatagtaccttttgggaataaatggagatcagataaaattagacacaaatgagagcaagggattctagtgggtggtctccttagaagggaacaaaggatgtggaaggaccaggagggcaagtgtaagttactgtcaagttcctagtttctatggtgggtggtaagtttgtgataatattcttatcaacaaaaacacccccaagtcacgaagaggactttgcatggattgatgaatttcaagagtgtgcatgaattaaggtttattatgaccaacccagttcggggcacctgaggtcccccgacagaagtgagtaatgggacgtgttgggggtgcagaggaggagaggctggtcaattttgtttgtgcaagagtcagaaaatgttatatagaggggccctggagtgtcaaaggtgagcatcggccaggaggaagtgggagtggcatggaaggcatgcctgcagctgaggcaaagactggagagactgaaagttacacaaagggytctaagaatatcagttcctggccctcagcagagggagtggaggggagttggagttttgttccccttcactctcttttttcctttctcttctcccagccaggcagagcagggaggaggtgagaggcagagggtgctcggagaggtgagggcagaggccctggtgggagtgctggatgctgtgagctgtgactcagcttcctgggaaaactgagtcagccccctctgtgttcaccaggcctggggtctgtgaccatgagggcttgtgggcccatgttttctcaggaagtcggcagcctggaagaaagaccgggtggccctgaaccaggaggtgatggctccagaggccaccaagaactttttgcccctgttggatgcagtgtctcgggacttcrtcagtgtcctgcacaggcgcatcaagaaggcgggctccggaaattactcgggggacatcagtgatgacctgttccgctttgcctttgagtgtaagggggcttgcacctggctggcagtgggcatgggggtgggaggactcagtgttcactctcttaccttgaggttcagtacagaccctgcagaggcattgagactgacttctgggatgagccgctgatcatgtcctccactgcctgctactcagaggcaatttaagaccaccctgggcaacagagtgagaccccttgctctggggttctctcatctggcattctctctcatctggcatttgtgctgtaggagcaagggtccccaaagtacaggtccctattgccaccatccgccaaagccagagcttggcttggaccttcattctgcaagtctccacctcctgggccatagacctttggagtctggtagggtagaggagagttcagtggttaatctgaggtaggcattgaggaatctgtaggagttatctagatggggtaaggaagtcaggcagtataggtagagggaaccacacatacaaaggccctgtggcttgatgaagattgtgtggtcacagcaagagatttggggtgcccagagctttgtatgaaatcagtattcaaattactcacctggtaggtggggaaaacttgaggctgttgtaacttcttaggtccagcaagactaggtcctggatggttaattatccagggatttatgaccctcagtctcctttctgacctgtttcaggaagtatttagccaattcagccaattacagatgaggaatctctcttggtggaagcctgggcagagcagttgcatcctgggctaggccctctctcagctctgctggagaccctgcttcccacctttcaggtcctccacatgcccctctgcaggacctgtgtggttgccagaggtcagctttctcagccttgcatcttagccctttgggactcaggcctcaatttatttactgaaggaggctgagggtaggggcaagagatcctttgtgctgagggaggtgagggtggaggagtccctgggagttgtggctctcagatggccccgtcagaaatggctcctcagcctcttcctctccctgcagccatcactaaygtcatttttggggagcgccaggggatgctggaggaagtagtgaaccccgaggcccagcgattcattgatgccatctaccagatgttccacaccagcgtccccatgctcaaccttcccccagacctgttccgtctgttcaggaccaagacctggaaggaccatgtggctgcatgggacgtgattttcagtaaaggtgagggcttctctggctgtgctctcctcctcggagccccaggcctcagccggctcctttgtcccacgctatgtcaatgggcgctgacttgacctgtaggaaacccacactgtggcgggcaggcgtgggtgtcaggaaggccctgggacccctggaaatggcggatggaaggctggctgttggggattattagatttttctggaaaaagaggagcaaagacatctgtgatcttcttcaaaggagctcatgctccccagagggcaaaggaccagtgtctgagccacggctgtgctggatgacagggacttgggtgggagagatggggaaggttgggtggagaaggctcgtcagggtatggcagagtcaaatcccacctctgccccttacagccatgtgaccttgggcaagtgactatgtctctgcacctctgttatctgtaaaatggggatgatgtcacataccccaagaattcgatgaaaaaacagatatgaagggcttagtacagagtacgtgctcagtaaaacggcagcctaagaagcacagggctccggaatccccaggcccttggtgccacctttcaccacagactgccctccttcccacccgcctgcagggaacctcactcttttttctttcctccttccccacagctgacatatacacccagaacttctactgggaattgagacagaaaggaagtgttcaccacgattaccgtggcatsctctacagactcctgggagacagcaagatgtccttyraggacatcaaggccaacgtcacagagatgctggcaggaggggtggacacggtgaggtggctgtaggggcggcaccttgttgccccctgtgcccacgtgccccttccccaccaggcccctygttgtctgaaaccctgttgttcaaggcgttcctactcatgtaggatatgtcttcctccttgcctccatttccaaagcgctaatctcctaagatggtggggtcaaagtcaagtcacccagggcatgatttgaggatgatcagcyatttttctttgcctgtgagagaggagtggccgggcatggtggtgaggtccaggttccacgtagagtctccacaggaggaggtcccctctggaggcttgctctatcagagccctgctgatggaggacaatgcccccagctcctggtggagaacacactcactcaaatccagggaagcaggcaggagcccggaaacattgggaggcccaggcatttgctgtgggctctgccgtccatggtctttttgttgtccttcctcctcccctttccagacctcagtaccctacggtgcccccaacgcccagaggcatccccagtgctctttccatagcagcatggcaccctagaaacttctttctttggatattaagaataatcagtcctggccgggcgcagtggctcatgcctgtaatcccagcactttgggaggcagaggtgggcggatcatgaggtcagaagttcgagaccagcctggccaacatagtgaaaccccatctctactaaaaatacaaaaaattagctgggcctggtggtgggcacctacaatcccagctactcaggaggctgaggcaggagaatcgcttgaacccgtgaggcagagattgtggtgagccgagatcgcaccactgcactccagctcaggtggtagtgtgagactccatctcaaaaggaatacagtagacctcaaatgtcctcacgtggctcagaggggaggggtgtactggtttgctagggccrctgtaacaaaatggcattgactgggcgatttaaacaacaaacattgattttctcacagttccggaggctggaagttcaaggtcaaggtgttggcagggttggtgcattctaaaggcctctttccttggcttgtagatggccgtcttctccctctgtctcacatgggcttccctctgtgtctgtgtcagaattgtctctcctcatgaggacactaatcagaactggattaggatcctcctcaaggacttcattttactttaaaatctttaaaggttctatctccaaatatagtcacatttgaggttctgagggttaggacttcagcagatgaattttgggagggggtatacagctcagcctataacagggaggcagcagtgtgaacggaggaatagcacactgcagtgacagaggcaagcacctgccactgacaaagctgagaggtggggagtggctaatgtggccatgaaggacacggagaaggctccacagaggagctaaaattcaacgtgcgtgtcttgcaggctgttgccaggaggagagagaaggaatagcatttcaggactagggagaagcacatgtcaagccccctgggtgaatcactttcattcccaggtattatatctgtgttacactctgatgaaggagtttccatccctgagacagactgcaaatggagcctttgagcataccttaaacatagttcattgtctattacgtagaagagatcttcaaaaatcactcaccggcaccaaagaaacgattactgtgaggtcacatttattaagcacatactatatggcaggcagggtcctaagctgtttacatatgttacctcatttaatactcacaaacaaccctctaaggtatgttaccatcatccccctttttcagatgaggaaagtagagcacagagaggttaaataacttggtcgaggtcacacagctagtaacatagttaaccaccttattaaatcccaagtacatctctatggcaggccttggcagtactgagatgaatacacacatttgattagagtcttgcagagggagcacatccttccttcttaggcggggaagggaattccaggaagaggacctagcgtggggaagacttctgggcttcaggggctgtgtgccactccatgtagctggaacattaggtgtgtgttggagagaggtggggagtggggtattggggagcagcaggcaggtgttgaggggccctgtggctcaggcctgagcctctgtatttcatctggaggctctggggagccaggcaaggattttaagctgagaaggagctgtgtgttgtttcagtttccgcatctgaaaaagggggatgatggtaacataccttagaggtttgtttgtgagtattaaacgaggtaacatatgtaaacagcttaggaccctgcctgccatataatatatgcttaataaatggtacctcacagcttgtcattgttgcccctgccaggaggagggaggtgggtgtctaagtctgttggacaaaaatatgatccttggtaagataatgtgtcaacaacccatgtcctagtccccaggagggagggctgctccaggctggagtcccaaacgggcctggtttgtcatcattgaggaatctgggactgtggggtttgatgagggtcactcagatctctggcgaagggctagtggtcacagcctctggcttacgttgagattagctgattaatttcaacacacaccacaccctaattgcaacactgataggaaacatccggctggtctggtttcagcttctttgagccttacttgaagccatgttgctataggtgaagcctaaggttttaggaagttctactggaaagaggggtggttgtttaacaaggcatttcaaaaggaatggcagtcattctggagtgcaatcattacagaaggatttggcctctaagggcctctggaattctttggaagaaggcattggctgtgtagctgacactctactcactgtggacatgrgtgggtttttggtgacatgagggacgagggcagggacaagtgctgccctgaatgttcctgcctggccggcaagaaagscttcttggacatttgccttttagacaatggaatgtgttttgctcttgcagaggatggtcttggagactgggatggggttcggggagaaagaggttcttggaaatgaaaatttaccatggggtcaaggacctcaaggggccccggagtgacaggccctcctggtcttctgtataccctactccccaccagacgtccatgaccctgcagtggcacttgtatgagatggcacgcaacctgaaggtgcaggatatgctgygggcagaggtcttggctgcgcggcaccaggcccrgggagacatggccacgatgctacagctggtccccctcctcaaagccagcatcaaggagacactaaggcaagcccacaaccacccatgccgcccccaactccaatccctgggcagggccagggaagtgcccggggaaagggttacgaggatgggctggtggaggaggttggaagcaggaagtgaaaagtctggaggagaaagaaatagagccagggccctacccccaggtccccccaggctgctgcagctagggctgagatgccacacagggtgtggggctccggcggctgtgtccagcctttggggccatcagcttctgagtgccctcctcccgcagacttcaccccatctccgtgaccctgcagagatatcttgtaaatgacttggttcttcgagattacatgattcctgccaaggtaggtgcagccagcaggctgcaggctctgccagtcagagagggctggggcaggctggaattgcagacagagggtggcactggggccctggtggggcccttgatggcagcagtctaagtctgaatgaagggcagaggtggtgggcatggtgggcggtgacctctaggatgttattggaacccagggttaggagggagacttcatgatttgcctgggtctgaggaaagggtgggacaatcatcctggccttgggtcttcagccatccccatttggtgggtaaggattacagaggggcggggccttgttcaaggctgcacagtgggcagaatgtcctgccctggagagctgggcagccatgctggggagtgggagtggtggtgagagggcaggggactagggaagggggttttgtgctcagggctgtggggaagtggggcttactcaggcctctgatcaccttgccccagacactggtgcaagtggccatctatgctctgggccgagagcccaccttcttcttcgacccggaaaattttgacccaacccgatggctgagcaaagacaagaacatcacctacttccggaacttgggctttggctggggtgtgcggcagtgtctgggacggcggatcgctgagctagagatgaccatcttcctcatcaatgtgagtcaagctggggacatctaggcaccctgggctggccctggccctaatgaaggcaccaatcttcctcctcctatctctgtccagagcccaaggatgtcagtgctggggcgcatctacctccagttacttgctctcgctctctcccacagttctctgctgccccctctttcgggctcaaccactcatcacccactgatgcccctggccatccattccccatggtggtgatgggatgggataggactgaggtttgtagacaagttaaggtctaggcctaaatcaaggraatgcagcactaagggtgcattatcaggcactgtgcagggttacaccaggagctggtggtgaactccttggaactcctcaaatcacactccacaggcactgcctatgggtgaattggcctggctagggagacagatcctcccctgccctcccctaaacctaccatctgcctttctcagatgctggagaacttcagagttgaaatccaacacctcagcgatgtgggcaccacattcaacctcattctgatgcctgaaaagcccatctccttcaccttctggccctttaaccaggaagcaacccagcagtgatcagagaggatggcctgcagccacatgggaggaaggcccaggggtggggcccatggggtctctgcatcttcagtcgtctgtcccaagtcctgctcctttctgcccagcctgctcagcaggttgaatgggttctcagtggtcaccttcctcagctcagctgggccactcctcttcacccaccccatggagacaataaacagctgaaccatgtggtgtcttgcgttccatcagactcattaggtgttcatcactcccgtggagatgcttcctgtgttaaagcaggatctgggcatgctcaggagaccccaggtagccacacttgaagccacctctgctgggaccccctcacccatggcagttcaggagccagcagaatcaactccaggctccctggggcaaggggtgaggcagagtggggcagaggaggggaggcaactgctactgtgccaggagctacagaagcatcaggcagaaggacaaaggagaactggggagttctgtgggtggccccaagaagtgtgggccagtactgcctttctgagtggacctgccccacaggggtaaggctcgcacagggctctgcttgggtgaactctgggtgggagttccctgtggggcatgaggacttcctgccaaggcccagccagagtcctgggcatggcaaaggccgagaactgtgggtgagaacccctgctactgaagggctggtgtgaggtggctgactggggatgagaggccagcctgcttcctttaccattcccgggcctcctctgggcttgctccaggcctcgtgttcttgctctgggggcttgcgcccccttgtccaagggtgggaggtggggatactattctgcagcagagccgctggtttgtcatttggactgaatgacactggtctcgacttccgccccctaatcccttggggtctcccaactcctgacctgattcctcttggccctcggctatccaagtctaagtcctgcaggcaggtgggggagctagtccagctgaggccagtggtccagctggcctggcctctcctgcccgaagctgtgggatctggatccactcttggagcccttctgctttccccaccacaaaatcctcttccctgttgtctttgtctttccttcctgtgtcctttttcttctctggtcctgagtcagctttgactcagaaatgttatagctggaaagaggcttacagccaatgaggtcaagctctacatggaatagatggggacactgaagtccagagaggttgcttgggtcccttgaggtcacacagcctgtttgcccccagaacctgggcctcctgactccctgtaggtgcctccttccccctggcccaatctgctctcctgccccggctacatttggacacatcattgccagctcagcctagtggcttaatggagtattccacaatgatacgtgactgccacaggaaggcttcaagcctccaagtctttccctttccaagagacagacaaaccaaacttgaaagaaggaatatcagacatgatagatgttttggggcagatgaaaaggacaagcctccctcgtatttcccaacagagctggtctctggtggccttgcttcttctccgggtctggaaggggcccgtctccctggcccctgctttggaaggcctcttctctccaccctcctgggtccactgtggcccttggctttccaaagatgctggctcctggggcaggcgggaggctgtaaggctgcagcagaagacccaggcccaggcccagagtgaggtctaggaggaggaagcagggcccccaggctgccctgctccaggaaagaggaaaatgctcacagagctacaacatttaataacgtcatttttagggggcggtgatgagactccccagcacacagggaaggaggcctgctctggggctcaggtctgctgagagttagcggtctccttctgggggctcaagggcttgttgagcttakagtctgagctgggcagcaggggctccagctctgagggctgcttgaggtccatggagtgggtgagggcactctgtggtgtgcaaagcggggtgcrtgagtaccccccattcccagggggtgacctgctcaagggcatattgcctgacaaaccaggcctcagagtatccagaatccagtgggccatgacctggcaaagatttctaaacccattttgccacagcaggtgacacctaatttctccaagggtccccagggctcaggtgagtgtgcaaaggttgcctttgttccttgcctgttccctcatcctttccaggcctttcccaggagccgctgctgagcttctggccacgggcaaagcacagctggctcaagagcaggagaagtcagggtctttgctttgcggggctgggcggtcccggggttgaacttgaggggcagttgtgagcaggcctgtttgttctcgggaagttggcaaagtggagcctacatcgtggccatctgagaagggtgtgctaatttgagaatcttaggctctatggattcaggggggtagggccacaagctactctgcccatgagcgcagccagtcctaaagcacagtgtcagggcatcctggagatgcctgcatggacccctcatccacagtcatctccttgagtttcatagcaccccatgggggaaagggtagttttggcaggggttttctgttccccttagacaggtgggggaattaagaccgagccttcggttggtaatggagcaggaatgggagcctaggactcctgacccccagccctggagttggctccacaatggcttttctcagggcccagtgactttgggggtgcggtggcttcctgctccaccacctgaacccctgggagctactccaggggggtcactcacaggctgttctatgatgatggagttcgaggggtgcctgaaacctttttcttgctcctgcagccgtgtggccagatcctgcttctctcgtccccagcgtcgagctgagtcctctaactgcagacacagagagggacaattggaggaccatgggcagcagggctaatccctgatggccaggacaaccagggcctgagcctgctgtccaggaagaaagcaaagctctgggccatgtgggcttgacaccttcccgagacctcaggggtggcggggtgagggtgagggggccaaacagtcaggcagcctgaccaagacacagatggacatttcaacaacatactgagctctgatcctgagtccacactgatccctgattctggtcatagacagagcctgaccctggtcacacaatgaaccctgaccctggatatacactgaaccctaaccctggtcatacacagaaccctaaccctggtcatacacagaaccctaacctcgttgtacacggaaccctgaccctggttgcacactgaacgctgactctggtcacacactgaatcctaaccctggctgcacactgaaccctgaccctggttgtatactgaaccctaaccctggtcgcacactgaaccctgaccctggttgtacactgaaccctgaccctggtcacacactgaaccctaaccctggtcacacactgaaccctgaccctggatgtacactgaaccctgaccctggtcacacactgaaccctaaccctggttgtacactgagccctgaccctgattgtacactgaaccctgaccctggtcacacactgaaccctaaccctggttgtacactgaaccctgaccctggttgcacattgaaccctaaccctggtaacacactgaactctaaccctggttgtacactgaaccctgaccctggttacacactgaaccctaaccctggttgtacactgagccctgaccctggttgcacactgaaccccgaccctggccacacactaagccttgatcctggtcatagattgagcctagactctgctcacacactgagccctggttataggctgtgtggtgagcctgatccagcctcatcaactcctgcatctcacccacctggctttccagggacaggatccggctctgagcgtgttccagcttggccaggaggttgaacttgtctgaagtaccagagaggagatcctgtgggcaaagcacaaactcacatttggccccagctggaggctgtggcagtgtgagcttgggaaaccataaggtattgaggaagaaaccagtcaggcctgagttcagactgagctcccgaggcagagcgtcagacctgggccgaaccctcttctggaagttcagaacagggtctggcatgtgcttttttcacagctgtttcccacacagattttgagaatacgaagttttgacacaacattttttttaatgtaaaatgcattagggagccccctataattaacgcactgggagtctttgagtgaagtgaagaacctgtgaggcagttgacctcatccctcacactttacctggatgtccatgagtcaggtgtgctttcaacagaactcacctccggcgagtcctgggatggagagaaaactctcctgtgcccctgccctgcccaatattctgtgattccaaatgttctgctttggggtttatgtaaagcaaggggcccctgaagcatcttcagaggtggagcagggcctgggcatttctgggccctgggccacccacctgtgcgggcagggtctctgtgcactctgagtggcctgggccatgcgtctcttgtagcctctctgtcaagtctcctcctgctcccaactccccggggtccacctgggatggaaaagggctctccaaggctgcaccaagaccagggaatgctccagaagggagttttgagaggcctgtgtagggtccaggtggaggccagccaggtgaaaaaggggtcagggttcagggaccaagggtcaacaaggggcttgctttctcctgggatgctagatgaggttaaaggtgaagtgttcggggacacacattccgcaggagaaaaagaccaaggcctgagagctgattccaggagcccccaggcagactggagaccctgggaagcttagctcctggtcttgatcttcaacttgggttgtaccatgggtgatttctgggcacccagtgaccggcataggcaggcccaggtcaagggcctcttaccggcagggcctgttgctgcagaatgatgggggcctgctggtggcggttcttatccagctccgtccgcagcttcgcgttttctgccagcagcaccgagtaaagttcaaccggcaggttctctcccatagaacscaagggaaggccagaggctgagagcatagggaagcctagagacacggccacagatgttggtgagatgggctctcctgcttcccatgtccctgtcctgatctgctccagcattttgcttcaatctgccacccctcccctctactcccaagccttcaatggctccctaccaccagtgggatcaggtgcacacaggctgtccttctaggctctttagaacctgacctcaacgttctctctaactcctcatttgtcttcagtgtatttcagctcctcacctctctctcttcctcccttctctgatcctggaattcttctcactccctgggcctttgatctggctgtttcccctccctaggttgccttctcagtctcatccagactcctggatgacctcaggcttcctgaaaggccagcccagctttcattgcattctaaaggctcctagaaacaccctcctgcccctgagaccctcagcggtgaaggctaagcacagggctgggcacacaggggccctgggtgaggttgcacaggcaggctcagggaaatcccttgctttgggctggcctgatatggtgttacctggtcctttctgcttatcagaggctgattggcagttttaggtggcttttggttaatatcgatggggaagaaaacctccaaatcatttatttatttatttattttgaggcggagtctccctctgtcacccaggccggagtacagtggcacaatcttggctcacagcaacctctgcctcctgggctcaagtgattctcctgcctcagcctcccaagtagctgggattataggtgcccgccaccatgcccagctaatttttgtatttttagtagagatggggtttcaccatgttggccaggctggtcttgaactcctgacctcaagtgatctgccctcctcggcctcccaaagtgctgggattacaggcatgaacc

SEQ ID NO: 96015 - DNA, 19759 bp, Homo sapiens
  misc_feature (1)...(19759): n = A,T,C or G
tagtcaacatacctccagagtggctcaaatgaaaaagatcaaaaatatccagtggtggccaggcgtggtggctcatgcctataatcccagcactttgggaggctgaagtaggtggatcatctgaggtcaggagttcaagaccagcctggccaacatggtgaaactctgtccctcctaaagatacaaaaattagctgggcatggtggtgggtgcctgtaatcccagctactcggaaggctgaggcaggagaatcatttgaacttgggaggcggaggctgcagtgagcagagattgtgccactgcactccagcctgggtgacagagcgagactccatcagaaagaaagagagagagagagagagaaagaaagaaagaaagaaagaaagaaagaaagaaagaaagaaagaaagaaagaaagaaagaaggaaagaaagaaagaaagagggagggagggaggaagggagggaaggagggaaggaaggaaggaaggaaggaaggaaggaaggaaggaaggaaggaaggaaggaaggaagaaagaaagaaaatatccagtggtggtgaggatgagaagcagctggagcctcatacacaccgggtgggggtataaactggttcaactgcttaggaaagttggagtttttgtttgtttgtttgtttgtttgtttgtttgtgagacagggtctcactctgtcacccaggttggagtgcagtggcactatctcggctcactgcaacctcctccgcctcccgaattcaaacgattcttgtgtgtcaacctctcgagtagctgggactacaggtgcacaccaccacacccagctaatttttgtatttttagtagagacaacgttttgccatgtttgcctggctggtctcaaactcctgagctcaagcgatctgcctgccttggcctcccaaagtgctgggattacaggtgtgaaccattgcacccagccaggaaagttgtttggtagaatatattactgctggacattcacctatcctatgaactagcaattccagcctgagcagcaaacatgcattcaaaagcaggttcgagaatgctcctggatgggcacggtggctcacgccggtaatcccagcactttgggaggccaaggaggacagatcacctgagttgggagtttgagaccagcctgaccaacatggagaaaccccatctctactaaaaatacaaaattagctgggcatggtagcctgtaatctcagctactcaggaggcttaggcaagagaatcgcttgaaccgggaaggcagatgtggtgagccgagatcacgccatcgcactccagcctgggcaacaagagctaaactctgtctcaaaagaaaaaaaaaagatgctcctgacagcagggctcatcttagcccaacagaggaagcaaccgaagtatcaatcaacagttgaatgaatgaataaggtgttgggtattcatattataatggaataccgtgcagcaatgagaatgaactataactatgcccaacatcatgaatgagtctcataaaaaaagaatgttaagtaacagaaaccagaaaccagacacaagattatataccgcccactgaaatgtatacttaaaatggttaaaatggtaaattaaaattttttttaaaatagagatggggtctcactatgttgcccaggctggtcttgaactcctgggcttaagcgatcctcccacctcagcctcccaagtgctagggttacaggtgtgagccaccatgcctggccctatagtgttaaatgttatgttatgtatattatttcaccacaaccaaaaaagtgtaggtgggggaccatagaactgtacaacacaaagtgcatcttaatttaaactatggtcgtcggttaataataatgtatcagaggctgggcgtggtggctcacacctgtaatctcaacactttgggaggccgaggtgggcagatcacctgaggtcaggagtttgagaccaacctggccaacacagtgaaaccccgtctatactaaaaatacaaaaattagccgagcatggtggtgtgtgcctgtaatcctagctactcaggaggctgaggcaccagaatcgcttgaatctgggaggaagaggttgcagtgagctgagattgtaccaccgcacttcagcctgggcaacagaacaaaactttgtctctctttattttattttattattttttttgagacgagtcttgctctatggcgcaggctggagtgcagtggcgcgatcttggctcactgcaacctccacctctggggttcaaaggattctcctgcctcagcctcctgagtagctgggactacaggcatgcgccaccatggtcggctaatttttttgtatttttagtagagatggggttttatcatgttggccaggctggtccagaactcctgacctcaagtgatccgcccacatcagcctcccaaagtgctgagattacagatgtgagcctccacaccaggcctgagactctgtctcaaaacaacaacaacaacaaccagaatgtatcaatattcatccacgaattgtaacaaatatattacaccactgcaagatgttaataataggggaaactgcagagtgggggtggtaaatggccacttttacctccctcatcatactttccactcaatttttctgtgaaccaaagactgctctaaaaaaatctattagctttttaaaattccttggctcccctccaaaaagtgtacatatgacatgatctcatttatgtaaaatacaacaagcaaaacaaatccatgcaatagatgttggggtcatgggtacccttgagaaaggaacacaacgggacttcttggatgcttatgatgtctcttgattagagctggttatatgtgtgtttgttaagtttgcaaaaattcatcaagctacacatgatcgagctatacatgacatatgcacttttccatttatttatttatttttgagacagaatcttgctctgtcacccaggctggagtgcagtggtgcgatcttggctcaccgcaacctccgcctctcggattcaagcaattgtcatgccccagcttcccgagtagctggaattacaggtgtgcaccatcacgcccagctaatttttttttgtatttttagtagagatgaggtttcactatgttggccaggctggtcttgaactcctggcctcactcaagtgatcctcccacctcggcctcccaaagtgctagaattacaggtgtgagtcaccggtcccagctgacatatgcacttttctatattgtatcctgtaatttaatttttttaagttttaagaaaacattaaaaataaaaagataaatagtctgtcatacaggagaatttcaaatagtttatggagataatcccccctcaaggagaaggagcgtaatcccccactccttcggtgtgggctgtgcatagtgacttccttccaaaaggtacagtatggaaaggtgggaaaggagtaactttacagtgaagagacctgacacgcactaccttagccaggtgatcaaggtcaacatccacatctgtaagtcacattgataggatgtaaccctgatatgatgtgacgagaatggcacctaacctccaaggtcttcccaccaacaaaccataaccccaggcttaccatgagaagaaaaacatcaggcacattccaatagtgggcatcctacaaaatgtccaaccagtactcctgaaaattgtcaaggtcatcaaaaacaaggatatcctgagaaactgtcacagccaagaggaatccaaagagacgtgatgactaaatgtcatgtgatatccaatgggtcctggaacaggaaaaggacattaggtaaaacgcaaggaaatctaagtaaaccatgaactttagttaattagagagacagacagacagagagaaagaaagagtccattttctataaaaccgagcctaacctcaaaccttgacctttttcattgagtcatctgaacccaatggagatatagacaggaaacaactttcctcttctcccattcatggccttcaaacatgctctgtttctctattggattccccatccatctgccttggcatcttcacaggttgatcccacagttttctcattttcaggaataaaagcccactccagtctaaatcaaaacttccctctcacatccatgccgggcacagtggctcacacctgtaatcccagcagtttgggaggccaaggcagaaggattgcttgggcccagaagttcaagaccaacctgggcaacatggcaagacctcctctctacaaaaaaatgtttaaaaataaaaaaattagccaggcatggtgcacacacctgtgattgtggtcccagctactcaggaggctgaggcaagaggattgtttgagctcaggaggtcgaggctgcagtgagccatgattgtggcacatgaaccccaacctgggtgacagagcaagactctgtatctaaaaaaaaaaaaaaaagatagcaaacttccttttcacatccaatttaaggcttgtcctcctcctcctcttagatctgactgagatctgggtccatattaaagactcctttagtacaacaaacaccatatatcctcacgtaagtccatgaatatctgacatttctcatatctactttctctcgatttattgatagataggtatacattgttttaattttatgggtacatagtaggtgtatatatgtatggggtacatgaaatgttttgatacaggcatgcaatatgaaataagcattcatggagaatggagtatccatcccctcaagcaaggataaacctttgagttacaaacaatccaattacactctttaaaggtgtacattttttttttttttgagacggagtctcactctgtcgcccaggctggagtggagtggcacgatcttggctcactgcagcctccacctcccaagttcaagccattctcctgcctcagcctcccgagtagctgggatcacaggcacatgccaccatgcctggctaatttttgtatttttagtagagacggagtttcaccaggttggccaggctggtcttgaacacctgatctcaggtgatccgcccatctcggcctctcaaagtgctgggattacaggtgcgagccatcgcgcctggcctagaggtgtacattttttaacagaaccattcaaaaggaggttgtggggatcatgacacttccatgctacagcattaatctcctaagaataaggatacactcccacataccatgacactctgttcacacctaaaaaaatttacatttattccagaatatcatctaatctccagtccgtgcttacatgtccccaattgtccccaaaacatcttttatagatttttttaaaattttgtttaaatgccatatccaatcgatatggcaatcaaatgcaaatccatattgcatttggttatgtctcttagtctttttgcataaggggggcctctctttaggatgcaaaatctttatcatctcttcttttccacttggggacttgggctgaaaatcaggagtggctggaacacgcccatttactgtttggttttgcaggttgttggagggtactacagaagaacatccctctggagaggggccgtgagcctggttggcctagactgagtgccctggcagagctcttcctcatgtgtgcagtgggaaagaagcccagatcagtccaaaggcctaacccccactcccagaccctaccctactcttcagagaaataggctccctaccctgaaccctaaagacagctgtaccttcatccccagggacccagcaccccttctggcctatccccaaagagtcaccctgggtcttaggtagtaggtggagctgagggataatggcccaaggccaagagttgatccttccaactttgttcagtgatccagctttcatatcaggtgatcaggacaaccaggccaatctgatagggggcggtgtttataaaaaggccactcacctagagccagaagctccacaccagccattacaaccctgccaatctcaagcacctgcctctacaggtacctttcttgggaccaatttacaatctctgggatccccaactatagaacctggaagctagtggggacagaaagacggggagcctgggctaggtgtaggggkcctgagttccgggctttgctacccagctcttgacttctgtttcccgattttaaatgagcagtttggactaagccatttttaaggagagcgatggggagggcttcccccttagcacaagggcagccctggccctggctgaagcccaaccccaacctccaagactgtgagaggatggggactcatccctggaggaggtgcccctcctggtattgataaagaatgccctggggagggggcatcacaggctatttgaaccagccctgggaccttggccacctcagtgtcactgggtagggggaactcctggtcccttgggtatatggaaggtatcagcagaaagccagcactggcagggactctttggtacaatacccagcatgcatgctgtgccaggggctgacaagggtgctgtccttggcttccccattttggagtggtcacttgcctctactccagccccagaagtggaaactgagatgatgtgtggaggagagagccagcgttcatgttgggaatcttgaggctcctttccagctctcagattctgtgatgctcaaaggrtgagctctgtgggcncaggacgcatggtagatggagcttagtctttctggtatccagctgggagccaagcacagaacacgcatcagtgtttatcaaatgactgaggaaatgaatgaatgaatgtctccatctcaaccctcagcctggtccctccttttttccctgcagttggtacagatggcattgtcccagtctgttcccttctcggccacagagcttctcctggcctctgccatcttctgcctggtattctgggtgctcaagggtttgaggcctcgggtccccaaaggcctgaaaagtccaccaragccatggggctggcccttgctcgggcatgtgctgaccctggggaagaacccgcacctggcactgtcaaggatgagccagcgctacggggacgtcctgcagatccgcattggctccacgcccgtgctggtgctgagccgcctggacaccatccggcaggccctggtgcggcagggcgacgatttcaagggccggcctgacctctacacctccaccctcatcactgatggccagagcttgaccttcagcacagactctggaccggtgtgggctgcccgccggcrcctggcccagaatgccctcaacaccttctccatcgcctctgacccagcttcctcatcctcctgctacctggaggagcatgtgagcaaggaggctaaggccctgatcagcaggttgcaggagctgatggcagggcctgggcacttcgacccttacaatcaggtggtggtgtcagtggccaacgtcattggtgccatgtgcttcggacagcacttccctgagagtagcgatgagatgctcagcctcgtgaagaacactcatgagttcgtggagactgcctcctccgggaaccccctggacttcttccccatccttcgctacctgcctaaccctgccctgcagaggttcaaggccttcaaccagaggttcctgtggttcctgcagaaaacagtccaggagcactatcaggactttgacaaggtgagcccggggtgcaggtggcaaggggcaccttgcagggcctgggtgcagcccctccctcccagctccagcatgcccacacagctgctgtgttgccaaggcctaggaaggctctggacacctcagaccagctgtgtgacctggagccgactcttccccttctctgggcctcagtttcctcatccttgaagcccccttctcagggctcctcaaagcccccaagaaaaaagccctggaaatggggccctagcagagtcctgcaatgtggggggcctatgagtgagaaagctttcattctgcagaaacctaaaccccaacagaggctaatccccagctctggtgtcacgttgcttccctgtgttcacactaaycttttccttctttgaaattggacccctggtgttattgggaggaagggtcaatggggcataaaatgacactttaagccatacccagggctgctaccagctcctgctgcaagctgcaaccccctgcctagagaccaagttgggaggataggggggtacccagccaccaggtacaggccaggggagtggagcaacgttcagcctttgaccttggaagtgccagaggtgcccctaagcttgtgccccctcagaacagtgtccgggacatcacgggtgccctgttcaagcacagcaagaaggggcctagagccagmggcaacctcatcccacaggagaagattgtcaaccttgtcaatgacatctttggagcaggtaggaaccagaaccttgyccctccatccaacaatgcctrctgttcacccacagccttgcccagcccctcagtccatgaaataacccaccaaccctacaccagatggtacaacatactgagatctggcttgggatcagggtttgagcctgggctatgccaccaattcccagtggagaaacagcaaagtccttctcctcccctaggcttcagtttccccatctgaacaataaggtgttctctggcctgtaagtctaggcccctataattccagcagctaattctgaaacctgtatctcaagtttatgttgaagagacccagcctctgtcttcaggaaactcacaggctagggccagagaaagctaatgctggatacatacatagcagatacttgggaaatgatggtttccttgtttctgtcttccttctttcctcaccttacactacacggttcaggatttgacacagtcaccacagccatctcctggagcctcatgtaccttgtgaccaagcctgagatacagaggaagatccagaaggagctgggtacatgggggcccccaaccctatagccaggagaagccttganacccaggttgtttgttcagtctacaaacacctgttatgtgcctgctgtgtgcaagccctgggcacacagtagtgcctgcccttgcctagaagatgtgggaggttagtggggtcgcagacttgtgaatagacagtcttacataagagtgacatggggtataasaggggayaattcatggggcagttagggcagcccctgagctctgcttgtcctctgtgttctacagacactgtgattggcagggagcggcggccccggctctctgacagaccccagctgccctacttggaggccttcatcctggagaccttccgacactcctccttcttgcccttcaccatcccccacaggtgaggcctgccggttctgccctcccacctctaaagtgcttgccatgttttctcttcctggcttctcagccctggccctggctcagcatctccttcccgacctcgttccccacagatcccggcctcagtctgcccccatccagtccaaacataatctaacccccagctctcaggagaaagttccacttgtgatctcagcgctcattcccctctgttcatattccctccctcccagtgccctctgtgccagtcaggtcggcctcaccctcacaagcatgaccctattggcctccaatcttgctaacgctgaaccttctgcctggaataccttctagcctcttctctgaccaccagaatcctacccttgctcaaagtcaatgccgacacgagcttcctctccccagaagccttttgactcatccagctggcacagcttcattcctgatgtcttataggacttacagccatcagcccttgatcatgccctggaattttaacaatgtcaagagagttagtgagcatttacttctacccaaacgttgttctagttattcctgcagtaagaggcctgaatccccagccaggctagaaattccccggggctgccccaggctgcctgctgctttttttttttttttttttttttttcatagaaaataraaaaacatttatctgaaattgcctgcttcttggctccararaacagccaagtgcgcagccaggcgcaaagagaagtttagtaaatacttgctgaagttaaagaacaggacgcaaggaaragggaggatgtttctacctcttccctgttcctcccctcccctcccagtgtagggatggagatggcggtgggcaggctgtctggatggggtggaggtaggagcaacacatgccccagctttccagccctgagcctcacagtgccctcttccctcctcagcacaacaagggacacaacgctgaatggcttctacatccccaaraaatgctgtgtcttcgtaaaccagtggcaggtcaaccatgacccgtgagtacatacccctcacgaaaaaatgtgtgcaggttcagcagtcaggaaggctgtttgtccctgctaggaactgtttayataatgaaaggaggggacctcaattgctatagtctgctctaagtgacgatatttacaaaagtttcacaaactttagtgcacaggaatcaactaggatggccaggcgcagtggctcaagcctataatcccagcagtttgggaggccgaggcaggcagatcacttgaggtcaggagtttgagaccagcctgggcaacatggtgaaaccctatctctactaaaaatacaaaacaaaaattagccggacatggtggtgcgcctataatcccagctactccagaggctgaggcaggagaattgcttgaactctggaggtagaggctgcagtgagccgagatcgctccactgcactccagcctgggtgacggagtgagactctgcctcaaaaaaaaaaaaaaaaatcaaccaagacgtttgttacaggtgatggttcccccaggattctactgtggtatctaaggtggggtacctcaggcgattctgatgtgaatggctcagagacctctctttggaaagccccactttagtgtataggtagggggaccatatatataatttaccatccacactgggacatttgagtgtgaaaatgctatcaatgtttatgctagtcatcattactccaaaacaataaacataagccaggacatactgttgaggccccttaggaggcatattttgagtaggatgaagaaacgtatgtctttctttcttcctttcactttaatttttaaatagagacaaggtcttcctatgtggtccaggctggttttgaactcctgggttcaagggatcttcctgcctcagcctcccaaagtgctagggttacgggtgtaagccaccaaacccagcctgtttttcttcttttaatttcttttagataaagcattatttaaagtaaattaatattaaaaggcactatctttaaggctggtcattttagagagagctttgtaaaagaaataagcatcaggccaggtgtggtgactcatgcctgtaaccccagcactttgggagtccgaggaaggtggatcgcttgagctcatgagtctgagaccagtgaaaccccgtctctgcaaaaaaaaaaaaaaaaaaaaatacaaaaattagccggatatggtgcctgtagtcccagctacacgggaggctcaggtgggtggttggcttgagctggggaggcagagagagtgcagtgagctgagatcgcaccactgtactccagcctgggtgataggagccggagggtgtctcaaaaaaaaaaaaagaaagaaaagaaaaagaaataagcatcaaagttcagtttggttccttcccacctacccttcattgctttcaaagtgccctcacacttgtgttctcaacagaagtctccctcccccaggcacctcctcccagggyctctccagccctgaggtcccatctcctctgttcctcttgcagagagctgtgggaggacccctctgagttccggcctgagcggttcctcaccgccgatggcactgccattaacaagcccttgagtgagaagatgatgctgtttggcatgggcaagcgccggtgtatcggggaagtcctggccaagtgggagatcttcctcttcctggccatcctgctacagcaactggagttcagcgtgccgccgggcgtgaaagtcgacctgacccccatctacgggctgaccatgaagcacgcccgctgtgaacatgtccaggcgcggctgcgcttctccatcaaytgaagaagacaccaccattctgaggccagggagcgagtgggggccagccacggggactcagcccttgtttctcttcctttctttttttaaaaaatagcagctttagccaagtgcagggcctgtaatcccagcattttaggaggccaaggttggaggatcatttgagcccaggarttggaaagcagcctggccaacatagtgggaccctgtctctacaaaaaaaaaatttgccaagagcctgagtgacagagcaagaccccatctcaaaaaaaaaaacaaacaaacaaaaaaaaaaccatatatatacatatatatatagcagctttatggagatataattcttatgccatataattcaccttcttttttttttttttgtctgagacagaatctcagtctgtcacccaggttggagtgcagtggcgtgatctcagctcactgcaacctccacctcgcaggttcaagcaatcctcccacttcagcctcccaagcacctgggattacaagcatgagtcactacgcctggctgatttttgtagttttrgtggagatggggtttcaccatgttggccaggcttgtctcgaactcctgaccccaagttatccacctgccttggcttcccaaagtcctgggattacaggtgtgagccaccacatccagcctaacttacattcttaaagtgtcgaatgacttctagtgtagaattgtgcaaccatcaccagaattaattttattattcttattatttttgagacagagtcttactctgttgccaggctggagtgcagtggcgcgatctcagctcactacaacctccgcctcccatgttcaagcgattctcctgcctcagcctcccgagtagctgggactataggcatgcgccaccatggccagctaatttttgtatttttagtagagacgaggtttcactgtgttggccaggatggtctccatctcttgacctcgtgatccacccgcctcagcctcccaaagtgctgggattaacaggtatgaaccaccgcgcccagcctttttgttttttttttttttgagacagagtcttcctctgtctcctaagctggagtgcagtggcatcatctcagctcactgcaacctctgcctcccaggttcaagtgcttctccagcctcagcctcccaagtagctgagactacaggcacacaccaccacgcctggctaatttttgtatttttagtagagacgggtttcaccatgttggctagactagtctcaaactcctgacctcaagtgatctgcccgcctcgacctctctcaaagtgctggcattacaggtgtgagccacggtgcccggcccacaattaattttagaacattttcatcacccctaaaagaaaccctgcacccattagcagtccctccacatttccccctagcctgcctcccctgcctcaccagccctggcaactgctaatctactttctgtgtctatggatttgccttctctaaacatttcatataaatggaattacacaatgagtggtcttttgtgactggcttctttcacttagcacaatgttttcaaggcttatgtgtgttgtggtgtgcgtcagtaagctcttggtgcttgagtcctgagactgggtctaggtctgtgctctcttaagtcgttgataggcacctccttcactcctctcctctcctttcatgttgtttgacccaagttttttaacaattgaagggaacaaggagaaagggatccagtctcaggggccaaacccagttgggtggatggggatccctcctgtcccattctcaaaaggcagaacacgtgacttctcacaaggccttgatttcttcattcacagcccgggaggggataagcttcccagaagtgcttaggttatttgaaaaaggcccaggtctcatcaaaggacactatcaagaaattgaaaggaggccaagcacagaggctcacgcctgtaatcccagcactttggaacgccaaggcaggcggatcacttgaggtcaggagtttgagaccagcctggacaacatagtgaaacctcatctctactaaatatacaaaaactagctgaatgtagtggctagcctcagctgctcaggagactgtaatctcagctgatcaggaggctgtaatcccagctactcaggaggctgaggcatgagaatcacttgaactcaggaggcaggggttgcagtgagctgagaccctgctgttgcactccagcctgggctacagagtgagactctgtctcaaaaaaaaaaaaaaaattgaaaagacaacccacagaatgagagaaaatatttgcaaaacatatagctgttgaagcatttatatatagaatatataaagaactcctggccgggcacgatgcctcacccctgtaattccagcacttcgggaggccaaggcaggtggatcatctgaggtcaggagtttgagaccagcctggccaacatggtgaaatcctgtctctactaaaaatacaaaaattagccaggcatggtggcgggcaactgtaatcccagctactcaggaggctgaggctggaaaatcgcttgaacccagggacagagtttgcagtctcactctgtcgcccaggctggagtgcagtggcaccatcttggcttactgcagcctcaacctcccaggctcaatcgatcctcccaccttgggacaacatatgcaggccaccatgcctggctgatttttctaatttttgtagagatggggttttaccatgttgcccaaactggtctcgaactcctgatctcaagtgatccacctgcttcagcctcccaaagtgctggaattacaggcatgagccactgcgccaagccaaaaaaatttttaagagtaaaacctggccaggcacagtggctcacgcctgtaatcctggccctttgggaggccaaggcgggtggatcacttgaggtcaggagttcgagaccagcctggccaacatggtgaaacctcgtctctactaaaaatacaaaaattattcgggagtggtggcacacacctgtaatcccagctacttgggaggctgaggcaggagaatcaaatgaacccaggagatggaggttgcagtgagctgagattgcgccactccactccagcctgggcaacagagggagactctgtctcaaaaaaaaaaaaaggtcgggggcggtggctcacacctgtaatcccagcactttgagagaccgaggtgggtggatcacaaggtcaggagttcaagaccagcttggccaatatggtgaaaccccatctctactaaaaatacaaaaaattagccaggcgtggtggcaggcacctgtaatcccagctactcgggaagctgaggcagagaattgcttgaacctgggaggcggaggttgcagtgagccgagatcacgccactgcactctagcctggcaacagagcgagactccagcttagaaaaaaaaacccatctctactaaaaccacaaaaattagccaggcatggtggcaggtgcctgtattcccagctattctggaggctgaggcaggagaatcgcttgaacaccggaggcagagtttgcagtgagccgagatcacgccattgcactccagcctgggcgacaagagcgaaactttgtcccaaaacaaaaagcaaaacaaaacaaaaaaaacctcccggcaagccgcaagcaggcattgccatactttgccaatctaagaatcagcagggcccagctccctgaggtaatttcaggaccgatctgaggtggctcgatggtcaccatacagccactgccccatctggctcactgtggtctggagatggcttgagcttctcatgcacacctggccaatctttaactggttggcctagagctcccctctggccagagccaaggtaggaggaattggagacttcgccccgctgcttgccattcctgcctcccacagcaggtacgaggcaggtgggaccagcctgttctatcttttcctggtaggccctggacacgcatcatctcaggctattctcacaacaaccacaggagatgggtactgttataccaactttagagatgagaagcctgaggctcaggaagcatgaggagggcatgtgtggtggagagattcaggactgcaccatttgccctataccacctccagggtctcttccctacctgtgtctctccctgagtcaggattgtgggactggaacaggaagcttggaaacactacatgatcaaggaacggcatggagagttagaaagagctcttggccagagggctaggagtcctgcactcaggttccaagtgtgggtgaccttgggccagtcccacccctcacaggcctcgaccccatcttcagccttctgtgaggtcttctccagcaccattagcctgaagttcaggccactagcaatgacccctgctctgccagcctcttgcttaataaggctgtgggcaaatccagtgagtgcctggcaaatttcgaagtgcagtgtacccggtgaggggtgatttttggcaaagatggtggaatgaaagatggtagaatggtgggaaaaaccttgagctgggaatcccacctctgcctggtagggaaaattaagagacttctctagacctccccacctgttcagttcagatccccaactccctttatgtcaagcatctaccaccaaccagataccagatctttcgtttatatcttagtacaggtctttcttgtttgtttgttttttgttgttttaaagagatgagggtctccctctgtccctcaggctggagtacactggcgaatcatagctcactgcggcctcaaactcctggggttcaagcaatatcctcctgcctcagtctctcagtctcctgccaccgtgccgagctagttcagcttcttttttttttttttgagatggagtcttgctctgtggcccaggctggagtgcagtggcgcaatcttggctcactgcaagctccacctcctgggttcatgccattctcctgcctcagcctcctcagtagctgggattacaggcgcccaccaccatgcccgcctaatttttttgtattttttagtagagacggggtttcaccggggacggtctcgatctcctgacctcgtgatccgcccgcctcccaaagtgctgggattacaggcgtgagccaccgcgcccagcctagtttcagcttcttgagagaggggtttgattggctcagctcatctttttcagccaggctacacaggtcagagaccacagtcagtcagtggttgggtccccttggagcaatgtttaccctggtaaatagccacaggcaacagagtgagggtcacagggtctaagctacctcagcaagggatccctgcacacaagtcctggaagaaacaatggcacagcggaaagctagcagaacacacaaaagcctccatttgtcacttttctgctctgcccacctctcctcacacccacactacaaagaaaattatctttgctctcatcttttcccgtgactcccaggttgaggcctcctaacaacaaattagaaatagctttaacacacaccccattgcaaaccagcttacgctgctctaactaaggttggaacactgggtcaggtggtcttgcctggctcttttttccctaagggtgacctccctcccaggattccactcagtccctatgcaaatgaactcagtcactggggtctccctcacccagatctgcccagataaatctcagcctctctctctcttttttttttttaggtggagtcttgctctgtcgcccaggctggagtgcagtggtgcgatctcggctcactgaaacctccgcctcctggattcaagaaattctcctgcctcagcctcccaagtagctgggacgacaggcatgtgccaccatgcccagccaatttttttttttttgagatggagtcgcgctctgtcgcccaggctggagtgcagtggtgcgatctcagctcactgcaagctctgcctcctgggttcacaccattctcctgcstcagcctccygagtagctgggactacaggcgcccgccaccacacctggctaattttttgtatttttagtagagacgggatttcaccgtgttagccaggatggtctcgatctcctgacctcgtgatccgcctgcctcggcctcccaaagtgctgggattacaggcgtgagccaccgtgcccggccaatttttgtatttttattagagtatgggattttaccatgttgtccaggctggtctcgaactcctgatctcaggtgatccacccacctcggtctccccaagtgctgcaattataggcatgagccaccatgcccagccaaatctcagtcttaaagtaacttgccccccaaggaaggattttccagttgacaaaggaatctgaggagggtgcagactctctgaaagaatggtagtgagtataccatctgggtgggggaaccaagcagaggctgactagaccagggtttatgcagttcagcgtcagtccatgagcttgccctatatcttatccctatcactggctcctgtccctgagaggggactgccaccagaggtagccataccctgagccaagctccccattctttagtgatccccctcaaaattagttctgagaccctgcattctgtccacccctctgccatgacataacaccaggttcactagagtcctctggagtacagctgcgatggagcctctcaggcagtgcaatggggcggaggggggcacttttgggcaaggagcctgcccgatgcccatcaccctgcactaataagggaagcagactctgctctgcattgagggacctgcactctccctgtgggccctgcagcccagcgggtttttctgggtttaagataacatagtggcataggtgatactcaataggttcccccaggccttcacctctgtatttacccctccaccccaggccagtattaagataattacagggcttgggaaagggaaaagagatgagaccagaggctggctcacagatccagaagaaaatcccagctcacccactaaccttgggcctgtgacataaactttctgagtctagactttctcatctcgcaactggggatgataatcttatcttacaggttgggtgggaggtttaatgagataatgtgtgtaaagtgccaaattacaggtcagggtacaacacacacacacacacacacacacacacacacacacacacacacaccagaaatcctgagaaaggtggactcagggcaagatggacccccgacacacgtgtggcatgtgcagctgtgcacacaccaggcccacacgtgagccagcatttccccaaaccctgcgctctctcactggggtcttgccagggcctgggctcagcccacttccttccactgctccccccacccagaagctggggagggctgggggtggtagcgtgccaggcaacaatgggcccccaaccccttcccgcccattgcgtgagaaggagctgccggaaggaaactcacctcccagtgy

SEQ ID NO: 96016 - DNA, 35234 bp, Homo sapiens
  misc_feature (1)...(35234): n = A,T,C or G
caagagaggcttcttagatctcacacaagaaagaatatggggcaagtccacagagtaaagtgaaagcaagtttattaagaaagtgaaggaataaatgaatggcgactccataagcagaacagccccaatggctgctggttagctgtcatctatgattatcttttgattgtatattaaagaagggatggattattcatgagttttctgggcaagaggtagggagttcccagaactgagagttccccttccttttagctcacatagggtaacttccggatgttgccacagcatttgtaaactgtcatgcactggtgggagtgtcttttagcatgctaatgtgatatgatagtgtacaatggggagtgaggacaaccagaggtcatgatcatcaccatcttggtttgggctggctttttttttttttttttttttttttgagacaagagtttcactcttgttgcccaggctggagtacaatgacgtgatctcggctcactgcaacctctgcctcctgggttcaannnnnnnnnnnnnnnnnnnnnnnnnnnnnnnnnnnnnnnnnnnnnnnnnnnnnnnnnntggctaattttttgtatttctagtagagacagggttttaccatggccaggctggtcttgaactcctgagctctggtgatctgcccgtctcggccttttttttgctgggattataggtatgagccaccatgcccagccatctggctttttttttttttaattgcattctgttttatcagtggagtgcttgtgacctgtatcttgggcctcctgtctcatcctgtgactaccaaggcctagcctcctgggaatgcagcccagtaagtctcaggctcattttacccagtccccattcaagatggagcccctctggttggaatacctctgtcacttccatcaccacatccagtctcaccccacaccacctccccttctccagctccactaccaacccccaccagggggaaatgagtaaactgcatgagctctgagaaagcagaaaaaaagccacctcatgaaggtgaaccaaggactgagtcgctgacagacagagatggatgggtaaatgggcrgacagacagacagacatggagactgaaatagaaatgcctcccaaaggtcacagagagtcagtgccacgtcttcacctccacccaggactatcacttatacacccccaccagcctgggcacccactggaaacttggcaggtctggctgctctctgtgatgactgcagtcagcacagggcctggtattccacagatacccagggaacatgctgagtgagtgagtgagtggatgaatgaaggaatcgttcattggtagaagcatcagcagatagagatgacaggagggagtgtgaaagagagttgaggaagaacagaaacagatggagacagatggaggctgcaagtcacagacttggccacagatagaaaatgaacgaataaggtggagggaggttactgcagaaaatttaaaagctatagaaagccggtcgtggtcatgtgcacctgtagtcccagaggctgaggcaggaggatggcttgagcccaggagttcaaggctgctgtgaatccactgcactccagcctggggaacatagcaagactatgcttttttaaaaaaaacaaaaacaaacaaagaaaaagctagagaaacccagagagatcccagtgaaagttaaatttacagacaaaaagaaaaggagagagagagcacaagccctcccttaacttgtcaggatgttagcagagagaaccaggggttcctgccttagtttccctcctagatttgcaggtctctgctggactgtgtcccaagggcctggcgccctgcttggttttgtcagttctctccctcgggcaggggacagtttcctcttacccccacagcatgccagctcagggccctcccacccagaaggccccagacaactatgcagaatccccccgccaaggcaggtccctgggagaagtatctctctccccagctggtcctcattcctgcaatgacaatcggctcctgtctccactggctctgggctcagggcccccgggttggataggggttggggctggaggtggaggtagagacaggagcctgcttgccccagactctggggaggggtgaaagtcagagaggggagaagctctaaggggctgaggcggcttcccgcctccacagagcccaacctgaatgcccagagtactgtatcagcttggttatttccaaatcccctgggagccgtaggggaggggacccagagagctgggaggaaaaccgactgggaagtagccagagccacagaattctcctgggtcctagagaagggtgggttccttccacccccaaccccattagtccctcgaaaaggctctgacctcacctcccccacttccggagtggagttccagccctgaagaaacacttccaaacccatggctctggccccctcctcaggccccctcctcggctacctcggccctggggactgggtcccccaccccaccgttgcgccagatgtggctgcaggggaggggtaggcacggggcccagctggcagtggtcactcggtggtcctctccctgcagagtcagcactttctgtgccagctcgcccagcctcctcactcagcacttcctccagcccgctttccagaggcagcagctgcctgggttgggtcttggattcccagtgctgccccaaacccatctacagcgcagcctggaagatggagggtttgggtgctctggggccttccctcttggcatccccactatcacagaaaattccgacccaccatgggcctcctagtacgtccctctgcaaagcaagggaggaatcccacagctcctgacccctctctgctccccagacccgctgctggtcaggcctgctgcttcctggttcccccatggactttccagaactcagccttccatgacagggtcacaggaccctggctgctccgtgggagccccggcaacacagagctgagcacgtggcaggggcttaataaagtcatgcgcaatcaacaggctctttcatccttctatcaccacccctccgagggtcccttgacaccggttcctagtgccaggaactggcaacaagcttcaagcacatgcctgggtcttaaaaatgtgggtgtgaatcccagcctgcagggacaggcggagagagaagctgcccttcaccccagacagctctggctcagctcagccttcgagtccacgccctcatttgaccccagctctgcaccctccataacctgcccaggtctcttttaggaccccaccctgcaggtttcaacctaaggatgccaggacacctccagccaccaaggcaaggccttgcccagcatgaggagaggtgatggaaggcaggctcccctgggctcacagaactgctgggcctgtcagccactgcaggagacctaaacccaagtagaatgaggtcagaaggagggagtagagaggaagggagaggacagctctggtggaggggccacctctggcccccctgcacaaggttcaccctgagcaaggaaagatgctgaagacagataaaaacaggaaagacagaggaagtgggagtgggggtcaaccccaagagataaayccctcccttctctcacaagtcaagaggaaagaaggaaaatagtggccacatgtctggctctgtgctggggacttttcataatcctctcattccatcctctcaaatatgccacaagaaaggtatgattacccccaggtcacagacgggactctgaagctctgagagcttaaaaagcttccctggggagtggctgggccaggccaggtccctagctcaagtcatggtgtggacccccaggtctccatctcagcagggatggctggcaggagcgcagtcctggccaggggagtctgtgcagaggcccaggctatgttcagagcagagtttattcaaatagagcctaacaggaaacttggctcctctgactcactctgattcgaccttattaagaaaaaaagagagaggagcaggagccagcatcgggtaaggtttcacgccaagagctggctctgaggcccgctgagtggaatggcatgtgccctgatccccccacatccaaagccttgaggcagcccctgccctgctgtccgagtcaaggcgaggggtcctgccttcacgttagggcaactgagttcccttcctcacagccatcctctgtcctccctccactcctcttcccttccctccctgcctaggggtaccctgaggcctgtttccatttctccccctcctctgctgcagcagctgcccatctggctggcgggagggccctacaggaccccagggattccaagcagctgaggccaacactgcagggggcaagcaggagggagggaaggcttaaccctccaggtcccggccctcagtaagccctgcctcagcatcttgcttggtgtcagtcacaccagtggctctttggaggaatcttgtctggagtctgagatggaaaccccatgctggggagctgaggtgtcagcgttgacaagttgctggccaggaggtattggaagccccctacctctgggctggattctgggcatttaaagggtagagacatgctggagtccaagcctcagtcctgaagaacagtgcaatgggtgaacaaatgctgcctggcaaggatggggttgggaggtctatagttcccaaagaatgtccactctagttgcctcctctctaggtgggctccaggcatttccaaaataaagaatatacaggagccaaattaaggacaggtccttcataccttgtttataagcccaagagggcaatttctgcccttcggttcccaggaacacggttggagaaggcagcccaggggaggccagaagagcagtatttggagtgtgatttcttggatgccaaagcgttcaaacttctgggaccccctcctatccctgccattcccagaaggaacagagaatctcccaaagcactctcaggagccatctggcctaatcttccattggtaagctgtggcacctggatcagatagagtaagggactaagccacacagcaacaggaccaggccaggtctccggaacccccttctgttgttcaatgcttactggcttctctgcctcacagtgacccctgtcccatatcaaagacagcccccagtttcattttatccatgtgtacactcaagttattcccaggctatgcagagccaagagatgtaggacagaaaccatacgtgatgtctgggaagttgatctctcccaggatctcacaagtgcttttcagctcagggatacaccccactcttcagactgggaaagtaagcccctgaggtgtgccacgagggaaaagctgcagctccagtgcctctcttcgcaggcccaagagctgcggtgcacctgggacctggaattagagagtggtccctgttcagcatctccccgaggaggcccaccaacaaagagggtgtgtcttttttttttttttcttcctattgagggtgtgggataatggtggaaggaacatgcaaagagggtgtgtcttaattagcactggctttagggaacaaggaaaagggagaacccgggagtacgggaaggaggctggggcagacaggagtcagaggcccattccagcccaaacgagaagccagtgagcaaggtggagaccagggatgctgtgaccaaagcagagaggaatgggcggggtggtgctgacaccccagccccgttctgcctgccagagccccacttaccaggcccgagtccccagaggtcccctcctactccctgctcgattcccttcctcagaggcaggtctgtggcttggctgggaactccagggactgagggagcactgcagctgtgggaccggcgcatagctaaaagccggcgggccatagggccccgcggaggaggccccagcaggcggaccaggaggccgaagcctcccgacgctcccagcctgttgcttattcattcagagtgggaaagcgccagccgagcggccagccagtgcggggctggccatgtaaggcccacaggcggtcctgcccgcccggtgccctgcggagagcctcgtgcagccctgggcaccgcccctgccctgccctgaccccttggccttgaaatgctgtcatcggaggagccgtcccgctcgggacaaggccagcatggacaaagctagagctggggcaagcaaggagccttcctgtcctcgaggccgtgggaagagaagcacgcccagggggccactcctgagagcctctctgtccaccaggcctctgcagaggggtcaccatggctctggcccgaggcagccggcagctgggggccctggtgtggggcgcctgcctgtgcgtgctggtgcacgggcagcaggcgcagcccgggcagggctcggaccccgcccgctggcggcagctgatccagtgggagaacaacgggcaggtgtacagcttgctcaactcgggctcagagtacgtgccggccggacctcagcgctccgagagtagctcccgggtgctgctggccggcgcgccccaggcccagcagcggcgcagccacgggagcccccggcgtcggcaggcgccgtccctgcccctgccggggcgcgtgggctcggacaccgtgcgcggccaggcgcggcacccattcggctttggccaggtgcccgacaactggcgcgaggtggccgtcggggacagcacgggcatggccckggcccgcacctccgtctcccagcaacggcacggggrctccgcctcctcggtcgcggcttcggccttcgccagcacctaccgccagcagccctcctacccgcagcagttcccctacccgcaggcgcccttcgtcagccagtacgagaactacgaccccgcgtcgcggacctacgaccagggtttcgtgtactaccggcccgcgggcggcggcgtgggcgcgggggcggcggccgtggcctcggcgggggtcatctacccctaccagccccgggcgcgctacgaggagtacggcggcggcgaagagctgcccgagtnnnnnnnnnnnnnnnnnnnnnnnnnnnnnnnnnnnnnnnnnnnnnnnnnnnnnnnnnnnnnnnnnnnnnnnnnnnnnnnnnnnnnnnnnnnnnnnnnnnnnnnnnnnnnnnnnnnnnnnnnnnnnnnnnnnnnnnnnnnnnnnnnnnnnnnnnnnnnnnnnnnnnnnnnnnnnnnnnnnnnnnnnnnnnnnnnnnnnnnnnnnnnnnnnnnnnnnnnnnnnnnnnnnnnnnnnnnnnnnnnnnnnnnnnnnnnnnnnnnnnnnnnnnnnnnnnnnnnnnnnnnnnnnnnnnnnnnnnnnnnnnnnnnnnnnnnnnnnnnnnnnnnnnnnnnnnnnnnnnnnnnnnnnnnnnnnnnnnnnnnnnnnnnnnnnnnnnnnnnnnnnnnnnnnnnnnnnnnnnnnnnnnnnnnnnnnnnnnnnnnnnnnnnnnnnnnnnnnnnnnnnnnnnnnnnnnnnnnnnnnnnnnnnnnnnnnnnnnnnnnnnnnnnnnnnnnnnnnnnnnnnnnnnnnnnnnnnnnnnnnnnnnnnnnnnnnnnnnnnnnnnnnnnnnnnnnnnnnnnnnnnnnnnnnnnnnnnnnnnnnnnnnnnnnnnnnnnnnnnnnnnnnnnnnnnnnnnnnnnnnnnnnnnnnnnnnnnnnnnnnnnnnnnnnnnnnnnnnnnnnnnnnnnnnnnnnnnnnnnnnnnnnnnnnnnnnnnnnnnnnnnnnnnnnnnnnnnnnnnnnnnnnnnnnnnnnnnnnnnnnnnnnnnnnnnnnnnnnnnnnnnnnnnnnnnnnnnnnnnnnnnnnnnnnnnnnnnnnnnnnnnnnnnnnnnnnnnnnnnnnnnnnnnnnnnnnnnnnnnnnnnnnnnnnnnnnnnnnnnnnnnnnnnnnnnnnnnnnnnnnnnnnnnnnnnnnnnnnnnnnnnnnnnnnnnnnnnnnnnnnnnnnnnnnnnnnnnnnnnnnnnnnnnnnnnnnnnnnnnnnnnnnnnnnnnnnnnnnnnnnnnnnnnnnnnnnnnnnnnnnnnnnnnnnnnnnnnnnnnnnnnnnnnnnnnnnnnnnnnnnnnnnnnnnnnnnnnnnnnnnnnnnnnnnnnnnnnnnnnnnnnnnnnnnnnnnnnnnnnnnnnnnnnnnnnnnnnnnnnnnnnnnnnnnnnnnnnnnnnnnnnnnnnnnnnnnnnnnnnnnnnnnnnnnnnnnnnnnnnnnnnnnnnnnnnnnnnnnnnnnnnnnnnnnnnnnnnnnnnnnnnnnnnnnnnnnnnnnnnnnnnnnnnnnnnnnnnnnnnnnnnnnnnnnnnnnnnnnnnnnnnnnnnnnnnnnnnnnnnnnnnnnnnnnnnnnnnnnnnnnnnnnnnnnnnnnnnnnnnnnnnnnnnnnnnnnnnnnnnnnnnnnnnnnnnnnnnnnnnnnnnnnnnnnnnnnnnnnnnnnnnnnnnnnnnnnnnnnnnnnnnnnnnnnnnnnnnnnnnnnnnnnnnnnnnnnnnnnnnnnnnnnnnnnnnnnnnnnnnnnnnnnnnnnnnnnnnnnnnnnnnnnnnnnnnnnnnnnnnnnnnnnnnnnnnnnnnnnnnnnnnnnnnnnnnnnnnnnnnnnnnnnnnnnnnnnnnnnnnnnnnnnnnnnnnnnnnnnnnnnnnnnnnnnnnnnnnnnnnnnnnnnnnnnnnnnnnnnnnnnnnnnnnnnnnnnnnnnnnnnnnnnnnnnnnnnnnnnnnnnnnnnnnnnnnnnnnnnnnnnnnnnnnnnnnnnnnnnnnnnnnnnnnnnnnnnnnnnnnnnnnnnnnnnnnnnnnnnnnnnnnnnnnnnnnnnnnnnnnnnnnnnnnnnnnnnnnnnnnnnnnnnnnnnnnnnnnnnnnnnnnnnnnnnnnnnnnnnnnnnnnnnnnnnnnnnnnnnnnnnnnnnnnnnnnnnnnnnnnnnnnnnnnnnnnnnnnnnnnnnnnnnnnnnnnnnnnnnnnnnnnnnnnnnnnnnnnnnnnnnnnnnnnnnnnnnnnnnnnnnnnnnnnnnnnnnnnnnnnnnnnnnnnnnnnnnnnnnnnnnnnnnnnnnnnnnnnnnnnnnnnnnnnnnnnnnnnnnnnnnnnnnnnnnnnnnnnnnnnnnnnnnnnnnnnnnnnnnnnnnnnnnnnnnnnnnnnnnnnnnnnnnnnnnnnnnnnnnnnnnnnnnnnnnnnnnnnnnnnnnnnnnnnnnnnnnnnnnnnnnnnnnnnnnnnnnnnnnnnnnnnnnnnnnnnnnnnnnnnnnnnnnnnnnnnnnnnnnnnnnnnnnnnnnnnnnnnnnnnnnnnnnnnnnnnnnnnnnnnnnnnnnnnnnnnnnnnnnnnnnnnnnnnnnnnnnnnnnnnnnnnnnnnnnnnnnnnnnnnnnnnnnnnnnnnnnnnnnnnnnnnnnnnnnnnnnnnnnnnnnnnnnnnnnnnnnnnnnnnnnnnnnnnnnnnnnnnnnnnnnnnnnnnnnnnnnnnnnnnnnnnnnnnnnnnnnnnnnnnnnnnnnnnnnnnnnnnnnnnnnnnnnnnnnnnnnnnnnnnnnnnnnnnnnnnnnnnnnnnnnnnnnnnnnnnnnnnnnnnnnnnnnnnnnnnnnnnnnnnnnnnnnnnnnnnnnnnnnnnnnnnnnnnnnnnnnnnnnnnnnnnnnnnnnnnnnnnnnnnnnnnnnnnnnnnnnnnnnnnnnnnnnnnnnnnnnnnnnnnnnnnnnnnnnnnnnnnnnnnnnnnnnnnnnnnnnnnnnnnnnnnnnnnnnnnnnnnnnnnnnnnnnnnnnnnnnnnnnnnnnnnnnnnnnnnnnnnnnnnnnnnnnnnnnnnnnnnnnnnnnnnnnnnnnnnnnnnnnnnnnnnnnnnnnnnnnnnnnnnnnnnnnnnnnnnnnnnnnnnnnnnnnnnnnnnnnnnnnnnnnnnnnnnnnnnnnnnnnnnnnnnnnnnnnnnnnnnnnnnnnnnnnnnnnnnnnnnnnnnnnnnnnnnnnnnnnnnnnnnnnnnnnnnnnnnnnnnnnnnnnnnnnnnnnnnnnnnnnnnnnnnnnnnnnnnnnnnnnnnnnnnnnnnnnnnnnnnnnnnnnnnnnnnnnnnnnnnnnnnnnnnnnnnnnnnnnnnnnnnnnnnnnnnnnnnnnnnnnnnnnnnnnnnnnnnnnnnnnnnnnnnnnnnnnnnnnnnnnnnnnnnnnnnnnnnnnnnnnnnnnnnnnnnnnnnnnnnnnnnnnnnnnnnnnnnnnnnnnnnnnnnnnnnnnnnnnnnnnnnnnnnnnnnnnnnnnnnnnnnnnnnnnnnnnnnnnnnnnnnnnnnnnnnnnnnnnnnnnnnnnnnnnnnnnnnnnnnnnnnnnnnnnnnnnnnnnnnnnnnnnnnnnnnnnnnnnnnnnnnnnnnnnnnnnnnnnnnnnnnnnnnnnnnnnnnnnnnnnnnnnnnnnnnnnnnnnnnnnnnnnnnnnnnnnnnnnnnnnnnnnnnnnnnnnnnnnnnnnnnnnnnnnnnnnnnnnnnnnnnnnnnnnnnnnnnnnnnnnnnnnnnnnnnnnnnnnnnnnnnnnnnnnnnnnnnnnnnnnnnnnnnnnnnnnnnnnnnnnnnnnnnnnnnnnnnnnnnnnnnnnnnnnnnnnnnnnnnnnnnnnnnnnnnnnnnnnnnnnnnnnnnnnnnnnnnnnnnnnnnnnnnnnnnnnnnnnnnnnnnnnnnnnnnnnnnnnnnnnnnnnnnnnnnnnnnnnnnnnnnnnnnnnnnnnnnnnnnnnnnnnnnnnnnnnnnnnnnnnnnnnnnnnnnnnnnnnnnnnnnnnnnnnnnnnnnnnnnnnnnnnnnnnnnnnnnnnnnnnnnnnnnnnnnnnnnnnnnnnnnnnnnnnnnnnnnnnnnnnnnnnnnnnnnnnnnnnnnnnnnnnnnnnnnnnnnnnnnnnnnnnnnnnnnnnnnnnnnnnnnnnnnnnnnnnnnnnnnnnnnnnnnnnnnnnnnnnnnnnnnnnnnnnnnnnnnnnnnnnnnnnnnnnnnnnnnnnnnnnnnnnnnnnnnnnnnnnnnnnnnnnnnnnnnnnnnnnnnnnnnnnnnnnnnnnnnnnnnnnnnnnnnnnnnnnnnnnnnnnnnnnnnnnnnnnnnnnnnnnnnnnnnnnnnnnnnnnnnnnnnnnnnnnnnnnnnnnnnnnnnnnnnnnnnnnnnnnnnnnnnnnnnnnnnnnnnnnnnnnnnnnnnnnnnnnnnnnnnnnnnnnnnnnnnnnnnnnnnnnnnnnnnnnnnnnnnnnnnnnnnnnnnnnnnnnnnnnnnnnnnnnnnnnnnnnnnnnnnnnnnnnnnnnnnnnnnnnnnnnnnnnnnnnnnnnnnnnnnnnnnnnnnnnnnnnnnnnnnnnnnnnnnnnnnnnnnnnnnnnnnnnnnnnnnnnnnnnnnnnnnnnnnnnnnnnnnnnnnnnnnnnnnnnnnnnnnnnnnnnnnnnnnnnnnnnnnnnnnnnnnnnnnnnnnnnnnnnnnnnnnnnnnnnnnnnnnnnnnnnnnnnnnnnnnnnnnnnnnnnnnnnnnnnnnnnnnnnnnnnnnnnnnnnnnnnnnnnnnnnnnnnnnnnnnnnnnnnnnnnnnnnnnnnnnnnnnnnnnnnnnnnnnnnnnnnnnnnnnnnnnnnnnnnnnnnnnnnnnnnnnnnnnnnnnnnnnnnnnnnnnnnnnnnnnnnnnnnnnnnnnnnnnnnnnnnnnnnnnnnnnnnnnnnnnnnnnnnnnnnnnnnnnnnnnnnnnnnnnnnnnnnnnnnnnnnnnnnnnnnnnnnnnnnnnnnnnnnnnnnnnnnnnnnnnnnnnnnnnnnnnnnnnnnnnnnnnnnnnnnnnnnnnnnnnnnnnnnnnnnnnnnnnnnnnnnnnnnnnnnnnnnnnnnnnnnnnnnnnnnnnnnnnnnnnnnnnnnnnnnnnnnnnnnnnnnnnnnnnnnnnnnnnnnnnnnnnnnnnnnnnnnnnnnnnnnnnnnnnnnnnnnnnnnnnnnnnnnnnnnnnnnnnnnnnnnnnnnnnnnnnnnnnnnnnnnnnnnnnnnnnnnnnnnnnnnnnnnnnnnnnnnnnnnnnnnnnnnnnnnnnnnnnnnnnnnnnnnnnnnnnnnnnnnnnnnnnnnnnnnnnnnnnnnnnnnnnnnnnnnnnnnnnnnnnnnnnnnnnnnnnnnnnnnnnnnnnnnnnnnnnnnnnnnnnnnnnnnnnnnnnnnnnnnnnnnnnnnnnnnnnnnnnnnnnnnnnnnnnnnnnnnnnnnnnnnnnnnnnnnnnnnnnnnnnnnnnnnnnnnnnnnnnnnnnnnnnnnnnnnnnnnnnnnnnnnnnnnnnnnnnnnnnnnnnnnnnnnnnnnnnnnnnnnnnnnnnnnnnnnnnnnnnnnnnnnnnnnnnnnnnnnnnnnnnnnnnnnnnnnnnnnnnnnnnnnnnnnnnnnnnnnnnnnnnnnnnnnnnnnnnnnnnnnnnnnnnnnnnnnnnnnnnnnnnnnnnnnnnnnnnnnnnnnnnnnnnnnnnnnnnnnnnnnnnnnnnnnnnnnnnnnnnnnnnnnnnnnnnnnnnnnnnnnnnnnnnnnnnnnnnnnnnnnnnnnnnnnnnnnnnnnnnnnnnnnnnnnnnnnnnnnnnnnnnnnnnnnnnnnnnnnnnnnnnnnnnnnnnnnnnnnnnnnnnnnnnnnnnnnnnnnnnnnnnnnnnnnnnnnnnnnnnnnnnnnnnnnnnnnnnnnnnnnnnnnnnnnnnnnnnnnnnnnnnnnnnnnnnnnnnnnnnnnnnnnnnnnnnnnnnnnnnnnnnnnnnnnnnnnnnnnnnnnnnnnnnnnnnnnnnnnnnnnnnnnnnnnnnnnnnnnnnnnnnnnnnnnnnnnnnnnnnnnnnnnnnnnnnnnnnnnnnnnnnnnnnnnnnnnnnnnnnnnnnnnnnnnnnnnnnnnnnnnnnnnnnnnnnnnnnnnnnnnnnnnnnnnnnnnnnnnnnnnnnnnnnnnnnnnnnnnnnnnnnnnnnnnnnnnnnnnnnnnnnnnnnnnnnnnnnnnnnnnnnnnnnnnnnnnnnnnnnnnnnnnnnnnnnnnnnnnnnnnnnnnnnnnnnnnnnnnnnnnnnnnnnnnnnnnnnnnnnnnnnnnnnnnnnnnnnnnnnnnnnnnnnnnnnnnnnnnnnnnnnnnnnnnnnnnnnnnnnnnnnnnnnnnnnnnnnnnnnnnnnnnnnnnnnnnnnnnnnnnnnnnnnnnnnnnnnnnnnnnnnnnnnnnnnnnnnnnnnnnnnnnnnnnnnnnnnnnnnnnnnnnnnnnnnnnnnnnnnnnnnnnnnnnnnnnnnnnnnnnnnnnnnnnnnnnnnnnnnnnnnnnnnnnnnnnnnnnnnnnnnnnnnnnnnnnnnnnnnnnnnnnnnnnnnnnnnnnnnnnnnnnnnnnnnnnnnnnnnnnnnnnnnnnnnnnnnnnnnnnnnnnnnnnnnnnnnnnnnnnnnnnnnnnnnnnnnnnnnnnnnnnnnnnnnnnnnnnnnnnnnnnnnnnnnnnnnnnnnnnnnnnnnnnnnnnnnnnnnnnnnnnnnnnnnnnnnnnnnnnnnnnnnnnnnnnnnnnnnnnnnnnnnnnnnnnnnnnnnnnnnnnnnnnnnnnnnnnnnnnnnnnnnnnnnnnnnnnnnnnnnnnnnnnnnnnnnnnnnnnnnnnnnnnnnnnnnnnnnnnnnnnnnnnnnnnnnnnnnnnnnnnnnnnnnnnnnnnnnnnnnnnnnnnnnnnnnnnnnnnnnnnnnnnnnnnnnnnnnnnnnnnnnnnnnnnnnnnnnnnnnnnnnnnnnnnnnnnnnnnnnnnnnnnnnnnnnnnnnnnnnnnnnnnnnnnnnnnnnnnnnnnnnnnnnnnnnnnnnnnnnnnnnnnnnnnnnnnnnnnnnnnnnnnnnnnnnnnnnnnnnnnnnnnnnnnnnnnnnnnnnnnnnnnnnnnnnnnnnnnnnnnnnnnnnnnnnnnnnnnnnnnnnnnnnnnnnnnnnnnnnnnnnnnnnnnnnnnnnnnnnnnnnnnnnnnnnnnnnnnnnnnnnnnnnnnnnnnnnnnnnnnnnnnnnnnnnnnnnnnnnnnnnnnnnnnnnnnnnnnnnnnnnnnnnnnnnnnnnnnnnnnnnnnnnnnnnnnnnnnnnnnnnnnnnnnnnnnnnnnnnnnnnnnnnnnnnnnnnnnnnnnnnnnnnnnnnnnnnnnnnnnnnnnnnnnnnnnnnnnnnnnnnnnnnnnnnnnnnnnnnnnnnnnnnnnnnnnnnnnnnnnnnnnnnnnnnnnnnnnnnnnnnnnnnnnnnnnnnnnnnnnnnnnnnnnnnnnnnnnnnnnnnnnnnnnnnnnnnnnnnnnnnnnnnnnnnnnnnnnnnnnnnnnnnnnnnnnnnnnnnnnnnnnnnnnnnnnnnnnnnnnnnnnnnnnnnnnnnnnnnnnnnnnnnnnnnnnnnnnnnnnnnnnnnnnnnnnnnnnnnnnnnnnnnnnnnnnnnnnnnnnnnnnnnnnnnnnnnnnnnnnnnnnnnnnnnnnnnnnnnnnnnnnnnnnnnnnnnnnnnnnnnnnnnnnnnnnnnnnnnnnnnnnnnnnnnnnnnnnnnnnnnnnnnnnnnnnnnnnnnnnnnnnnnnnnnnnnnnnnnnnnnnnnnnnnnnnnnnnnnnnnnnnnnnnnnnnnnnnnnnnnnnnnnnnnnnnnnnnnnnnnnnnnnnnnnnnnnnnnnnnnnnnnnnnnnnnnnnnnnnnnnnnnnnnnnnnnnnnnnnnnnnnnnnnnnnnnnnnnnnnnnnnnnnnnnnnnnnnnnnnnnnnnnnnnnnnnnnnnnnnnnnnnnnnnnnnnnnnnnnnnnnnnnnnnnnnnnnnnnnnnnnnnnnnnnnnnnnnnnnnnnnnnnnnnnnnnnnnnnnnnnnnnnnnnnnnnnnnnnnnnnnnnnnnnnnnnnnnnnnnnnnnnnnnnnnnnnnnnnnnnnnnnnnnnnnnnnnnnnnnnnnnnnnnnnnnnnnnnnnnnnnnnnnnnnnnnnnnnnnnnnnnnnnnnnnnnnnnnnnnnnnnnnnnnnnnnnnnnnnnnnnnnnnnnnnnnnnnnnnnnnnnnnnnnnnnnnnnnnnnnnnnnnnnnnnnnnnnnnnnnnnnnnnnnnnnnnnnnnnnnnnnnnnnnnnnnnnnnnnnnnnnnnnnnnnnnnnnnnnnnnnnnnnnnnnnnnnnnnnnnnnaggctggccgggtgcggtcactcaccccctgtaatcccagcactttgagaggccaaggcgggtggaacacttgaggtcaggagttcgagaccaggctggccaacatggtgaaaccccatctctactaaaaatacaaaatttagccagagcacacacctgtaatcccagctgctcaggaggctgaggcaggagaattgcttgaacccgggaggtggaggttgcagtgagctaagatggcgccattgcagtccagcctgggcaacagagctagactccgtatctatctatctatctatctatctatctatctatctatctatctatctaggtagatagatagaacaggaggccagctagaagggacatagaggatgcacatcgtggaatcctatgtagcagtgacaggcagtgaactagatagaccttaaaagtttacatggactgggctcggtcaccccataacctcagcactttgggaggctaaggtgggcagatcacctgaggtcaggagttcgagaccagcctggccaacatggtgaaaccctgtctctactgaaaatacaaaaattagccaggcatggtggcatgcgcctgtggtcctagctacttgggaagctgagatggaaggatcacttgaacccgggaagcggatgttgcagtgagccaagatcgcaccactgccctccagcctgggctgatggtttcccctgtatttggagtaagcaaaaagacctcatttgactgggtgcggtggttcacgcctgcaatcccaggactttgggaggctgaggcaggaggatcacttgagcccaggagatcaaggctgcagttagccatgttcacgccactgcattcctgcctggacaacagagcaagaccctgtctcaaagaaaaaagaaaaggtggaggtggcgtggggagctggatatgtaccttcaccaggtccaggatcttcctttaaaatgcatactttttgaggtgagggctgatcacacagtctgataataactggacttcacccaacattggccactctgcttggagggcctgttgtaccctacaagccaaaaattgcagaccagcctccttactcctacactgatygtgtccactagcccccaactcaatcaacccttctttatccccttccaacatcacataatccccyagccccaagccctgcagaggggccaagagcccaagcctgcaggcctggctgctgacgaaatgtcccctgggagagctgcccagagaaggagccattgttccttcctggaaaaacataccagctatgggagggggtctgctattccctgggacctcggcaaggatcctgagggtgaggcgggggggcctggcctgaactcctgaggctgctcctttccagcagcttccccgagctgctgcctcttgtgtcacccccatggccatgagggtgtgacagaggtggagctcagagagggagtcacaggaggccctggtgattgttagagatgtagaacaaagaaacttacaaaataacggtaagagtgattccatttaagttctagaaaaggcataactaatctacagtgattagaagcagagcagtggctgcctggggtggcggaggcggggagaggacttacagggaaggggccagagggtgacagaaacaatccacagcttgattgtggtggaagccacacggctttatacatttgttagaacttatcaaactgtacacctaaaatctgtgcatttcactgtgtatagagtacagctcaaaaagtttatttttataaaaagagtgacaggaggagtcctgggagggcaaggagacctaggatctcctcctggggtaccccagctccctgtgtgaccctgtgcagatttatgggcctgagcctcagtttcctccggtgcttccaaagacattatgtgccttggtgtcttgggggcaggacatggaaaacactttgggttgcctagaacagtcattaaagaggctctcctgacagagcctgaggggctttggaccagtcagtcaccctcaaaacaaaagttgctccactgagggcgagtaggactcagggcctgcccatagaatgccatctggagcagaggagacacacacaggttagtatggtgaaatctaagtgtagatcaatacagatggggtagtgagagaggagaattttgtgcagtctgagatatcattgcaatcaggggagacttcccgcaacaagaggcccctgcctgagcctgagattcctcaacagtaagaggaagaagatgatcatctgtagcgagggtcaaggctcagattgtgaccagcagccccaagctgtttgtccttagtctctcttccaattctccacatgcagtactctacaaatgcccctcctccataactctggcacttataaccctactccactcagttttaatcagacttgatgatatcacagcaattcctgtttttttttttttcctttagctgaagagctttagtccatcatcaggggacaaacagaaatgagactgagattcagaattgctgataggcatcagacctccgtctgtgaccaggatcagggctcggtgtgtgaccagcatcgggactcagactgggatcaggaacagggcttggtgtgtgatcagggtcaaggctcagggtgtgcccagggccagggttcagtatgtgaccaaggtcagcgcttaatgtgaccagggtcagaggtcagtctgtgaccaaggtcagggtgcagactgtgatcaggcacagggctcagtgtgtgtacatagtcagggctgggagaggccaggaacagcattggccctcactggccccacctggcctcttcctcccgctcctccaacttccctgggttgcatagccagctcatgaaatagcctagataggaagggtcaggccacaaaagctttgtggagccatctgtgcagtatttcttgaaactgggcctggggtgggggcagcaagctgtctgatgtcaaatgctgggtctcctgagtcttaaggcccagctaccccaccctatacgcagctgagggaaaggcactgggtgatggggaaggggcccatccctctcatcctcacccctcccccagaggcttccagggtccagagagtgagaaccagctcccagctggcttgagggcctatgggtcccttgggaaatgactgcaaacattcctaggggctcaagtaacagggcctaggctggccaagaagtcccccaccagccaggagccacctcatcctcacccacccttgtactccaagcttcctcatcattccaagtaggtgagatcaccctggctgcctggaccaggctcccccatgaggcccaggccccagggagagcaaagctagggtctgggaactcagggtggtgtggggtgggggatatgcaggcagacacttctgccgatggcttagaagccagccttcccctccttggcctcatcttccagacctaaaagctgatgagagggtcttggcagcaggaaaggggtgggaaatccctccatgggactcaagtcctcccaccttgcctgctctcacccttcctgaatccctcaagagcagaggacttcaaagaaactaagaggagcttacagcctcatcttatcacttacctgacagaatccctgaggccagagaggagacggaattagaggccccagaaccactcccctttaagtcagtggctgggctgggatagagcccagggccctggagtgccccctgcccacacccactgctgcccgcacccaccccagcccacaccccatcacgaacagaggagatattccctcttcattccaatgcggaatggagtctggacacctaagtttggtttctgcttattcctagtaactcctgctcagactcctgcatgcccagggaggaaggtggaggggcaggaacaggacggacaggccccgggctctggcacatcctggggaacaagggaccacaaggacgggggcagtctccagacttcccctgggcgcttgaccccaggccttgcaggggagagagccagggcctccctcaggttggtggccggaggttgcagacagaggagggtgtggtcaggtctagggtgatgatggcaggaagtggtggcaggtgatgggggacgggggtatggggaggagtggctgcaccaggcagaaaggaatcctgagaaggtcaggctgggtgcccaggctgagaatcctgccctgtcagcagcctgctctggggaagtgttttccttctagcccatcccttcctgcccaccctgactcctgccagcctgcatccacctggctctgcccatgaaccttcagggacacactccaggccagaagcccagggctctcttggtggtttacaaagaatgctgactgcagggatgagaggaacggagggtgtctgggggctgctgtccagaggcctggggagtaaggactcgagggagtgcctctgtcaggaaattacatggttcactcattcctgcctccaggtctttgttcatgctgttttccctgccgtggacaccctttcccgctctccgattctctaaatcctgccccatctcccagatcttgttcatgtccaagcttttccaggaagtcttagcagctcccacaccgcagagctcgagatgtaagctcttgctgcctgacttccctgaccccacacctgggcccaggacctaacacccaaggagaatggcaaagggttttggggtatgagaggatgtttggggtgtgaggaggtctctgggcattagcagtggccaacctgatgctctcaatgtcatgctcttcctccctccccccttctctcccactgcccactccaggtctccctgacttggtcccagaccccaactatgtgcaagcatccacttatgtgcagagagcccacctgtactccctgcgctgtgctgcggaggagaagtgtctggccaggtaaggagctgaggcagaagtgtagagtgttgggatagtccccgggagtcacccagaacccagcctagctgtggctgccagctaggctgtctgcaagctgatgaccctggccaagtgccccagcctcccaggaccctgaccgtttcatcagtgagccttgcctgccccgagggagtcaggaggggaggggagcaagygggggcccagcatttctgtatactgtacctcactatacaaggaactccacttttactgtggcacttcatctttatatgagccctgaaggcatgggttaccccctcaggaaactgaggagcaatgaaaggaactcaaaccttttggatctgagctgtttaatgagaaggttccttttgggagcccaggcttccagtggtcatacrgggacccaaggaagtcctattgggtggatgtacctgcaggatagagcccaggagtatggagccatgtccacagaggacagttgtggctttggctggtccaggctgcctctgcctagtcacagcaggggcagtgagcccgggggacaaagaagtttcagttatatgttgcactggaaagaggggaaggagaccagtttccatgcacctagaaggtgagcacagctggctcgccattattcatgggtgatcctgcctctcgcagtgtttgcttctaatttataagcagttcatattctgctggaacataggtgctttgcggatacctccctgggccaaaataattagttaagattatgttatctgcttcttttgttaatatccctttatgttgaaagcacctatttttcttaattacctgctttttggacatttgaactctctgtttagtttgactttttactatctaggaaactctttagaatctcaacattttctcatttctagaacttctagttcactgccactctaagtagctgatcataaacccttatctgtctgtaacaagataaagagcttgaactagaatgtaactcaactcactccttcattgagaaagtcttgctttaaaaaaagaaaaagtatccgctgaactaagcagagtgattagtaatgttgtcgatgtacattctggtgcaagttcccgatcccatcccagactggcatcagtgtgggaactgcccctggtccagggaccgcaggctgagtaccactcagccagcctgtctgggcagttcttgtcttgtttcagttgtcttggggaagagagcataatggtcctgctggaattcctccagcaatgaggaacttacagcctccatgacagcccttccagtcttaagagaattagtcaaagtcaaactattaacatcactgcctcttcatgaaggatcctgagtgcccggacctgcgctcccagctggggagaggaggcagcctgtcctctgtcctggagggtctcctggtacagctggagagaacagccctcacctgtaccccagtgacagaaccaagacacgagtgggaaaagagccagaaggactggttcacaggccagggctgctggaggtcagaggagggagggatcagcaagggctgaggcctcagaggaggtgggcgtgggagttcagacctggagaatcctgcaaaactggagccctggggcaggagggccctctgagatcatttcaaktatgggccgcaggctggtgccagttcacatgctgcaggcagaacccagagaagaaaagggaccaattccaagtctcaccaccagtttgtggccaagctgggcctagaacctagacccttatggtttcccayggtgtgctgagcygaacagaagggcaggatttaacygaacagagggaaggaggatgttttgtttcaacccagacatagacagattccaagcctcccccagacaaggctgagggcctttcatcctggcagacagtctgagccgcctgttgtccagacattctctcaaagagagcgctaatccctacgactggccaccgctcccctctggccttaggatcggaccttaatgagtgccagggaagagcccctgaggccaacagagttagctgtcagccgtcagctaaagaggggaggggccttcagccaccccttcctgttcctaccacacatgtgtgtgcatgtgtgtgtatgtgtgcatgtgtgtgtgtctcccctcactgcagcccctcgttcctctttccacccttttccttttgtcacaaggcctacctcagttggaaatctggagtcagcaggtgacttgcgagcaggcaattcataccagacccatgttccctgaatggaaaagggcaggttgccagcctgaagccatgcaatcagggagaggtggtctggacccagtgcaagatgtagatggtatcgggctgtgctgcagtcagtgctgttagagctcacaggcaatccggatcctctatgtagagcaatcagggcagacttcctggaggaggggacttttgagttgaccctaggatactgggtgagttttggaattctgggtcaagcaaacagcatgggcaaaagtatgggtcagggaaaaagttcagcctgtttggaaaataggctttgaagcaggaacccagggtgtgtgggggagtggaagggcagatgggactagaaaagtgaagaggctttgaccagaggacttcacgtctgtttttcaggcccacacccaagacatggcatactttggtcaacaattagggctctgtcttgttatcagagacttatcagaatctcctggataggacttttttttttcttttttttagaaagggggtctcactctgttgcccagactggagtgcagcagcacaattatagctcattgcagcctcaaattcctgggctcaagggatcagtctccaagtagctgggactacaggcataagccaccttacctggctaattttttaattttttaaaaatttctttaattaaattaattttttaaattttaatttctcactrtgttgcccaggctggtctcaaactatgggcctcaagtgatcctcctgcctcgacctccaaaaagctctgtaattacaggcatgagccaaagtgcctggcccccgcaatagggctgtttttcagtggcccttcagagattgctatgtgctcctgcacctaggggctgaccccagctgagtcacctgcaggtatcagggacactgccatgcttggtaccgctttagaaagatgctgttggcagctggcggccacatggtggaggccagaaaggaggggacagccaggatttcacggggtcagaagacagaggaagaggcctgagcctccgccacagttsgaggagacagaggagaagatcttcagggacaaggagtggggctgcagaaccagtggccaagggctgggggtggggctgagggggcccatgctgggttctggtgtcactgtgccccaacccccccycatctcccccgccgtccctgcagcacagcctatgcccctgaggccaccgactacgatgtgcgggtgctactgcgcttcccccagcgcgtgaagaaccagggcacagcagacttcctccccaaccggccacggcacacctgggagtggcacagctgccaccagtgagtggggaggggctgggcccgtcctcttccacttctcctctgggccagggaccttggtgcctgagctcccctcccaccatgagcactctgggagacacagatactggattagagggcccggggaggtgttacctgccaactcttttcactggggcaagtgtttctcagagaagccttagccaaagctaggctggaagatggatatagaaggattggtctcaatcagggatggaaatgtctagaatacagggcattgcccagtgaggccattacaggtgggagcccaaaaaggaagtgaggggtctagagcatgtgctgtcctggagtgacccagctaggtggggagcacagaggggccaccccgcagtactcaggagacaggagaacctagaccagccaggaggctgtgccacagcagggtcacctgagcccatctcaggatggggacaggatgagaggcccagggaagactaggccctcttctttctccttctctcctctgcccctaggcattaccacagcatggacgagttcagccactacgacctactggatgcagccacaggcaagaaggtggccgagggccacaaggccagtttctgcctggaggacagcacctgtgacttcggcaacctcaagcgctatgcatgcacctctcatacccaggttgggctggagagatggggtttggggcatgggaggataaggagttggggaggcaaagagcgaggcccgctgaggcccggcaagtgccaaggcttctggccactcagctctgctcacagtgaaggtcttctcaccagtcctcaggctgccacactgccctgcagggactgttccctccctgccccagcccctttcccatgttattccaggtgatctgctcgtggagagaaggaaacatcgcaacagtctggagagcaacacgtcctattggcctgttcacccacccatatccctctttccatcakccaccctaaatatccacaaactgtccatctgtcctgtctctttttatccattctgccatccatctcgtccctcccacctggctattagatatctgtctttcctctggtccatctagccagtggctttaggaaggtgtggacccaccctgagcagttgccctgggccagggtcaggggagaaacccaggggaaggtgggccagaaactcctgaaggtgggcgtggggtggctctgggaaacaagcagcatcacagccgctcctcttgtccctttcccagggcctgagcccaggctgctatgacacctacaatgcggacatcgactgccagtggatcgacataaccgacgtgcagcctgggaactacatcctcaaggtgggcctctgggtctggggctttccctccaacctgatgttcatgtccaatgtccccccgttcctgaaagaagcttcagcctctgggcctgttcccttctccccagctgcmgagcagaggcagcatctgaggcatcacttgaggtttaggcttcccagccgaagatttaggtctcaggctgacatagcctctctttccataaagaacccagggaacctttgccccagctgtggtaatgccagaggcagtggtgatactgtctccctaagtgacagaggaccagggagagcaagraagacttggagagccatgtggtctatcttcctgtcttcggacagggcagactttgtatcatttgggagacagatgagaggccctcagctccttatagggacccctgcaaagccaagggctcctgtgactaagacccttttagcctgaacccctcctgctctaatggacactcactccatcacctcttcccttggttgagggaaaagtagaaaagcatattaacaacacacatccagacttggtacatccgtgtaggccaggttgtcatgggcccacctggggaagccatgtctcagcctcctccacacaggtataaaatgagtagggatcattccaccagttcatctggacccactcagaagcagaaaagcagctcagtaaaggcagagcagtgaagccaggtttgcaggcggaggccttccctgcagaaagtcagcaggtggagagatgcatccggcagcggttctctgcagttccctcctgagtgctcttcagcaggctccaagcttgctcctccagggcctggggttgtccagtatattttttcttttcctcattcatccactcaatcaacatgtaggaagtcccctctgagttctaggcactagacacacaaaccacataagcaatgcagttcacagtccctgccctttgggagtgtaccaggatttgaaagttgcatccctgcatctgttctyagatgttctgcaaataaagctggccctaccctagttaatccaacatttaaaagtgttgtatcccaacagctccttttcagacaaaaagcacagatcatacttgggccatcatctcagtgaatgttgggcacgwggggctccagagcaggggatcagacaggccctcgatcagtcacctagacagggatgcatagggaatgactttgagccttggatttggggagaccaggtgttgaatcctggctcagctcctcattactgcattccctcrggcaggatccaacctctctgaccccaaatgccccatgcggggcccacctggcataggctctagctctagggaaacatccaatcttctgataagggggattagatgatgttttcttggtttaccagctgcctcttctttcccctctgtgtctctctagcagtgtgtctctgttctccctctctctgtcacctctctgtctgtctgtctgcctctttaccaccttctctggtgagcagttgaggygcagcccccctgactagactccctttctccctgtttctcttcttcctcaggtgcacgtgaacccaaagtatattgttttggagtctgacttcaccaacaacgtggtgagatgcaacattcactacacaggtcgctacgtttmtgcaacaaactgcaaaattgtccagtaagagtttgcccaccacccttcctggctccgtccctttcctgcctggggagcaggcaaggccacctgaratacctaagatacctgcactttaggtcaccttgatggccgaacgcagctgcagcagggcccatcaaaaagagccttgtccgtgccaaccccaagctgagtgtttacggtggggctcaggccgtagggtgttgatctggggctgcatcctgtggctccctgagatgtcccaagtgaaaaccagcagaaggcagagtcatttgatgcaaggccatgagctctgcagtcccagttccacagcttcctcgctatgtgacattgggttacttccctgagctactttcctcaactataaaataggtatttccacataggctggcaatgaggatctacaggcctgatgtctgcatgttcacagtggcacacagtgaacagcagctgtgatcattagtgtccttttcaagtggactggattaaacagtcacagattagaagtgattctggttcaaaggagccatcttcagtccctaggcccccattgtagaagaagtgcctaaaatctgggcttgggattttggcacatgctgctgggtagggtcctcagtctttctcctgattccccatgtgaagtagtttgcagagggaccccttgcttacaagctcacaaggaaaccccaccacactccagatcgaagcaacccttttccattaaaaaaaaaaaaaaaattagtcctagagctttcagctttagttcatcaactgggagaaaggtggtagagatcttaaggcccagagaggtatctttccctaaaagtgtgtacttattaatggatggcaggtatgagagattaagcctatgactatggtcagggtgtggtgtatggccagggtcaggattcagtctgtgacaagggttagggctcagtgtgtgacaagggttaggactcaatgtgtgaccaggatcaaggctcagtgtgtgaccaggatcagggttcagtgtatacctagggtcagggcccagtgtgtgaccagggtcagggctcagtctgtgaccagagtcagggcccagtgtgtagccaggctcagggctcagtgtgtgaccaggatcagggctcagtgtgtgaccaggatcagggcttagtgtgtggccagggtcagggctcagtctgtgaccagagccaggctcatttagagacagccctctcacacttggttgctaccatcaacctaactgttcacagcatgctgccaccacatcatgaatattaaaaatgggaacagcagcctccagttcagtgcagagattaggttcctcatgagyagaatgagatcagaattccccagggcacacagcatgtttgaaaggacgaactcctgtcccatcactggcagtttggctctttagcaggcctgggtttccagcacattcctgctcctcagggcctgtcttagccattcaagacccagggtcacctaagtggtagaagccattctagggaaggaggaggaaggaagaagggggtatccaggaaacaaaggaggctgctgggggctcggggaggcagggaatccctcctgctgctgggaaagggggatgggaacagaaacagcatcccacgtgccaggcgcctggagcagccaggagggctgtcggcagggcagatggagaagcagcctgcgcggccctcccagctccccgggggcctgtgggcagcagggggagccaaagcccttccttccaagagctctttacataagtgcttggaaaggccgggccttattagagtgtctcagtctctgtgaccctgaccgcaggcargcagctgggccagcgtgcacaggaagctggacagagcgttcccagaaaggccacgggactgacgcctgtgggtttccatcgtgtttctggaggaaaaaggaggcttaaaaaaaaaaaagtactgagttagaaaaaacaagaaagtatttccaracagtagcagctctgctaatggcctagaaaacaatctgggactagggcatggggaggggaatgtgctgagactgtgccctgggtgggtgggagtccatcaaacccctccttttggagctgggctgagggggtcggaactttctcttgagggaaatgtaggcccatgcctgccctgccacgagggatctgggctgtgggagggacgccctggctgaggaggccacgggggcctactttgcagcccctcattgacccactgtctttccttcctcagatcctgatctccgggagggacagatggccaatctctccccttccaaagcaggccctgctccccgggcagcctcccgccgaggggcccagcccccaacccacaggcasggaggggcatccctccctgccggcctcagggagcgaacgtggatgaaaaccacagggattccggaygccagaccccattttatacttcacttttctctacagtgttgttttgttgttgttggtttttattttttatactttggccataccacagagctagattgcccaggtctgggctgaataaaacaaggtttttctactctgtggctctgcatgcggcctgctggctggctggccagccacagctagtttgggcctgggggatgtccttaggcatcatccttcccctcgccaaatgtggaaagggcagccaccacccggtcaggaccacagtgaccatgagggcgctgagcccatcgtggaagcctgtggggttgagcccttggccaagcctgtcgcatgggaatgggaccacatccgactaggggagggccctgcagcggggtgggcggcaccagcctgctctccctgctcagcccctgctcctatctgggctcgtgtgcccactgctgccccttctcagccttcagcctcacactcccaccggtccccctcctggccctctcactctcacaccgttcactctccaccagccacccactcccttacaattgcaggctcccgaactcaagtctcctgaaggccaggtgctgtgctagggcacacgcaggagcatcgtagcttctgccctcagggagcgcataaccacagggaacggggagcacgcgktgcccagtgaggcagcacctaggggttctggggagccttcacatgggagagagcctccttccaggcagggaggggagaagaggattcttggcagagagacagcattgagcagagatcatgaggtggggctgcaggccgacagggtgtgagtgggagatggagggaggccccgcagccctgcagcccccgtcccctgccctggctgtggcatcccagaggtcctggacactggaatggaccaggaagaagtgagagggtggtgcctctcctcctcgaggccctgaacaacgagccctcgggatgcctccagacccacctgcttccctgtgggggcaacaccagtgagaaagggaaagagactttgtccaagtaccagggctctgggttccagggccaatcctgctcactgctgtgtgactgtgggcaagtcagacttcatctccgggcctcagtttcctcatgagtaagatgggaatgctctcctgcctggctcccacactgacatggagagttgatgagctactgctgcaggggaggtgccgggggagctacagggtgtcagcacccacccctccagatcttggtgagccccagcccatttgcagaggtcctccaagaaggtgtcccctgcttttggctctgatgcgatccttgcctcagggtccctagtagcaaggaggttttctggtgcagtagagagggagggcttcttggagccatgctatgcatccaggagggttctggcccagtcccctggagcccttgggccactcaccagcccaggcagcagggtggagtgggtgtggctgcagccctccctcggcccttcctctgcaggtctggctgggatttaactctgctgacagggtaggtgccgcagctctgccactctccctctggagctggaccaggacgggtgagaggagtacaggcacatgcctgtcatccagggctgccattctgctgcatcccctgccggtgtgtgcttcccaagatgctgtccttattgcagccccaccccctctccttcctagatactcccaggagtgagcttgggagggggtcagacaaggtcaaccaattccagactgtcaggaggcccgtatgaggtagagacaaaagcccccatttctcaggtcagaaaactgaagcctgtctgagaccacaggcaagttcaaggcagacacagtgctggagctcacgtctctaagccctaggccagggccaaatgccgggtgtgtgcagttttctggggagatctgtaccctcagcagatgagctatggccctgaacacagaattggatggaaggagagagtaagggtggcttttccaaaaagcccacacatcacaaagtgtggggaggtggggagcacacaaggagactcccagacacagtgctcccgcgtgcccatgaacctttggcctgaagttcagattctaggggggctggtggatgtccccaagcctgccatcagagtgaggacacctgggccagtcctcacatgctgggaggactctgagattagatctctggggaggggcttcagatacccctttgccccccaaaaagcagaggaggctttcacccaaaggagaagagagatagagagagaagagagaagacagccgtgacgcgcagggaccagggcagccctcaccgcttcctggctgacctgtcagggccctatcagtgcagcttcacggcactgcccagcagtgacggcccctcgggaaaggagatgcagctgctcccacctcagggggcagggtttcctcaggtattttgactccatgtagaatggcagagtctccctgagaatggggagagaaaaactgtcaagacggcaggggcccagcaggcgctgagctgaggagggcggctgggagaggagtgctctcccagctcggcctcggcctcttgaggtctgtctggctgtcactgcatggaggaacagcctgcttgttccttgttcttgctgtcacctggctcgggcccctccctagatagagctcacctgttgggctcaccccaccaagccaggcccagggaggggtgtgtgaggcccactggaggccaggtcacgtgacgcagggactcaggcccactggtcccttcacccttccgtttgccccttcaaggccagctgaaaccccgatttctcgaagccttccttaaccatcccctctccccttcaactggggtgcactgtgtggcctcattcaggactctcccacccccaccctgccacggacacacaggggcatgggaggaggcacccgagccttgcatgctggacaaaggttacataggtgccatctcagccaggtgcagtggctcacgcctgtaattccagcgctgtgggaggtcgaggcgggcagatcacttggggtcaggagttcgagaccaactggccaacacggcaaaaccccatctctgctaaaaatacaaaaattagccgggtatggtggcacgcgcctgtaatcccagctattcgggaggctgaggcaggagaatcgcttgaacccaggaggcgaaggttgcagtgagccaagattgtgccactgcactccagcctgggcgatagagtaagactctacctcaaaaaaaaaaaaaaaaagaaaagcaaaacaacaacaacaaaaaaaccataggtgccatcttcactcctgacccagcacctccttctgggctgcacagaccaagagggtctctgctggtacactgggcactggtgtgcaggaatccacctgggctgtaagggcctcaagtcacctscccagcatccctccctgtcctcttcttgctcagccccagggctggggagctcactgcttctcgagacatttgctgttagaaacaccttgaggtgaaacagacccccaccccttgccccgcagccttcccttgggctggtcctcgggttctgctaagtaactgactctggtggatgtgactggacagcaggaaggacagagacagcagaggcgacacctggcagggggcacagctgtggccctgactctgtccttcagtgggcctcagtctccctatctgtcctgagggggctgagtgtcttgctagtccttacctggcagagaagaaggggcaggggaagagaagagagggaggggaggaaatgggaggtagaaggaggctgggtagggagtgataggcaaagtccagcctgggggaaggtgggcaagcagcagggggactgcctcagaaggggagcagggagccagcagaggcactgctagggctgcagcctggtgagggctggggcgttatctggcttggaggatgccacagagagaggcctgaagtgggggtactggacctcaaaccagggctggcctgaaacccttggaagggcctgctaatagagacagaggtgccctgggcccttggcagggcggggtgggctctgaaagccagcccagacctgacccctctgcggcctaccatcttggccacagccttgaccttctccctccccctgcacctcagatgcccacaccccctgtgcattacactgtgcgctcccacccagggcagcagccccctgcagggagggcccaggctaaaatcccacccattctgtttcctctccttccactagaatcccacctgttttgagaagttggcagggcctgtgttagggaagcacctgataaccaacgtgagaatggtggcgctggtcccatgtcctgtctcacttttagatgaagagcttcttcatcctcaaaaaaaatgactcagaagagagccctttaatagactgctcggctaggggtggagggctcgtaaggatatttacagatccttgaaaacagagcttccagcatttaaccctgaagagagctggagcctgggccccaactccttaccccacctgagcctcctctctgcactggaggcctctgagcctgactccgcgcaccccacgctggcccacaagccaaggctccttctgatgccccctgaggctgctggcattggccagggctccatcagcacctccttgggtgggggggattaccgctttccctacttactccagccttggttagggggcccatttcccagctcctgccaggctctccacccatttgtggtcaaggcaagagagaccacacccccttgaatgtccaggcactgagtccctgccggctactcatacggatgggccctccccagccattcctcaccacggctgcgtccggatccacaccacaaccacagcattgttggaaagcaactgcacacctccctgcaacttcccctcgcatcccccagactgagtcatgcaggcggtgcccgtgggcagacctggccagggttggcaccagctggccagagagaatgagaggcactgaccacacccaggaacctcgctaaagcccatgcataagggtcaggagagcagccagatgctgggacccaagggtgcctgtgacacacaccaccctgaaagttgcagctgagcttttctgagaaggatggcaaagtcctggaaaagctttaacgacaaaactcaacatatggaaggcagaggaagcaggtaaggattctggtctccttttatgtgaaatagctttaaaaaaaactttttcaaaatcacgtttaatatgcgttgagccccctggctaccaggtgggaaagtcaaagtcctgaatcatttactcccaccctagacaccttgaacttcagaacttcagagaggagtcctgtggtctttagtcctcctggtcaccgctccctggctgattcactctcctccaggggcggtgtctccacttcctgcaaagcttgggcacatgggcagccatgtccctcgaggttcgccwcctccccagggcactgccaggaggcactgtcctcgttactagcagagccagagccaccaccacaaccatagccaccacctccccagcccagggaactctcccagcctctttcctcggcctgtcttcactcccttctaactactcactcttttcctcttcctctctggggcaaccttccatcatccctgccatgtgccttggttcaaggaatcagctttggattctggcccttaagatgaggagtcacaagtacctcctaggaatgagaaagaggaaaagacctagcaggggaatgccaataatattagtgacactcactaatttcttcaacacttagccatgggccaggccctgctctaaatgctctacaaaggttaagcccatttaatcctcacaagaactctatgagggagacactgtcattcccattttgtagatggacaaactgaggcacagagaagtcatgtgacttgccctagttccgtcagctagtgaatgggagagccagaattccaacacaggcacatttctggagacagggcataggttcctccagatcctcaaaggcatgtgggaccaggaaagaagccataggtctgtgctctgaaacatggcaagaaca

SEQ ID NO: 96017 - DNA, 147203 bp, Homo sapiens
  misc_feature (1)...(147203): n = A,T,C or G
acctgaggtcaggagttcgagaccaccctgatcaatatagtgaaactccatctctactaaaaatacaaaaattagccagacttgggaggctgagagaggagaattgcttgaatctgggagacggaggttgcagttagccaagatggcaccattgcactccagcctgggcaacagagcgagactccatctcaaaaccaaaccaaaccaaacaaaacaagaaaaagttcctgtgcaagtaacctagaagaagaaaagaaaaagaaaaaataaatgagagaaccgaaataaaaataaaatggcagacttaaaccataacaatatgataattacattaaatgtaaatggtctaaatataccaactaaaaaacagacattggcagaatggattttttaaaatgatataagtatatgttgtctacaagaaactcccttcaaatataatgatggtctatgtagaaaaccccaagtaagctacaaacaaagccaaacaccaaaaacccaaaccctcctggattacagaagacaatagatgccaaaaaaaagaaccctatatctgtatttaataagtgagttcaacaagattacaggatacaagatcaacatacaaaaatcaattttacctctatatgctacaaattaacatgtggaaactgaaattaaatatacctaacatttataattacttattttaaaaaaggtataaatttgaccaaatgtgtatagaacttgtatgctgaaaactatacaacatttatgaaggaatcaaagaacaactaaataaatggacatatatacccatgttcatggattggaagacttaatagtaaaaatgtcagttctcgaagaatatacatgtttaatgcaattcctatcataatcccagcaaaatttttaatgaatataaacaaggttattttaaaatttatattgaaaggtgaaggaactagaatcgttcaaagaatcttgtagactgagtgtggtagctcacatttgtaatcccagtgcattgggaggtcacagtgggagggtggcttaaggccgggagttcaagaccagcctgggcaacatggagagattccttctctaccaaaaaaaaaaaaaaaaaaaaaaaaaaaaaaaagtcttgtaaatgaagaataaagtgagaggaaccagcctattcaatttcaagatttatagagaacttcaataatcaagactgtgtggtattggtggaggaatagacacagaccaaagaaacaaaagagagaacccagaaatagacctgtacaagcaggcagctgaattttacaaaagtgcaaaagcaattcagtggaggaaaggcagccttttcaacaaactgtgctggagcaatgggacatgtagagacaaatgaaccttgatctaaatctcacactccagacaaaaagtaactcaaaatagcttacagacttaagcataaaatgtaaatctatacaacttttagagaaaaacacaggagaaaatctcttgaggtaggactacacagagttcttagacttgacaccaaatgcataatccataaaacaaaaaattgataaattgtttctgatcaaaatgaaaacttttgctctgcaaaagaccttgttaaaaggattaaaagacaagctacagactggaagaaaatatttgcaatcacacatctagtatctagtagactaatgtctagaatataccaagaactctcaaaactcaacagtaagaaaacaacaagcaaacaattaaaaaatagccaaaggctgcaatgaacggagatcgtaccaacgcactccagactgggtgacagaacgagaccctgtctcaaaaaaaagaaaaaagaaaagaaaagaaagaaagaaaatagcctaaaggatgggcgtggtggctcatgcctgtaattccagcactttgggaggctgaggccggtcagatcgcctgagctcaggaatttgagaccaccctgggcaacatgatgaaaccccgtctctactaaaatacaaaaagttagccaggtgtggtggcctgcacctgtagtcccagctactagggaggctgaggcatgagaattgtttgagcctgggaggtggaggttgcaatgaaacaagatggcgccactgcacttcagcttgggctacagagtgaggctcagtctcaaaaaaaaaaaaaaaaaaaggggggtggggggcaagaaaatagccgaaagacaagaaaagacattttactgaatgggatatatagatggcaaatacgcacatgaaacaacattagccattaggcaaaagcaaattaaaaaccacagtgaaatatcatcactacacacttaacagaaagactaaaatttttaaaatggtgacaacactacatgctgacatgaatgctgagagactggttctctcctacactgctggtaggaatgtaaaatgctacagtcactctggaaaacattttggcattctctttaaaaacttgcaatttccctacagctcagcaattgcactcctgggccctcatctcagagaatgaagacttaggttcacacaaaaacatgtacacggaggtttacagcagctttattcttaatcaacaaacactggaaacaacgcagatatccttcagcagatgacctgttagacacactgtggtacttccatactgtggactgctacacccaacccacctggaattatgctgaatgaaaaggtgaatcctagaggttatgtactttatgattctattcataaaatatccttgaaatgacaaaattttagaaatggagaacaaattagcagttgccaggggttctaggggagtgaggatgagagggaagtggatgtggctataaaagcataccactttgtggggtagagacgttctgtagcttgactacagatattctatcagtgtcagtatcctgttgtgatatttactgtggtttgtgagaagttgccattgcaggaaactgagtaaagggcacatagcatctctctttattatttgttacaactgcatgcgaatctacaattatctcagaataagtttaattaaaagaaaaagccagatacagaacaatacgatctgtctcttaactcccaaattcccagttggctggccacacaccacagtctcagttctgtccataaccaagtttgggggatctcttcaagtttgcaaatgtcacttctactgagatccctctgacaacttcagtgaagtctctcctcaaagctttttttttttttttttttttttgagacagagccttgctctgtcgctcaggcttgagtgcaatcactgcaacctctgtctcccgggttcaagcgattctcctgcctcagcctcccgagtagctgggattacaggtgcccgctaccatgcccagctaatttttgtatttttagtagagatggggtttcaccatgttggtcaggctggtctccagctcctgacctcagatgatccacctgcctggcctcccaaaggactgggattacaggcgtgagccactgagcccggcctctcctccaaattttcaagctgtgtattttaaatcataaaatgttagagccaggaacatttgaaataatgccttgataaaagcgtccatcagacccccgagcacccttcctttccatgaattataaccaacggaaatccggtgcacttagcatgtccagctttgagtgaagcccccaagcttcctgcccctgagactgccgcccctaaacctctcttgcatggattctgtagagctgccccgaccagaagtcacttagccactcctctgctccaggcctcgtggcctgctggaggccagacagtgggtaagtcacgctcagcagtgcctacaactcaagccactgctcaaaggctgttgttttatttctcaagttagaccacaggctctgtagcaacttgggcctccttggacacacacagtgtgacgctgagacacagtcctcaacgctgctatggtgtagaattttttgcggagaaagacaggaaggcctcttgaggtcagtgtgagacagggacactccactggggcataggtatatcactcacaggttgaaggtaggtagactgaggctcaaagagcaagcggaggagctaatgttcaacccaggtggtgtggagtctcagtccagtggccttaccctccacggccacgttgctagttatactggacagagctcagactgtgccctggcctgtgtagatgcaccagaggttttatctgggggtcacagccgctgggaacgggagagttgctggggattgccaggaagggacaaggcatttgtagccatgcaccatctgcttttacactaccctagagtcaagtggaccccctccagcatttttttttccccgagatggagtctcactctgtcacccaggctgaagtgcaatggtgtggtatcggctcactgcaacctctgcctcccgggttcaagcgattctcctgagtagctgggactacaggcgcatgccaccacgaccggttaattgcccctccagcattgtatgtgtctgactgcaatgaagtgtgagtgtgtctgtgtgcgactgtgtgtgtatgatgtgagtgtgtctgtgtctatgtgggggccaggtgtatagtctgcatatgtctgtgcacctctgtgtctctgtgggttgtctgtgcctatgtctcggcttgtgtgtgtgcatgcatgtgtggtctgtgtgtgtctgtatgcatgtggtatctctgggatgtgtgtctgtatgtccctgcgtgcagtgtagtgactttgggagtgcacatgtgtacacgtgtggtgagtgtgcggccctgcgcgagttgtctgtgtacgtgtggtgcctgtgggtctgtgtgcgcgcgtgtgcccgtgggtgtggtgtgtcctcccgtcgctgaggctcccatgaacccagctcagttcaggcctccctgacagtcctcgggcggccacccctggggcgcggctgtccacgaggcgcggaggagaggagtgcgtggctgggtcggcggcggcgcccccgctcctccccgcgggccggcacannnnnnnnnnnnnnnnnnnnnnnnnnnnnnnnnnnnnnnnnnnnnnnnnnnnnnnnnnnnnnnnnnnnnnnnnnnnnnnnnnnnnnnnnnnnnnnnnnnnnnnnnnnnnnnnnnnnnnnnnnnnnnnnnnnnnnnnnnnnnnnnnnnnnnnnnnnnnnnnnnnnnnnnnnnnnnnnnnnnnnnnnnnnnnnnnnnnnnnnnnnnnnnnnnnnnnnnnnnnnnnnnnnnnnnnnnnnnnnnnnnnnnnnnnnnnnnnnnnnnnnnnnnnnnnnnnnnnnnnnnnnnnnnnnnnnnnnnnnnnnnnnnnnnnnnnnnnnnnnnnnnnnnnnnnnnnnnnnnnnnnnnnnnnnnnnnnnnnnnnnnnnnnnnnnnnnnnnnnnnnnnnnnnnnnnnnnnnnnnnnnnnnnnnnnnnnnnnnnnnnnnnnnnnnnnnnnnnnnnnnnnnnnnnnnnnnnnnnnnnnnnnnnnnnnnnnnnnnnnnnnnnnnnnnnnnnnnnnnnnnnnnnnnnnnnnnnnnnnnnnnnnnnnnnnnnnnnnnnnnnnnnnnnnnnnnnnnnnnnnnnnnnnnnnnnnnnnnnnnnnnnnnnnnnnnnnnnnnnnnnnnnnnnnnnnnnnnnnnnnnnnnnnnnnnnnnnnnnnnnnnnnnnnnnnnnnnnnnnnnnnnnnnnnnnnnnnnnnnnnnnnnnnnnnnnnnnnnnnnnnnnnnnnnnnnnnnnnnnnnnnnnnnnnnnnnnnnnnnnnnnnnnnnnnnnnnnnnnnnnnnnnnnnnnnnnnnnnnnnnnnnnnnnnnnnnnnnnnnnnnnnnnnnnnnnnnnnnnnnnnnnnnnnnnnnnnnnnnnnnnnnnnnnnnnnnnnnnnnnnnnnnnnnnnnnnnnnnnnnnnnnnnnnnnnnnnnnnnnnnnnnnnnnnnnnnnnnnnnnnnnnnnnnnnnnnnnnnnnnnnnnnnnnnnggccgcggggtaccggcgtcgccacccacctcgggccgcccccgccgcgagcccggcccagggataaagtggcggcgcagacgccgcaccctgtcgccgcgaagccggtcgcgcgcagctcgtcccggccctggcccgccgcaaacgaggatccgctgcgctcggggaacgcgacagcggcgctcgtggccccggtaactgcctcccggcccctgccccagcccgccagtgccgccgtcaggggtggggagcagcactggggtcccggacacgcccggcgtgggctcccgctacccatgtgtgcgtgtgtgtgtgtgcacggtgtgtgtgcgcgcgtgtccgagtgtgcgcgcgtgtgcgcgcgcgcgcgccctccctgctccttcgcaccagcccccaaaccaacttgtccccatcaactccatctttctagtccccaccttccccggtgcagacacccggcgaagcccacccggttttcccagcggcatttcckatgacagcttcggggctacgtgtcctgtgctgtcggagacgcacaggaagcaaagtttgtgagaagccttgggggcgactttgccttgggcacccgcatttgtgcgtctgcgaggtgcctcggtgtgcgcggagctagtttcccagtttcccgggcccctcccttctccgagcccctctagcgatttgtttaggaaaagtgatgacatgaactagtagtggagaatcgcagcgccgctccccgccctggggagggaggggagccccggagagcctgccggtgggagctggaagcaggctcccggctgagcgccccagcccgaaaggcagggtctgggtgcgggaagagggctcggagctgccttcctgctgccttggggccgcccagatgagggaacagcccgatttgcctggttctgattctccaggctgtcgtggttgtggaatgcaaacgccagcacataatggaaacaggtttgtcatgtatccttggaatttcagatgggaggaataatctgagtatcatccacctcattattgtgcccacttgaaactgttccttggagattttaagatagatgggtcttcttgcagctrggtctttgtacccatagagctgactataatttccacttgattacagctaaaatagtctttaagatgaagtttcctgaaatgatttaaaataaacacagatgggaagggggaaaaactgtaatgaggcacttaaaaaataaagtgagcattttcttaagaacaaatgggatttttcagtcttggagaggtttgcaagaaatgtatgtatgttttaaacctttgaaacagaggggttttttaaactgcttttaaaaaaatgttactgactctgaactagacttttctctcctatccatacatgttcttgagatatttctgactttggaatatgtcacttttccttctaggacctgaagacccttccagcatgccagaggaaagttcccccaggcggaccccgcagagcattccctaccaggacctccctcacctggtcaatgcagacggacagtacctcttctgcaggtactggaaacccacaggcacacccaagtaagtcttccccagaaagtcaccccaggtgacaggggagcatggcccctgcttctcctctggtcgttatcatgtgccatctggggcggggccgctttctctatgacctacttcccctgccgttttaatgttaggctgagcaatgttaacaaagctaaaatgtatactttataatttttaaatttaagaagcaggaattcttttttcattataacaactcagatatggatcctaccgtatggcaattttcaaaaattccacatgactttattttttgtactggagttgatttccggttgtacaggcattcatttaaaatcaaacccgacaattaaggaaaatcccctagatggatgagaaacccgaagtaatacatatatcttcacctttgctcacttttcctgcttgtttctgagcttctgaagatggcatacatgtgtcaccaggaagaaaggggcctgggtatttccttctgattccttgccagctcaattactttgtacattttccatcaaggatttgtcttgctattagaagcaaacattgggactatacacaagacagctggtctcctgctgctgctccctcctcttggatgaagcaggaaaaccctgcttgtttgtgttatttggaaaaagaatttatttgtggtaaccaattggcctggtgacaagaacatttcctgttccagggacattttacctgttttgtaggcctcttgtctcctagggatcattgtgtggttggattatgtctctctttgtgctccagtaatcacccaaccctcacacaggtgtaaaatttcttctctgtcttcatcaaggtatctatgatccagggagctgcacgttaaaaacacagagatatggacttttaaaacccggcatagagtcatagcttcagggcagctacacagactggctatggtttctctctagtgttttcaagtgggtaacgtgctgagaagagttcctaccagttctggtaatacatttcttaaagaatgtgtctgtacgtgcatacgcattagaggaagtgggggggttgttgagcattatgatgctaattaatcattaattctccactctgacttaactggctgtagaattgctcaatcttggattaatttctaacagattagtggtttgtggtaatttgatcaatatacagaaagaagacaaataattgaaaatagaagtttttaatgtctgagtctcagacttggggggctttgttggttaagtagtgaggttgtcctagttcgaagtcaacaaaaataaagaggttctgcagtcctggcacagggggagggtggtgggtgagtgggttagaaacggtcaagttggctgccctgccctcccttcgcctgcgggtggttttcacaatctctgtgctgaagttgcattgcagggagccctctctgctccgttgcttttgctctagttagagatgataactcaacttcttaatttaaactgagctgcctcttggatgtcagcgtccgccttgtggtgggtgctgatgggcttaagaacagaggtggatggttgaggcagttcggccccagaatttggaagaaacctatgggtctagaaaaggttaagggaaaaaaatattgagggcaggagcactgaaatagaaagagcaacagaaccatgagcatgtatgaacactttccatagtgttatcctcagtttaccaaagaggaaggggctggccaaggtcctacctacctgtcctgccctgcctccagcccctggagatgatgcagaggtcctggaggccccttgccatgactcatgttaaccctgtgcttgctggatcttggggcagtcttgggggtcctagggtgggggctcagggcagaggtttgtgccagccagcatgaaacacctctgtatcttcataaccgagaccagctgctcagcctgcctgccctcttgcatgatctgggagacccccgcagcatcattataataagtattattattattgcctgcacagaatcattcactctgcttttaggaagagggaggggacctcaagtcaccagggcttcaatctttccccccaggctttttacccctcttcagcaaaactagggcctcgctttgtgcaatcctgyctcctcccagttaggaagaaagaagggaggaaaagcaaggggcaaaaaaagaggagactgaaccctcccccactactgtaccaactgtgggcaaaacctgggttaagagcacctcatctccagccccgcctctgctatctttctcatagagaccctagggacctcagaagccaccccgggggcctgtggatatcttattatgcagaaggatctgtgccagcctcggttagtcagtactggtttgggtagattttctggccaaccagttacctccagctcctggagcctgccgtgagcacctacagagacatattgcccccagaggacctgctgggttccaagactggctctgcaggtggctcggagcaacactaagccacaggtgtcagccgctgcactgggaacctggcttaacccgctttatgcaagcaaattctgtcgtataaacaccagcctcctcggactggaccctgagaaagagaaagcatgtcttgggttagcctttaccatcagtgctgtttttaacgtagcaggccagagtctccgtatttcatcatcaggaatcagaacttaaacctccatttggcagtaccaaggcaaattcatgctgtagtgtttacggtaataacaaatcttatacttaaggcatggcacaattatctcatattaattgagtgccaggtatgttctagggtctggactagattctgtgcacacatgacctcattttaccttcacatcaatctgtgagacaagtattattattcttactattcccattttacagatgaggaaacagaggtccaatgttacaaagtatctttctccaaatgaccctgctggcagtagtgggatttggtccgcaatcttctgacatggaccaaatccaattgttctccttacaccaccaagcaggacagatttcttctttataggtagtgttttcctgataaattcttacattttgggttagggtaaacatcatttcctagggtaaagaggaagagaataattaattctccctaatcgtttgctcataatatatcaaaggtgggaaatcagctgggttccgtggtacacatctgtagccccagaaactcagaagacagaggcgggaaattccttgagaccaggagtttgagaccagcctgggcaacgtgttgaaattctgtctcttaaaaaaaaaaaaagattagagataggtatcccttctgaaaacaacaacaacaataacaaaaaacagaatttatgcccttgcctgactggctgccttatccaattcagcatgctggaacttaaaaatattggccgggtgcagtggctcacgcctataatcccaacacatcgggaggctgaggcgggtggatcacttgaggccaggagttcgagaccagcctggccaaaagtggtgaaactccctctctactaaaaatacaaaaaattaccggggtgtggtggcagacgcctgtagcccccgctactcgggaggctgaggcaggagaatcgcttgaacccaggatgcagaggttgcagtgagcggagatcgcaccactgcactccagcctgggtgacagagcaagactccatctcaaaaaaagaaaaagggggggatactggatcatgagcaaatgtccactgatgctatcagcacggcgatggagactggcccatggatgggggcaagccgctttgtgggctcttgagctaggaagtcacagtttctcttgtgcccctttgagaaatatttagcacctttgtattcagccaaccaagtggctctcagtccatagaaagacgtctagaagttaactgtgagaattccttacccatgagctcaggtgagggaagggtgcggtctgaaaacattgtgcaatatgatgacttagactccaaaaatatcctcatttgacactggatgaccaggaaggctggagagcaggctgtaattatatgattgtacaactctgacccctgccaggcagtgagttcaaggcatggagcagaccatatttgctgttcatctgcaaggcccggcatgaaggaggtgctgagtagagggttaccgagtggacacatctcactctcatctttcctcagtgctagtccatccaccggctcatgccacttggccttcctggcagcccctcaactctggagagctggcccactttcttttctgtagcttctgttatgatgataaaaactggtgtattgaaggaactggcttaaagtgtgattgtccctccctcgctgatgtcccaagacacacgactgggaggccagccctccccacttcctccagagccctgccctcacacctccagtaagtgcctcctcctttaaatctctgtttagcattttgttccaaattcccctgcatttatggagaccttctggaacataagccctttctctgaaccttactggccttgccttctagtcctttcttgcctcagacctcggtcacgtggcttttctctccaggaactttgtagtcacccctcaccatggctccctcctctcccacctggccagctccaccggtctgagctgcctcggggccagggtgcagcctgcatggttttcaggattttcccgtcggtgacatggagctaggtgctgcaaggggaacacaggccgtggatggactagcaagggagatttggcattgtttctggaacctgcccaagtcctcagaactgtggccgctttcagtggatctagaaccaataagacagggctcctccctcctgcagttccttcccttgctcccgggagtggggctcagtgatggtccccatcacagccctcccgttctaggcccatgttgacccctttctccatgaagccttcactctctgtgtgtgtctacagcaatgggcagtgccatcctcgggcacttcccccatctatgccagtttacctggaggagaggccatgccctgaggcctgggtagatttaagtgatagagaacatccccccttcttgcgtcctcgtaatatcctcctcacatcagcccccagccagacacgggtgtggcacctgtggctctgggaaataagggcccctcccagccatctggatccatccggaggtgaacaattttcaccatttgcttgcacataattccatccccacggccttcctgagactttgtcctcaaaggtgggactggcttttccttccccgcccttaggttttctaatcaggttgtcagccggctgttgagtgctttctttcccccaccccctgctttgggtgtttgttcagtgttccaggaaaccttctgcaggtcctgttttcatctttgagtgtagaagggagtgtgaatttccatctccccaggccgcagctgctgaaccctgtagcccttctgaactcacgccacctgcgactaggtgttcccgcatcaccagccagctggtttagcgcagatgctccctggggtcagctaaatcacacagcttattgtcccttcaagtggccattttgaaccccactctgtcagtctctgcaggggtgaggacggcctggctcctgctcagcgcccctcgcatgcagctctgtggctaccccatacggctccttgctctcctctcccaggatccaaagcagcgattcattcagcaaatacttccttattgacgtctacatggtccttgggcgccagggtggggaaagggtggcaaagatcatgcatctgatgaaggggtgggatggaccaacacacggataattataatatgatgcagccaggacctagaggcagggctgctgctatgccacgcagagcctttgtgcaaattagacagaggtgcccactgggcagaggctgccccatgagttggtgagcagagtgtgggctgggtcgcagctcctacttgcccttctgtcctgtgtcctggatggtgttccaccctcggaaagggcacgtgggggagaggacccaaacacaaaagcatgagccaaagggtgggtgtaggggccccagctttgtatccaaataaccagctagatggagaggttcatagtaatataggcgcaaggcaaagaaggccgcgtcatggcaaagacgtagcaccgcgtgttagcaggagatggagagatgaacatggactgtacctgaggatgcatgggcagcagagggagaaggagggtgactcccaggtgtctctggagtgatggcagaaggagctggtgttattgagggtgtgggaatgtgggattctccttcacagcacacacctttaatgtattctttgctcggaacacggtggggctgctgtgtggcaaggaggatgcatgggatcatcgcaagctgcgggtcatttgttgacacagccatgggataagccaggaggggagtgaggagaaggagcagtggccaacgaactgattacatttcagacgtcaccagttacaatatcaatcaatatgaatcacgagtgactctgctgaaggtaaggaaggaatcagcttacaccctctccccacaaggaggaaaaaaaagtgaagcacctttgacatatgtctgttgttccataaaatttactcttaaactctgagaaaatgggccctaccatgcatcttctagcaatgacattatttttagtcagattattgcattttagtagcaccttttaagtagtccattttaagaatttccagaagtttgtttttcttgtaygaagctgttatttctccttctgatgcttctgcctttgtgatagcgtagcaaattgttttatttttaaacagggcatttcttctgggctttttaaaaatactcttcaaatagcaaagatcttttgatggcaagaggcaaggccagctgctattcttgcagttgagttttccaacagcttctttaagggataatttcttccagttgctgtaagaatgttctgctgatacaaatctggctttgttttgcagtagagtcgaagaaaaaaaatagcagaataagctgctccctgaatagcaacctttgtccaccattgtctatttattggcaccttttaggtttagatcttaatcccagatgcactttgtccatgaatgcaaaccaaactattggtcattgtatacacggaggaaatggtctttactggtgcaaatttttacagctgagatgacaagatgacccttgtcccatattgcagggtcatccaagattcttgttggtaggagtttcttttcatttcacacagccttgttcattaggggatgggggtggggatgctgcggtggtcagcgagtgaaacggggtgacattgttctctgtgtgtttgagggctataagaagagctgtgtgttgtgtgttcctacacttgcagctgccccaagttgacctttgtgtccatctgctaacatgcctctctcccgggctaatgctgaccatttattcccatgcttgatgttccgcaaagtctcttgtatatggtgatgagaaggtatgcctcaccttccagggagtcacagctctagcaacattctgaagagaggaagggagagtgggagggaggcagggaggaaaggaaggaaggaaagaaggaaggaaggaaggagggagagaagaaaggaagaagagaagaggggaaggggaaaaataaggaggaggaaggatagaggagagaatgaagaggaggaaaacaacagactgagcagtaaggtatctttagagatcagcagctgtccctgaccttggggacttgcaggaggttcatggatagtttttgggggttagagtgtggggcttttgacatcaaaggggtatgtacacttttctaggaaaggaagatggatcataggctccaccagactctcaaaatgggggtcaatgacccgggagtcctgtgtcaccctcatcatttcatagatggaaagactgaggcccaggggatgaaaggagtttctcaggctgccacaggactggctcagggctgcagggcagcctcctgatcacacgttgcttctgcttcaggcttttcatccagaagtttcccttatgccttcttctgatcaatttaaactacaagttagccctccccagcaaatgtccggtttggagcagggcttggagaggtaccagacccctgtctcccatgggaagccatttggccagcctccattttgctgggtctgttgacagtggttagaagtrtgtgggcacctaagtgatgcccgccgaggctgctaataagtgcagatggacctcagaagagatggccagagacctacttagagcagccaggagataggtgggaggaggggagaaactgtgggaggaacaggagcccaggaggcctctgggagaacaagagtcggaagaaagtggcagactcttatgagggggccccaaacaaaaaggagggaagcaggggaaaaaagaatgaaaagggaaagagatggaagggcacaaaaaaactgcacaggcggccacatacagcctctggttaatgtctccttgtcaaggcatgtcaattttcccaggtcattgacagtctactggattagagattaaaaacctttagttaggaaattgctgtctttagacgttttagaagttcccctctgtttatcctcttccgtcaatcttgaagagacgtgtttcagggaaacatagcctctctgaacagcaaaagccaatggtgcatgcagaagagcagaggtcctgggacaggactgccaggaccacaccccgatcaacaccagccaggtatgggcctccagagacgctactgacccatcactgcagcagttttctcatctttaaaatgaggactaatagcacctttcccacatggctggtgcaggtaagagagaaatgtgggctccctgaggggtcaacgtgaactctcttgattcctttgtccgcttcatctccctgcaccatcgttctggggactctgcggacctgtgccaggcttgtygattgcccaccgttaccccttacttccctccaccctcatggcaagcgccagtcacagaggacccagtatgaaagcaatcatgcttttgacagattccagcctgactgctgccctcaccacaccaggccacaggctttccccaggcctcaggttactcaccttttttttcttaacttttttgtttcttcaaatgaaactcagttccatgtcaaggagatttcaggctccctgataaacttctgcagttgctgggtgcttcttttaaaagtaaacaaaacaagaaagccacaaggaagccagcctttggtgtgaacttctttttgagataacacataataagggtagctcaacacttttcttttatgtggaatgcagtacaggatttgtggcataactcttgactggaaggagaaccaaacaacccttagctattatagctggaagtcaacttaaataagccttccttagagcatccagtcaattttcagtggtccatgtcttaaggtattccagtctttggcatatgtttttcctttcgtcctgattacgttatcatggttggtagaaatgtttctgctgcagagagtgagactgttactacaagggccatgtgctagatccagagtgggcaggatagtctggggtatgttaggaatctattgctgttactcagcccatgattctgtgggttygcaattagtgctgggctcagctggatgggtcttctgttgctcccagctgggctcctgcatgtatcaatggtcagttgtggatcagcaggcactggcaggccagctagaggcttgccagtcttggatggctttaccacatctggtgttggcaggctgttggtgggatcacctcagttcttgtccatgtggtttatcatgctttctcagactggcctggatctgttattaaggtggcagtttttcaagagcaatgagaacagatgccagtatgcaagtgcttttgaagtctctcctgtatcatgtttgtgaatgtcccactggccaaagcacatcaggaggccagcccagaggcagtatgtgaaggcatgtccaaggagcaaggatggaggagagaatattttgtggtcatttttgaaatctgttgcatgggggaaaatatatttgtattaatagttgggacgagggttgaagtcttattactacctctgcctctgagtaactttagacaaggtaccagctctagactctccagcaagttcccagaagttttttcttttgctataactctgggatagtttgcatcttgcaagagtagaacaacctatgagcttctccagggcagaattcatgtttagcttttttctatcttctccaacacatgcctcttgtagagtttcatacctggcacaaaataagggatcaaaacacgtttgttgcatggatgattcaagttcctcatatttacagtgggatgactgagagaggatgattcctgaagtctctactgccacagttttgcaggaaaagaatataagcatttctgttgagtatggcttcaaggcattaaccttttgtgcaggaaaggagcacctaaatccagaagtatcaccgaaggagttagtgacacctagaagaagaatattccctgcaggttaccccttgagatactggatggctgtactttcaccagtttggttagctttgctgtaaaactctgtgtgaaatgcatctacgagtgggagttacagtatggcaggtgttttccattttagcacagaagttgctgtggatgtcagaatctggagggtttgcttccttttttgattgggtgggggaatggttcaacaggtattaattgagctccagatgtaaactcagtactgtgctggacagcaaaggagggtccacaaacagcatggagacgtggcccctttcacttctgacctctccatggcactagctcttgctgaacacctygtgtatgccaggtctcattccagtttggagataaagaaatgaagttgccctgctcctgcctttgaaggcatctccatgcatttgtcagggaggcagtgccatacaccatggatgttgtcttgtgaaggctgtggattctgtgttgggatttcagagggacgtttggtgactttcagctggatcttgaaggtagaaagggacattctgggccgaagggaatcacactctcacaggcatggaagtgagagaggatacagtgtgctctgaaaataacaaggattatttggaaactggagtccgaagtgcatggcagaatgtaagtttggaatggctggctcaggagcctgcattggaatggctgttgtctactctgctgggaccactataacaaaataccacagactgggggtcttcaacaacagaaattaattttcttgcagttttggagcctagaagtccaagatcaaggcgtcaacagggttgatttctcctgaagcctctctctttggctcacagataccaaccttctttctgtgtcctcgtgtggcctttcctttgtgcactcagttcagttggcaatgaccattttgacttgctaaggaatttgggcttcattgtataggctgtgctgggaaccatgatagagtcaggggccatgtgggttggtaattgtttacagtctagtccattcagagcaacagagaaattcctgcaaaggttttatgtggctaaatgtctagaattggacaaggatctcaccytttcacatccgtacttctctgtggttccgtggtggatgccccagcctgcatgaagttgctgttggtttatcctttgccttgatgtcttttgtccaagaccatctagtctcagcaagccccacaggccacctggctcaagggcagagccagcacatcatgggagcatgccaggaatgaactctgtcattgcagagtaagggtactgtgcagagaactgtggccatcctcacttctttcttgctgatttttgtcctcagggatatcactcattagtcttttttttttttattgttgttttaagagacagggctttgctctgtcacccaggctagagtgtgttggctyaatcatagctcactgcagtctccaactcctgggctcaggtgatcctcccacctcagcctcctgagtacctgggactacaggcacttgccaccatacccagacaatttttaaattttttgcagacacaggatctcactatgttgcccaggcatgtcacaaattcccagsctcaaatgatcctatctcctcagcctccaaaagtgctggtattccaggtgtgagccaccacacctggcctcatgattggtcttaatcagacatggctctcccattctcctctcccagtggcattgcagctagagctggctataggacttggtgatggctaatgagacacagaagacgtttctggaggatattagctccatgataaaaggtaagagagagcaagatgagaagattgatctctctctctgccccaattcccctcactccctacattctgcctttgtgggcatartgcttgcagctacagtagccatcttgtagtcatgagatggcaaggctaacatgctaacagagagtgatgaagaaagctgggaaaatctgggtccttgatggaacagctgagccaaccttggatctgcctataaatataccttgataatacaaaaatccacaccgatgtgtctcaaccaccaggtatgttctgattctttcagccagatggatccaaatgatggaagatccaaatggtggtgagtgtttgggctgctgatgcttgaactgagtctaaaaatggcccaagacagatatggaggagcatgaatgagaaggaggaaaggaatcctaggcacatgtccagactaagtagaggcactggaggcaggaatgagcaggagaagagaggctgatgttggagaatagtgggagatgagcttggagcctgagtaggcattggttggttgcctccccagtatccatttccttcttccacccacagtgccttaaatttaagaggcatctctcctctactttcagcccatgtgtttctgttggtgttgactccaccctggtgagaggttgatcttgcaacaagtttagcctatcatcattttacattctccccagctacagtgattggttcagggatgggcaagtacccagtgcaagtcagtgatcaataagacttcccctgggacttttgggaaggaaactgtcacttttctcctctgaagttgactctagaagtgtgaaccctgggcactctggcaaccattttaagactgcaagggggaagtctgaccaagaatggaayctaccttaagaaagcaaagctaagaagtgttgaaagagaaaccagttcctggtcatgttgccagaccccttgaatcaaacctaacagtactgagcctaacaatcacataaaccaataagcatgggaatyactttctgtcacaactgaaagaatcatcatagatctggaaatggtcacattgggggctatggtcatgttggaggttgtagacaaaatttttgataagaaagctagactctggagcagagaaaaaaagagttttcgtccaggcatggtggctcacgcctgtaatctcagcactttgggaggccgaggcgggtggatcacgaggtcaggagatcgagaccatcctgactaacatggtgaaatcgcatccctactaaaatacaaaaaattagctgggtatggtggtgggcacctgtagtcccagctactcaggaggctgaggcaggagaatggcgtgaacccaggaggcggagcttgcagtgagccgagattacgccactgcactccagcctgggcaacagagcgagactccatctcaaaaaaaaaaaaaaaaaaaaaaaaaaaaagacttttcacagcatgtctaaattagccagagtaggggtcagaaaacatcataaaatgaagttctgagttcctgcccctgttcttgtatgactatgtctttagtggccaagagacctcccttctctcttctcatcactgacagagttaccaaccagagattcacttaataaaattatcttttaaaatgcaaatatcttttcaccttaatacactgaaaaaagaagagcaagttaagcctaaagcaagcagaaggaagaaaatcataaagatcagagcagaaattagtgaaataaagaataggaaaacaatagaggaaataaatccaaaagttggttatttgaaaataccaataaaattgataaatcttcagctagattcatcaagaaaaaaagagagaagacttgaattactacaatcaggaatggaagaggtgatgttactaccaaattttctaaaataaaaagggttataaagaaatactataaacaattgtgtgctaataaatttgataacataaatgaaatgaacaaattttaagaaagacccaaacttagacttaaaacaagtaaagacattgaattggtaagcaaaacaaaaccaaaactaaaaaaactaccaacaaagaaaaacccaggcccagatggttttgctgttgaaatctaccaaacatgtaaaaagaattaataccaattctcacaaacctttccaaaaaatagaggaaaacacttcccaacttattctaagtggtcattattacccagataataaaagtaaacaaagacatcacaagaaaagaaaactaaaggtcagtatttcttatgaatagagatgcaaaaatacttaacaaatactagcaaactgaatctggctaatttttgtatttttagtagagatgggatttcatcatgttagccaggctggtctcgaactcctgagctcaggtgatccacccgcctcggcctcccaaagtgctgggattacaggtgtgagccaccgygcctggccctatctacctatttatccagccatccattcattcattcacccatccatccaccaactcacccattcatccatttacccatctacccatccatacatccattcatccttccatctatccacccacccatacatctactcacacacccactcatccatccacctaccatctacctatccatacattcatttatccttcagtccatccgtccatccatccatccatccatccattcattcgttcatccatccacccaccccatacatccacccagccacccattcatccacmcttccacccatccattcaccaatccacccatccatccatttattcattcatccacccatccacacatttacttatccatacatccgtcagtgtcattcagtaaatatttactgagcacaaactctatggcaggccttgtgctggatcttgggtgacagagaaatcattaagaccccatggtccctgccttccaagggctcacagcccaaggagaacggcaggcaggcaagccactagtgcatgtgccagggtctggagtctagaccgggtgatttgcctggagaagctagagggcttcccagaggagaggaccctcacagtcccatgctcatgccccacctggccattcagtgcatttagaattctatgcaccagaacaaagatgggcattgtcaggctctatctccactgaggccccagccaagaattggggagacagcctgctgatctccatggcttaacctcagagggctgcagggaggcatgtattccttgaatacatgagtttcttaaaattcttttgtaaccactttttatttatgcttgtatcacctttggaaaggggcaggaaacgaatctctttggaaggcccaaacctttgtctgacacgttgctagatacttctctggctttacctccctgactctcacagcacccatgagatgcctggcctcattcttgctattttattgccatagacagtgtcagctacatgctattaagtggcagggccaggatttgaacccaagtctgtttgctttaaaagcaccattgaaattccagcacctagctatgcctcgtaaaatattgcagaaccatgcctgtaactcagctgtgtgtacagatgctacgtaaccctcacaacaaccctagtggggggtgggcatgataagcccattttacaggtgagaagactgaggcccacaaaggctcagtggctctgatgaggtcccacagttaggaatgccaggtctgcggtatgagcctgtggtccatgccccattcaccctccataggtgttcagctcccgctcccactgatgatgctggcctggctgcagatgccccttcaggtcataatggagtgcagaggcctcattgtgcctatgaaattgtgaccattttccttaaattcatcactcaatgctcgtctcacctctcccgcattctcaataaattcctgatcatttatcgccatccgtttggcatttcaccacccagaggaacttggagccatctgcagccttggaaagttcaagctgttctccttccaggaaagaaaatgaatgttacataagatggagcccagcacattcttatagaagatcaggaaaccacttctctgactaaaacagctccctgttatctctgcctcttgcttcctattttatccaggtccacaatcacacggcagctgccgtttttaaacattctctcttgcagagcctttaaaaagagctccatactgtccctgtgttcccatagaatggccgtctctccaagacccccatggactctgtgaggaaaggcttctcccactgcattgttcccagcagagcctgtgctggtggccttgtcctttgtccttcaggtgtgggtgggagacctctccaggggtcgaggtgcctgcagacccccagtggaccctggcccacttcctcctagtgcctctctggggtggcaggcctggcccaactattaccatttcttcttcatagaacaggctcttcttctacttgctcatcttaggttattttatttggttattgtcaataaaactggctctgtgttttggggaaacatgttcattatagaaccttaagaaactgaagtagaaagatgtgactactgaccactccaggacaattaacgttgatgtgcacagactctgaggagttggaaagcaccctaaagatgatctattatagtttgacctgtgggctctaccatggggaaactgaggcccaggggacttaggctcactcattcccctgtaggtggccatggcaggagtggggagtcctactcagggagtcactgtgggatgggggacaagtgagcagaagcgatcagtggtctctgccatgtggccaggatggctttaagcagacgtgacatttgagccgggtctggtccgcccsgtggccctgcaaccctctgctcactgccggcctcctgggcgacactgctttctggctctgcggccccatcctcctcccattgatgttacctcctaactagccatcttgcattccgggtggtaattcctgctaaatggctccagatcagcttttcccaaaccttgattgtttacacgccacctttgtgattttcatagcggctatttaaatttcatattatttcttcatagtttttttaaaatcaactttcttttttactttaaatctattttaagaggaaattttattgtaacacaagaagtagaaaccagtgtcaggggctgtaaataggtgaccacaaggagaaaacaaggcgacagtgtattgcagctctgcactggggtacactcaagagccctgagccaccccgtcctgaaagtggtggtgagctagtgcctgagaggtgcttaaaatgggtcagcacctgagtgagtctctstcttaagtactcagaggattggaatgggatgaacgagggaatgagtaatgttttcctggtacacggtgatggcatttcatgctgtgacatcaaacttccctaactcatcccaggcacaaccagctgtgggagtcctacaggctgagagactcatgctctgcacactcagggctcatcacaccagctagtaaatgtgcagggtttttaacaaccctctgtgtgatttagagtctagctctcttcttttttgttttttgccctgacatatatgcacatcttcattcaaagtcatcccataaatgagtgtactgttcccctcctatggaacatgcctgtacagtaaaagcatcccatatggtgtgagtgcaccagcatcggccatggtttgctgtgaggctggttggcaccaaggagaattagaagaagcaggtggggccagaatatcttcacccccaccccactgcttgttccttcaggcggcctggaggtgggtgcccactgccagaacaagagcaaacaaaggccctccccgtgcagcaataaagagaytcaggcttgtgccaggtgtggtggctcacgcctgtaatctcagcactttggcaggcygaggcaggtggatcatttgaggccaggagttcgagaccagcctggccaacatggcaaaaccccatctctactaaaaatacaaaaataaactgggtgtgaggggacgcacctgtaatcccagctactcaggaggctgaggcaggagaatcacttgaacccaggaggcggaggttgcagtgagccaaaattgtgccactgcaccccagcctgggtgacagagcaagactctgtctaaaaaaaaaaaagagagagagagagagagactcaggcttgaaagacagtgctccaagctcttgcacagaagcgaggtcagtcataccagcatctggtccttttccagaatcttgggacagctgtggagctcttcattaatggactgctctaaaagtcacaccaygtgccttccacagaccatcagtgatttcccagaagggcagttccaaatattgatctaaatgtcgcctcagaggagccctttggcataagaaccttttcaaaaccggccagggccccggctggcctagaagaggcatctgaagagatcgcacatgttaataaaggttcttaatctcttggcctcctataatgcagaactgcttttcgattaaaaataaatcactcctggagcttgcatccccaaagcatatgaaataattttgaggcagtagatatcttgtgttggaggagtaataatrgccatctaagtttccagcctagtacaaggggggtgattatccatctcaccccactggcactgacatattttctgcacctgtaggagattacaggaggatgggaaagtgtgggagaggctaatcaggcttaattagggaatgcaggatgtcggttttgcttgttattgcacctgggcaccagggctgtcaggctgctgaccgcctcggtgggcctccacactttggtcctgtttgcattttatgagcagcaaacaggtatgcacctaagtaagtgaagttcaagaccaaactcttgaacctagtatctcttacactccgcaactctagcatctccagtcctataggaagcaggcctgtgctgtgtggtatggagcggatgtcccctgtctcctgaccctgacatgcttggctcagggtgcccaacccggcctggcatatgctcatctgctaattattctgggtccacactagactggaagttccataagggtagggacttggtctgagatgtgtccccagagcctaacccagtgcctggccagacagagctctcaaggaatctctgttaaataagaaatagagggctgtgagctgtgtgggcctctgtctggtgacaagcatgggttcttcctgttgggttacagctgtggccacagcagccttccagctactttcatagggcttcatcctttctagaaaaaaaattatatatataaatattttatattataaaatatatgatatatttattatattattataaatacatattttaaaatacataacatatacatatatattttttctttcttttttaaaggaaataaatactttagggactactccagaaccttgcatgcatctgaacttttcttggaaatgtcaccccttttaattttgttttattgtattttatttttgagacggagttttgttcttgttgcccaggctggagtgcaatggtgcgatctcggctcactgcaacctccgcctcccgggttcaagtgattctcctgcctcagcctcccaagtagctgagattacaggcatgcaccaccaggcctggctaattttgtatttttagtagggatggggtttcaccatgttggtcaggctggtcttgaaatcctgatctcaggtgatccaccagcctcagcctcacaaagtgctgagattacaggcgtgagccgccgcgcctggccgttacccccactccttttttttttttttttttgagatggagtttcactcttgttgcccaggctggagtgcaatggcgctatctcggctcactgcaacctccacttcctgggttcaagcgattctcctgcctcagcctcctgagtatctgggattacaggcgcttgccatcaggcctggctagtttttgtatttttactagagatggggtttcaccatgttagtcaggctggtctagaactcctgaccttaggcaatccacctgccttggcctcccaaagtgctgggattacaggcgtgagccaccgcacctggctcattacccctttttaattagtagcattgctcttctctctctgactatacgtactctctctgacttctaaatttatcagcagcttcttctgaagctggcctggtacccggtgagctctacgggactctgagctgagtttagaggagggaaaggcagttgaagggatttcttgttggctacaatgcttagacacctcagggggtgaagcacatgctctgactgttaccagtaagttcccaggccaaccagtgggtagttcttactaccacacttggcttgctagggcttttgcatgaaaatgaatgtgaggacataagatcagttgtggcaggaagacacataactaaccacacaggggaccaacataaaagctgtttcctctggtataggctgactaatgcacgggtagcctggctggggctccacaggcaggaaaacattttgataagatgattataacagtagccataacagtagccaactttattgtgtatattctatgttgtttaattctcactacaggtcctatggttctcctcatttcacagatgaagaaacagtagttcagcaacttgcccaaactcacagaagtaggaagtcacagagcctagatctgaactcaagtcaactggctattccccatgtaaggggtcttattaatgatagtctgcatttgttaaggtrcaggctgagcacagagacctcaaaatttagtggctgaaataagagagaggtttattttgctctcacttagcagtccagaggtgagcagtccaagttggtagggtcactgggctccacatggccattcagggacctaggttccttccatcttgttgccccaccaccacttagagtgtggttcaatcaccaaagctggtcattgccttctctgtgttccygaccatggggaggagaaagagcaagtctaaggcaagcagattatttcaagtaggtgttgtagaaattgcatacgtcacttctattcatattctattggcataacttagtcatacggccacacctagctgcagggaagtctgggaaatatggtctctatctgggcagccatatgaacagttaaaattctataaaactctgtaactacagaagagagaatgcagtttggggcaatcagtttgcagtctaccataaagaccatcttctcttttgtgaatattaagactgggctaccacaggacagtgttaaatgcattcatgatcatatgcagacatggggtcatctattcatttcataaatatgaagcccttcctttgccggtactactgtagtgagctgcttgggggctgccaagatgcctgattcactgtctcttcctgaggcacagccgggagatgagacatcagccaggaatcaggaaagaggaaagagagttgactggtggatttcattcactcattcaacctggtgtatttacacacatcttgtgctgagaaaggacttgaggtagcccacttgtagtaggatacagctggcaaaatgctgttcgtgtgcgtaatctctttcaccttctcacccactctgagggaggcagggtagtttcagaggagttctggaagcatcagaaatcccatgactggtgagtggtgagggcaggatttggagctggtcttgagggtggtagaaagggcaaagtgcagattcgaagttgggagagtccacattcgaggcccggctcttctgatcctaacgaatagcttcactcacccctggaagcctcagtttcctcatctggaaaactgatgctcaggctacttatgtcaaagggccaggaggaggacctgctgagataatgggtgagtttctggggcacgtagatgctccacagccgtgagtgtcctccctggcttcttaggagcacttggtccctggcaatttgcattacatgttctatgatgtcctaagaatgtgtcctcgagagaacaatgagtccatggactcagggacactgggcagggccctatctaggcctttggtgtttggctccaagttctcccttcatcgtgggaatccagctgcaggcttgaaaggcaatgctcctgagactgctcccctgctctgccctcagcttccctcgggtgctctccagcttggctgcaccacctgtgacctcacttcattgtggacaccctgaccagggccccagtgactggggtacctggaaaggctgtggagcccagcctcctactgataggaaccttcctgcaggtgaggaggatgggaagggcatcctgagtggaggagaggccacacaaaggtgcggggagatgatgtaagtgcagagacatcagtgattttggctgttgacacaacaggaatatggcatttgtgtgagcacagatttgagtgggggaaactgggggcagggtgtggagttaggaggctgttgggattgttcaggctgttggggtaataaggtctgggagtgacagcagagggaatggaaagaacaaatccaagagaagtgaagactcagcaaagggcctgtccaaggaggaagtcctggaacccagagtccagtggcagctccacaagaggacaggcaggggccacagaggcaagaacagggccctggggtcccagcagggtacttcggagccccaggactgtgactcagagcaaagcagaggctgaagctgaaggtgggagctcagagagacgtgctgcctgttttatggcacccaaagaattcacttcatgggctagagtctgacgcatagagaacctgaacaggctcctgctttcctgcatacatagatacgaagaaaagcaaaagagtgattatcacaaaactctggacagtgggttgctcctgcagggagaaaggtatgcactgtgcttgcaaggtgctggtcatgtgctctgtgtctttgactgttagtaggtacatcgggtttccacctgttatgattatttgacctgtgcagatcagttgtttgtactttttaatacatatatctgtttcacaatgaaatgtcacacaccccttgctgctctggatgacatcaacctgggcaaagttggagatgaaggttagagatacactggagaaatatatgctatataaagaattttgggccaggtacggtgggccaggtatggtgggcccacatgcctgtaatcccagcactttgggaagcccaggtgggagaatcacttgactcaggagttcaagaccaatctgggcaacatggtgaaaccctgtctctacaaaaaataaaaatcagctgggcagtggtggctcgcgcctatagtcccagctactcaggaggctgaggtgggaggaccgcttgagcccgggagtttgaggctgcagtgagccatgattacaccactgcactccagcctgggtgacagaagaagaccaagtctcaaaaaaaaagttgatttttatgttgtttgtttttctaatctggaatatttgaggagtctagtgacattccggatgtcttaggcattatatgtcttaggcatataaataaggaatcatagacagccataataaaaggattgtgttcaacctccatcttttcaccctgagtttctattttcaggagccttccagctcagaaaataggctgcatgcggagcaagactagactgagtcttgacaggtcgaggggaatattacttaggagacatggttctcttattcgcctcaggaacattttttttttgcctgcaaaaagccaggaggattctcagctttgcccaggtgttctcagggacagccacacagaatgtcccagaagctgagtggaaagcagtcctgggatacaccctctgcagagggatggtgaaagacaactggagagacgattttgatgcggtcacacagccaacagtgacagtcatgtrtgtggcacagcatggcctctcgtgcctggggactgcacagcatcacaggcttctcctctgccaccctgtcctcaagcacaccagtggattgcaggcctcccacggagctctgcagagtgggtaaggcatccgccttccagaacctctcagcttagcaggctgggtaaggcaggcagtcgccccgggggaatgtgataagtgcccaaagagagatgttagcagcatgataaattaggtggtaaatgcaccaggctctccgtccccgtctgtttcaggctggtggatgctggatttgctttcgcacatttatatggaaatacatctttgctgtggcttgtaattttctagttgaataacttcagggtaggcctactttagaatttaattatccttacgctgggagagctttgctgaggttcagtgctcagaagagtgcacgattctaaacattgcgtgacactcaccatagggcaccgttggctgcagtacatcactgttttgagggttgtatgatagtgttcttatgtcctgctgacccaggagtcaagatggactggtctcaaatgaaattctgccctaccactaatcacgcagcagggaggtttctcatctactggatacttaaccaagaggttttgaagccagactgattttggcaaccctaatgcattggctccacagtgcttttttaatgacagtccaagctaaatatgaaagatccaactgcagattcattgtgcactaaaggcttgaatctctaagtagtggtgacatagtcctgtagggaaattgtgaattgaagcttctcagaattaggcttctcaaagccgaggcccaatgtaggaagataatatgtggctgtctagagtgtggtgctgaaaaagggtcagagggcttctgtgttcctcagaaaagggaactgggattgattagtaatatctgctttgagttcaggagcagggacagtggcccaaatgccatgtgtttgtaattagccatttccaagatacctcccaacttctgggctctgtgcagagagtggtggggcggggagggggctttctccaatrttctctccattcaccctcactgcaaagtgttgatgctatttccatgggaagatgttcatggaaagatgttaaggaatcaaaagcaggatttaaaagaaacatacaatgtataaataattacgaacaaattttaatatatttggaaaagaacctggaaggaaatatatcataatgttcataattgttatcactgggtgataagattgtggatggattttgctttttccttcatgctcatctatatttttctatttttgtgcaatgacccatattcctttttaagcatacataaattatatgtgtgagttggtgtgtgcattcttcaatattacatatgtgcagatttggtggcatgcttttttcactttataaattcatcaggaacattaattactcctcctcaatgtaattttttagttactacttaaggtaattctaagccttttgcttcatctgggctgaaaggtctggacagcaacctcatcatcatctcctcatatttttttttaaagtatcaacttttatttagattcagaggatacacgtgcaggtttgttacacgggtttattgcatgatgctgagtttggggtatgactgatcccatcacccaggtattgagcatagtgcccaataggtagtttttcagtccttgcccccctccctcccttccccctctagtaattcccagtgtctgtttttcccagctttatgtccatgtgtactcaatgcttagctcccacttgtgagaacatgcaaaaccccaccatgtttggttttctgttcctgcattaatttgtttaggataaattaatttgtttagtaatctccagctgcatctgtgttaactgtaaaggatatgattttgttcctttttatggctgcatagtattccattgcatatatgtaccaccttttctttatccgatccactgttgatgggcacctaggttgattccatgtctttgctatcatgaatattgctgtgatgaacatacgagtggaggtgtctttttggtagaatgatgtattttcctttgggtatatacccagtaatgggattgctgagttgagtggcagttctgtttgcagttctttgagaaatctccaaactgcttttcacagtggcttaactacctcagtttctaatactagacacacattaactttcttccaaaaggacgagcaaaagataaaaactcaacagaaatctgaaagactctgcagcccaaaggaggggggtatcctgaggaggaggcctacataagactcatagaagagagtcttacatcatagaagacagtgttacatcataaaagacagtcttacatcagagaagagagtcttacatcatagaagatagtcttacatcatagaagaaagttccacatcgtggaagatagtttgacatcatggaagacagtttgacatcatagaagacagcctgacatcacagaagatagccttacatcacagaagacggtctgacatcacagaagacagccttacatcacagaagacagccttacatcacagaagacagtcttacatcatagaagacagccttacatcatagaagacagtctgatgtcatagaagacagccttacatcatataagacatccttacatcatagaagacagtttcacatcatagaagacagtttggcatcataatagaggatagtcttacttcatagaagacagtttttttttttctcctgcctcagcctccttagtagctgggattacaggagcatgccaccatgcccagctaatttatgtatttttagtagagaaagggttgcaccatgttggccaggctggtctggagctcctgaccttaagcaattctctcgcctcagcctcctaagtagctgggagtatagacacaagccaccacgcccagctaatttttgtatttttggtagagatggggtttcgccatgttggccagcctggtctcgaactactggcctcaagtgatctgcccacctcggcctcctggagggctgggattacaggcataacccatcaaacctggccagaagacagccttatatcacagaagacagccggacttcatagaagatagtctaacatcatagacgatagtcttaagtcagaagatagtcttacatcatagaagacagtcttacttcaagatatttagaaaatttccagtaacttccaacacacttcaagaagacttggccaggcgcaaaggcacacgcaagtagaggcagaagtgagataaggagaggagaggggaggggggggggggggggggagagggggggggggggggtttttttggggggagagggggagagaggagggggggggaggaggggggagggggggagggggggggggggagggggagggagaggggggagggggggaggagaggggaggggagggggaggggggaggggggggggggggaagggaggagggggggggggtaggaagaggacgatagaagctattggggggggtggggggggagaaggggaggagaaatgggaggggtggggggagagggggggcgggatgggggagggagagtgaggggggaggagagaggaaagggggagaggagggaggaggggagaggagagagggaggaggggggggggggggggggggggggggggagggagggaggagggtggggaggaggaagagggaaggagagaaggaggaaaggggagggagggggaagaggaagacaagggagaggggtggaggtagagagggggaaggaaaagagagaatacggagggtaggggaggaggggggagggaagggagggggggcgggggatgggcgggagaggggggagagaggaaggaggggaggagagggaaggagggggagggaagggggggaggagggagggagggaggagaggaaagggaaggcacaccgagggaaggaaggggnnnnnnnnnnnnnnnnnnnncagaagacagctttacatcacagaagacagccttacatcacagaagacagtcttacatcatagaagacagccttacatcatagaagacagtctgatgtcatagaagacagccttacatcatataagacatccttacatcatagaagacagtttcacatcatagaagacagtttggcatcataatagaggatagtcttacttcatagaagacagtttttttttttctcctgcctcagcctccttagtagctgggattacaggagcatgccaccatgcccagctaatttatgtatttttagtagagaaagggttgcgccatgttggccaggctcgtctggagctcctgaccttaagcaattctctcgcctcaacctcataagtagctgggcgtggtggcaggcacctgtaatcccagctacttaggaggctgaggcaggacaatcacttcaacccgggaggcggaggttgcagtgagccgagattgcaccatcacactccagcctgggggacaagagcaagacttcgtctcaaaaaaaatgaagaagacttggcatctataaaataagacccacttatgcagaggggaagaaactgacatctgaaaagattccgtgggatctagagcttctctaattatggggaaggagattgtgaatagagagcccttagcccggtgcctggcccataggctctcaaaatatgttactgttatcattcttaaaataagttatattcacacacaacctatttttctaatgttttcccttattaggatttatgccaattggggatttttaacctgcagttttagcaattctgccaagccaggcccttccctgcctctccctagactcatgcaagttacagartgagacccgaatgtggcctgggagctgctgagccagccaagggccagggcggctgccattctgccaygtgcctggtcgactccgattgctttatttctctggtggagccactgtggttcgcatgttggagctgggaagggttccatctggctcacagccaaggaggaatggagaattccttcagacttaggtaggctgacaatcaacatcattgctcccaagaaaaaatattttgagtcatgacccctgggtgggattggaacccttcagtttctgcccagatgtgcctgcttcatgggaaccagatgtgttaaaaagcaaaacacgggccagaaaacctgccatgtgtgtaaagaggctgtctggagcagtcttcccaagggcccgcatagctttgcatgttctccagtggcttgactgaggaaaccctaacatgcacacgcaggagaggcagcctagagaagtgaactggtacctaccggcagcttttcatcttcaaagcacttctgcaaggcagggattttttttttttcttttgagacagagtctcgctctgtcactaggctggagtgcaatggcgcgatctcgtctcatcgcaacctccgcctcccgggttcaagtgattctcctgcctcagcctcctgagcagctgggactacaggcgtgtgccacaacacccagctaatttttgtatttttagtagagaacggggtttcaccatgttagccaggatggtctcgatttcttgacctcatgatctgacctccttggcctcccaaagtgctagaattacaagcgggagccactgcgacctgccaaggcagggattattattcctgttttccaactgaggcacttgaggctgtgagtgactttctcaaataacaaggcagggttcatcacacagcaatccctttgccattactccagcctttctcgaacccctgtccctcagatcttagagatgcatgtgtggaccacagcaatggacttttggctgtagtcttggtctgggcaagaaaaaaacgtggatgggttgatataacacaagtatctgaaagccagattgatagatgtaaatttctagagagaaggacctagacatatagatttgaacttagtgagtggcctctgggggccgggatgctgcatgtttgttcgtttgttttttgagacagagtctcrctctgtcgcccaggctggagtgcagtggtgccatcttggttcactgcaacctctgcctactgggttcaagcaattctcctttctcagcctcccgaatagctgagactacaagcactcatcaccatgcccggctgttttgtattttagtagagacggggtttcaccatgttggtcaggttggtctcgaactcctgacctcaggtgatccccctacctcggcctcccaargtgctgggattacaggtttaagtcactactcccaacagatgctgcatgttaaaggactcatgctcctcttgccttgagggcagaacaaacacaaatggagccgatgcagttcaaggaatttccataaaaggcaaggaaggaactccgggcctcaagagtttaaaactgagataaacagcccatgttaatatttgagtgtcctgtttcacagttttgggaggaggctggagatgatataattatggagttcagtccacagcatgacatatgtaaagcacttagctcaataagcattccttccctttcggggtaggggtcggggtagggggatcttagagatgcacagatactcccaatataaacaaaacataatcaactgcaaccatgtagaatcatcaggacatgaaatgtgagctgaactgtggttagcctggaggctgcagatgcttctcagagagctttgaagcaggatggctcaaagacaaacaagaagtgagaaagaaaggagggagagaggaggcggggtggccctctagtgcctgggacagagaggtgtgcgggaggagctttcaggctcctttaggactctgatctttcaatgatctgaagaaagctcatactgaaaggtaaagctcctcacacagggaatttgggagtcaggctctgcagttttcttctatttctgggagcacttatttcagcagggcatttgcaccaaaggaagaggaagcctcctcagacgctgggccggccataccctaactaagcatgcactttgggcaggcacagcacaacctcagctgcagtctcagtggtacgggtggcatggaagactgggtgacatggaggactgggcctcaccgcactggggccggctaccccctggggttgccatcagagcaagttcacacaccagcccacgggggaactcgtgggatctgtcagtgtgagcggaagaaggatcaggctcctagactagggtcccccaggaagtgggcaggctggctggacttcagtaggagaactgagctagaaatccaggcattctggtgtgggggaggcaagaggctgcggggcaggctggagtcaggctgtgctaacgggaaaatagggagtcagggaaattgtttcccatgcgacttccgtaagggcagtggaccgggtctcattcaactcaggattctgaagtggcttcacaaaatacgcttagtgttccttacggacgaaggaaggaagaaaggaaggactaacagtgcctttatttcaggattgtccaatctatccccctccctccatctcatctcctgctgccatgaggtcacagtgggagtaaatcgtccacgacaggcaatgtagtgtactggttaagaaaggtcttcaaatcagatctctctccctccaagcttggcatgtgtgcatttttagctaaattcttaacagctccatgcccaattcctaatctgtcaaatggcttagaatgttacgtaatgctgagatcacacctggggagacgacaatgttagctcatgtgggttgagtgctccgatgcacgctgggctcgtgtttcactcattaccaatgtaatcatcacggagcctctgggaggtgtgtgctaccattagtacccacttcacagatgaggaaactgagacatagagtgattgagtcacttgtcacctaggcctgcagccagtcaggggcagatccaggattcaagtccaaagaatcagattccagggccccagcccacaggatactgctttttaatcagcgagcacacttactactaatcagggtgattgtcactttacccaccttggcgtaaccaagggcttctgatttgtagtgttttatgataataaaaaaatacatagcttggaggtgggtggcagcatttgtgctaaaatatgctggatgcaaagttgttctgggtctgagttgtgcccattctgaaaggagtattagatcaaagaatgcttacctgtgctgtgactttgttttattatggttataattttgttttcttcttggaaaatgcctctattaaaggtctgcctctttctttcttttctttctttctttccttctttcctttcctttctttcctttctttctttctttttgagacagggtcttgctctgccacccagagtggagtggagtgcagtggcgtgatcatgactcactgtagcctccacctcccgggctcaagtgwtcctcccacctcagccttccaagtagctgcaccaccacaccctgctaatttttaaaatgtttttgtagagatggggtctcaccatgttgcccaggctggtctcaaactcctggcctcaagcagtcttcccctactttggcctcccaaaatgctgggattataggcrtgagccatctcacccgccccaaaatatgccttttaaaaataagctaagattgggttgggtgtcagggatgatgagtctaattcccattgtgttcccaaatctcaaattttccttccagccgtagatgggtcccgggccttttcacatcctagcccagggctcctgaagctgagcccacaggggatgatccacagcagctcctcccaccatggctgggctttgctcacactcatacccagctcctcctggccaccacatgcctcagggccttgtgtcccttggcattccaccccctcctgccccacctttaatgccctttgcacatccccccaccccttttgagcccaagagagttcccacctctccagtggagcgtttggataaccaggttcagctgcaagcacaagaagcctctctagccaggcaaagcaaagggatttaacctggggcattgagtgctttcaaaactactgggcactgcgggagtggtctgtaggcctccrggaatgcttcatgactgttccagcccacagttgtctctcctatctctgatgcatttcattcattcattcattcagtgttcatggagcagaggcagtgccggctgctagggacaggacaccaggatgaatgaataaaacatgatctcttctcaaagaacacagggcctacacgccctgatgatgaactctggataagagccatgaacagagtaatgcagggccccaggagggtgcgcctacctcagtgttggggaagcgtggaaggactgcggagtgcgcagagggcaagagcaggcctctgcccaatcatggggtcatagacagagggggtgtggaggaaccacacgtctttccctgtggttgcagtacagggtagggtaggggtgccgggacaggtgaccagagagaggataagctggtcagggtgaggggcttttggggcatgacctgaccattacgtggtgttgtcttattatttaattacagtggtcaagaaggcagacttaccagccagcctggctgagttaaaattctgctgggctcaaaacctactagttgtgtgacctcaggcaagctatccaacctgcggacctcacttttctcatcagtaaaatggggtaataacagtacccacatcatgggggtgctgtgagggttaaatgagttgatatgtaataacacacttagacctgtatctggccaaggtgtcagctgtcagccctggatgttatttaatgcctaactctgtaccaggcagcatgctggtgattttccataaattctctcaatcagtcctctcaaaggccctccctgggaggcaggcgttattgatctgttttattatacaaaggagaagtctatttctagtttcctctgagattttagctccttcactggctctgttctatttctgtctcccgtgcactgtcgctgcaggagccctgccagagacagagaggaaccaaagccccctggaactccaagaggaaggacaagttagatctgggcttccacagagccatcatgctctcctgccttagttactggaaagggatccaacgcactctcacaagcccacacgcagcccggacggcagacgtgccggtcaaatttgttaaagtcataaaatttggcaggacggagtttggtagaagtggaggatgaagtgagggatccagtcgaatgagtgggatgctctggaataagcaagaaccaagagcaggcactgcctggagcggcaggcgatgctcccacccctccagcgaggacaccctcaggggtgtgggactagtgtccccgaggctcccctcacccaggactggtggcatccccacctgcctagtggtaggaacaaacactgtatccctctgaccatacatttcctctaacaaaatattcattttcctaagaaaatgaacggaacgttccttcagctgggcattccgttcttcctttaagggagcctggcattgcttcgacaagggcaggcaggaaggaggctagcgttttcccctctgccagccgttccacgtgctctaggggactgtccgtttaattctcttggcagcctcctagggaggcactgtcatctccactctgtggatgagcagtcagggggccagcaagtccagccaagtccagagtctggccagaacaggccggccccttcagtggaggtgaacccctttcatctcagctctggtctctgcctttcaaggcagcagtggctgctggtgtattgcaggcgtcttgcccagggggctggcagtgaccatgagaatgtgagttgtccctggccctgaatcctcctcctcatgcaggaggcgggtgaggcagagaggatggtcatgaaggcagaagcctcgatcctgagccgcagggcctcagtgcacttgcacacacattgtctcattttacctccaaaccccggggaggaggctgcagtgttcctgtgtctcaggtggagaaactgaggcccacagaggtctaggaagcagcttgtgggagggccagagctttaccccacacctccacatggcaagtggctcacccggcaagtggcttacctgcgccatcggagcaaatggcttcctagtggacagcgatggggggctttcattagcccaggcaagacccctgccccatccgcatttccttatttacctcgcgacattgctctctgaggtcggtggtgttaggattatccccacttcacgggtgagcgaactgaggcccagagaggttaggtcacctgattaataaacaaaggcataaaaggggcattcgtttttcgatggagaggataaagcagcctggtttgtacattctgagaggctctgcggcttgttcatctcgagggctgtgtgtgctttattgggagctgtcccacctcctggggctggatgccaggcaggccatctgcttctggggctgggcgcccctcccacagtcattgccttctccctgaacgactggctcccaactggctgcagccgttaaagaagttccaggaaaaagatcttagccagcctcctctgcaacctaatttctgctgctgtgggtattgccttgtctgcataaatggctctgctaattttctgctgctgcctgttgttgaggttgcagaacggcaggggaagaagggcaggaaccaaccactttccttggcacctgctcagggccctgtcggccccttgatgaacgtggtctcttgtctcccactccattagcagcagccctgcaatcctcacaaagctgaagtcagatcaggtcgctgcccagctgggtaccatcctctgcacagaggagaaccccagtgccccactgctgcccctggggctgtggacccagccttccatgtacctctcaccttcctcctccacatggcgctctggactcggggccttccttctgcgcctggagtaggcacacctgtgtgtccccagcaggactcctgcaccaggacagctcccagccactcagacactcaggggccttccctggctattccctggagtctaggtcgggctcccctagtctaggttgggctcccttatctgtcgaccccctcatggtgctcacagtgctcctcacagtacacactcacaggcgtgttctctgctgagtggctgcaagctgtgtgtgggcagggacaacgttgtttgttcatctcagtgtcctgggggcctggcacgtaataagctcacattcacatttgcagactcggctgaagaaaagtaggacccactgttgttgccatcccattctttctacttcaatgccaaggagacaggccaagggccatcaggcgacttgcgcagggtcctgcgtggtcacactgggaatccaaccaggttgttctggctgaactttgctctctgttcacagcctcccagcaactgggatgtgcatttcctccacatctgggtttctcagtgctcagtcatgtatatatttggagcagaaatasaagcacaatgttttgtgaaaccctgaaggggaagcttccacacagtgcccagcatccagtggtgaatgtgaccttccatcaggaagcctggagctggggtctgtccctttacccagagagacaaatgcagacacacatagcttgggacatggccagctgtattcgtggcaacagggcaggaagctgggaagggccggccagaccaggccgggaagaggtctgaagagaggagggagcggcaacagtggctccacctgcagcaggtgtgtggggaaggaggggggaaggtctcacaggaggaggggtgtgctcacagggggtgaggtgaagcacctggaaaccctggtgccagtaagcacagcacaggcgggcttccaggaggctccaccctgggcactgcagtgggcagaggaaccctaggaccacccccacccccagttgttaaacatttaacagcacactatcgcctggcacatctgggcaccagaaaggaggcctcggagctcgggagcagggcagagggggagaggtgtttcagaggcagacaacctttgttctgttgcaatgcgaagtttctggaaggcttaaagcagaagggtaacatgatttgatttcgctttgctggacagatttaccaaacaccctaaggtcctgggaacatgtaaatgtggcagccagggggaaggggagattgagttatctgaatcggggtccaggcaggatctgaatccagacactaaggagaaacccacttaccacaatagaagctgaagatcagaatgagtccaggtgtccaaaggtgggctctcagggtgctgaccgggcctgggggtggaagtgtggggctgtggaaggctaagcctacaggtgctgccaacgggctcttcctgtgcagagagaagggtggcagtgacccccaccgcctgcagtgggacggctatatctgtcagcctctatggctagaactcgtggtctacccagcataccccccagggagattggtggccctaaggttgctctaagtttctacgatggctgcattctcaccacacttaagttccacttagcctctgagcagcaccatggcccaagctcaacattgtgatgagaacaggtgcttctccaccttggctgtacatcggagccactggggagcttttctaacctcagaccaattaaacccagaggtcccctgggagtgggacccaggcatcagcctttttgaaagctccccaggtgactccaatgtgtggccaaagttgagaacctctggattagaaggaattgctgtagagtaagagaccacttgtttttccacatattgacttggtgctggattctcttgacaggcaattccaggcatgatggcaatgccttgtgccatttctttggttgytaaatggaaccccgaagtccttttctgctgggtggcccctggctgcgatgagaggctggagagttgcatgatccagctcaacgacctgtctgtctgcattaacagtagcctgaattatgacagtagtggctgtgctcccaaagggggttaaagtacttgagctatcccttctggaagcacagccccttttgaagacagaagatgctgactaattagcagttccagccgtgctcctcagtagccaagggaaatgcaggaaagaaatcccatcagccaatcccagaaatatcaggtgggcaggtgtcatttacacaagtacacatctgattgagtggaggtggctgggcattccatggagcagtgaagagggygtgaaaattcctctggcttctttaggaaaaaggcaggaaaaggaaaaggacagatggcaaaggtgatttgaaaaatggggctaaatgaaagcaccataaaacaaactggtgccattctggccttacacagcctggctgaaaagagtcgtaggaagaacacagctgttgaatgaggtgtctatgtcctcagctgggcccctgttcatgttgctcggctgggatacagctctggggtccagtcctcagaaggttgtgggctgatgtcaaggtgggggcatcaggaagcaggcaggcaactagagaaccagagtgacggtcagcaggggtgtgcagaggggccagagcccagcagaaaggcccgggaggggttgccagatcaggcactgggagcctccgccgaggcagcgtctgtcctgactccatggcttgtgttctgagccctatagcagcttcctggagaccagacagccagcggcaacatactctgaatggtgttttgccaacttgccatgtggctcggacaacttactttacttctttttttttttttttttttttttttgagacagagtcccactctgtcacccaagctggagtgcagtggcacaatcttggctcaactgcaatctcagtctcccaaatagctgggattacaggtgtgtgccaccatgcctggttaatttttgtactttttatagtgacggagtttcaccatgttggccaagctggtctcaagtgatctgcccgccttggcctccgaaagtgctgggattataggtgtgagccaccttgcctggcccaactcacttaacttctatgcatttcactctcatctgtaaagaagataaatcatctgatgactggagagttagaaatcttgcatgtggagttgcagaggaacgggtgcatagtaaatgctcaggaaggtggcagcttgttctcctcctcctctttcccctcatcaccatcagcagcagtagaagttggtgggtatcgctcatggcatttactccgtgcctgaaggagactctagctctccgtaggtcttctgctaagaatataggtcttgaaaattggatagtttggaatctaaatgctgccacattcgcccccgagggaggaagcaggccctggtggaggacctgcctgccccgcgccagcactctgcctgggccattggcatcgattagctcccatgagcctcacaagcacccacagggcgatgctcttcttaccatgttacaggcgaagaaatgaaccttcatgggactggagctctgcctgagagctcacaggaagagcagggatttgggctccattctgcgtgactctgaagccccgcattttaacagcaaactcctcttatttgacaatgcctggagcccatggtgtggctcctggtgttgctgaggttttgtaagctctggtactgctgcagcacagtggcagccatctgggcgtttcttttcttttctatttttttggagacagagtctcgctctgtcacccaggctggagtacagtggcgccatctcagctcactgtcatctctgcctcctgggttcaagcaattctcctgcctcagcctgccgagtagctgggatgacaggcgcatgccaccactccyggctaatttttttgtatttcagtagaggtggggtttcactatgttggtcaggctggtctcaaactcctgagctcaggcaatccgcccgccccggcctcccaaagtgctggaattgtaggcatgagccaccgcgcccagccccgtgtgggctttcctaaccaggctcccttcttgtctctgcagggccctcatctttgtgtcccatggagccggagagcacagtggccgctatgaagagctggctcggatgctgatggggctggacctgctggtgttcgcccacgaccatggtgagtgtcccagggtgccgtcagagctggctgggccctgacaatttggagatctccctctctagtccatctcactgccagcatccttctcaattcttctattccccacggatgtttcaaagtaaaaaaatgtagttatgcaaacaaacaaaaaaaatgtctgacgagcagattctgtagtctgagactgaatgcaggctgattagaaacctcaactggaaaaacaaagtcggatatgttcatctcagaacttgcctgaggctaaggaattctttcctgcatttataaagtgctttctctcaaaatgggccctggtttttctccaagtgccctcaaatggrcatkgtgtagtcagttcaagtacagtgtaaaccctggtttaaccacacgaggtttaccaagcatttcagaccaggagaatagtagaagcctcaacaggccatattgttcacaagaaaacccaacacacacacaaatacaaggacacacagctacccatgcatatagtcatacacacatttgcacacatacacatatacatacacatgcacacacatacacacctgtacctatacacatacacgtaaaacacacatacacacatacatacacatgtgcacctacacatttacacacatatacacacattcacacatacatatagacatatacatgcatacataaacataccatccatacacaatcacacacacacaaccccaggccaggtctttgattctttgttctgtagcaaaatccacaaccatcaaaatccaatgttcattgtctgagtcggtatgtagttttgtaatcatgtttgcaacattctctatggctaggaagtctcccaatttagttctttgcctaacactttttaaaattaagacttctctgtgactgaacacggtgatttccccacagcttcaatgtaaaattctatcattgtggcccagatccagaaatgttgcttccattttatctgatttgaaaatggataataattaagtgatgtctctgaaaagagggacaggggagcaatgacagaggcctggaagtccttgtaaatgcgggaaagccttatctgtacggagaagctgcacaggaggtgaaaagcttgctgggacattctgtaggtaaagagctgcaaatgtgatttgccaggggctcttattcagctggatatacacaagcgtcctcataactgacagtattgactaattctttcttatcatagttgtgacgttctttagtgctttgcgaactgtcccagtaatatttgtgagactgtttgagaaataatatttgaggatcatctccgaggcttttagtatggggactgtgtcattattaactttggcacttcttacatgtaaaagcctcagataggaatttttttttcctattgcatttgcatcctttaaaatttgttacactcatcatcgttatgttctagagacattgtgaaggaaaaggatatttgtactatgcagctagagtcccaagaatctattttgtatcttagcaccaaccaccttcttatcggataaaacttggccaaatctgtgggattaagtaaatgttgttccttgtttattttgtctggctgtggcactttgagaaacaattttaaaagcctccttttttagaataaagrgagaaaagaaacagcccaccttttgatgtttccagaataacatctagagttgaggcagagctctctgtgacattctaaatatagtgcgaaaatggctgttggtgttcacctgtttcaagctctttgaatgactcatggaaatctctctggcaagtgcctaagggaagtgtttaattcargaaatgaacccagttgactgtgcgtgtgtgacttttgctgtggcttgcttagtagaaggaagccaagtaagtgggctgccattttggggatcttgtgcargctggcgatgcaggtactggtggctagtgatcttggctgtatttccttcttgctgagaaatgtgctagtaagtgaagaaggaaggatttgaacccaggtcaaaccttctttagaaggttggggagggaaaggagtgaatggatgctaaatctgacgctaactgattttactascttggatctcgttgctcaatgcattatagtatttcgctgttcagcattttaacagcaaatcctcttatttaataaggcctggagcccacagtgtggctcctgatgcattgctgaggttatgtaaggtcctgcgcygctgcattacagccacaactgtctagacttttctaagaaaaaaaaaaaaggctggttctaaagcctggccttttttattactgtacaccaatgtttccaggcacaaatgcctacagagatatatgcagactgcattctttccaacatagcttttattttatttttttactttttatttttttgaaatggagtcttgctctgtcgcccaggctggagtgcagtggcgtgatctcaactcactgcaacctctgcctcccgggttcaagcgattatcctgtcttagcctcctgagtagctgggactacaggcgcctgccactatgcccggctaatttttgtatttttggtagagacaggggtttcaccatattggccaggctggtctcgaactcctgacctcaggtgatccactctcctcggcctcccaaagtattggggttacaggcgtgagccactgcacccagtccaacatagcttttaaatttaaataaagcaggcaaggtgcaatggctcacacctgtagtcccagcactttgggaggctgaggtgggaggatcgcttgaggccaggagtttgagaccagcccaggcaacatagtgagatcctgtctctacaaaataattttttttaattagctgggccccatggtatatacctatagtgccagctacttaggaggctgaagtgggaagatcacttgagcctgagagttcaaggctgcagtaagccatgatcacaccattgtacccagcctagaggaaagagcaagatcctgtctcaaaaagaaaaaaaattaaataaaacaaatattaggagaatgtcaggacatttattgtgcccattggaggtacactgaaaactaaaaacggagctgaaaacactgctgcagggcccatggcacctccaaggctccaacatccaaacctcccatgtctttagccatgttgtcatctgcactccagggtgtcgctggaagcatgctactgcactttcatcccagacagcagaagggctcagacactaatacacccagtccagggtccactcaacagggagtccaagccgtgtgatctgcaccttgtttaactatccccagtcttaattttctcatctacaatgtagactggctgctgtgctgtgtacccaggtgggcgtgaccccagggctctgagcaagaccagcaggactgaggctgggagttagggggttcttgtccccgtgtggttgccctgagcgggctgggtcacccctcaggcctgcacaggccgttctgaagatacagtgaagcaatagataggaaaatgctttacaaagtagacagagctgcctatggtggtttcactgcccggtttctatgacacgatttatggaaacactggcttctgtaaatctgatgctaactgattttactaccatgggtctcattgctcaatgcattacagtatttcactgttcagacagaaacctctaggcgccgcggttgtggcagtctggctgtgtctccagcatgcctggtaaattggtgggctcagagtcatgttcaataagcatctaatttaactttgttctccatgttaacctcagaatttgtacaaaatgaactcatgggtttgaatggcttgccagcagtgaaaattgtgattcctgccatttattcagtgtcaactgcatgccaggctctctactgggcacttttctcatatgatctctaatttctcayaacaattaatcttattttccccattttataagtgaggaacgtgtggctgtatattcaagcagatccattctcattgcgcatgtgttagcaaagggaagttttgtcttcttccagggcacgtgatgtctgaggcaggtgcaaggactccatggcaccatcagtgcccagggttccatctgtagtttgctcagctggtactacttagcatgtggctttcatctgtgtgggcactacctccagcctcatgttctaacaggtagaggaagcaggaagtgacagagaaaaagggctgggctcctatcaggaaggcaaagcttacttagaaatcctggcaggctctagccccactgcattgaccagtgctgttcacagggctctgcctagctgcaagggaggcaggaactgtaatttttaactactgacccaaacaacagaaacttctgttggtaaggtagacacagagaatggacattgctgatggctatccatctctgccatgccacactcccaggtttattattaaattagcatttccccgattgtttctactttatgtattttctgggcatttcagctcactcacasgatttcctttcrtctcacccatccttgtgttctttctgaaggttttgatgtgaaggctattagtattggcatcattaataagcattggttgaagttcctaattgggtgtttgttctgggtgaggtgtgaagcaaggagaaatgcatggacacagtaactgttgtcctaatgaraacatgacccgtcttccccagagaaagcaagcagcccctctctaagggcatagctttttatagcatgtattatcctgcgtgggaactattcctttaggccaaggcagccactgcaggcaggcaaagacagtgtcttacattgtgttgtccattcgctcctctccctcccccaagacccttctcatcatctttgcatagcatagtccattcctggactgagcaggaagtggaggcatcaacagtgtttgctgaatgactggaagagtttataagccaaaatagatcagaccagaaatgctttaaatattaagggtagaacatccacattaaggtatccacgtaagcagggcactgccgggtcccctcaatgagcagagggtccagcagtgtggccactggacctgagtctggtgaccaagcaggtggagagcccgtaagtgccatggatgcgctgctgggacagaggcgccacaaggcccgcagctcaggaaggggtgtggcacctccaggctcagggcatcctcaatgcctggagggccagaagggtggctggcaggatggccgggtcttgtcggagagtgggagcttgtcagcaggaggaagggctccgatcgttgagagccatggttctcaccttgcctactgtcaggattactggggagtcaaaaaatcctgaagcctgggctccccctcccccacccctcagagatcctgatttattggtctttggtgtcacctgggcatcaggattttaaaagatacatgaggggattcttatatgcagcccaggttgagaactaccactgagcagaggaggccacacaggcacaaagtttggagctggtgaagacaggatttattaggaaaggctctggggcctggaaggatggaaggccaccaggagactttggagatcctcaggagaggggcctcagagtagagcccatgagggagaggtgcatgggcagccagaaacggaggggctgctgccatgtgtgaacaggtggggacaccagaagatgggattttccgcaacattctaaatatagcagggagaaaaccggggctggcgttctcttggtccctggtctgccagctgctgcagtgactcactggaaaccccttggccttccatgcaggcagaagggccagtctcacccagagggggcaaggaggactccgggaggagggcacacatggacccacccaggaggcgctgctgcgagagacggtgggaatctgaggcccatttgcccrcaggcctgctccctgcagtcctgctggaaagggcccttccccagggagcagcctcctgacttcctaacacgcactctcggctccaggagcacttgctggggccagagaagcctcctctgtatttacaaagtataaacgaaccatcctcaactgatgaacagtgaattaattatctgcaaatatttgagggaaagtgttaaagagggctttgtgtgtgtgtttttttttaactcagctggggcatgtgagaagaggaagttttgagggaatgtctgtgggcggcagttacgcgtggttctccttggcgggggggtcctayccagtcagaagaagagtatttaggaaattcagggggaataattgtatatgggtgtttttcatccagggagacagatttgagtcaaggtcgcttgctggaagtwttctaaaataaactgccataggtttattttatttcttgtaagtaatatatttttgtttgaaacgtttgaaaaatgtgttaaccgtttttcttgccttagtaaatatgagaattaaaataatggagtgagttgccctttaagtcttcaagagttccttgggggcccaactccgagggtgggtgacagtgaacttgctgcaacttgtagagtgtgggagagtggactgtgccaccctgagacccccatagtctctgctattccccaactcattcccttcstccccttgcctcctcctcttccttcttcattcactattaagcatagtgaatgctctacctttgatgaaagcctgttgagtttatttgatgtaartctcggatatgagtttgtgtgccctctctgatatgaggtcatttgcctctttgttgaacaaaacaaaaacctccatgtggctcagttgctcgtttgtaaaatgaggaccatgataataacaaggttgctctgtggccgtggagatgaaatgagatagcgcagggtctgaaactccagtggcagcagcatcccctgttgaaagccagatggctgggcccaccccaggattcagattcagttggtctgctgtggggccsaagaatgtgcatttctaacagcccctgggggtgctgctgctgctgctgctgctgctgaggacccctgagagagtgtgtgtaacaaaccatacacaacgccaggcatctattagacacgaagtacctgccagctcacctgcaaagaaaggtgcagggagactttgcagctattgaaagttctgtcccagacttcaaaggatgcttcctcaaggagatgaaattgaacagggaaatatggagaaagagcattcaggtgaaggaactcttcttccttcattctttgatattcactgaatgcccarctgcactcctaactgttctaggcacagaggtccagcagtgagccaggcagacatgagtgaataaggagaggtgttatgtcctgccaagtgcaggggaggcaagaggcaggaggctgccagggagaggggctccctctgcccaacagtttgggaagcctttcaagaggctgtggcagtcatttggacccattcttgcaaaggtctgggtggcagagggagtctagagctgggaacagtcagtgcaaaggcccgggggcaggggctagcagggtgctctcaggtcgccagcaagccaggatggtcagagcttagacagaacagcaggtgagcagtgatgggcaggggccttgtgggcccaaggaggaggaacagaggctgctctgggatgttggaagccactggagggagggctgtgagcaggggagcagtatactgtgatgtgtgtgatttctgaacgacctgaggctgctgtgcgaagayagattgcagggcgaagtcagggagtgtggggaggactttgggccgccaggctgggagggacttgctgtgtgctgtgtggcagtgtcaaccagacctctctgagccttgaacttgggtggcgaccctaggaataaagaggcctgagcagagtggagagacacagagataaaagcaacaagatttggcagagaggtgagagacagggaaggcccaacagtggcgagcctgagtctccttgtaacgacatctccctctagaaatggaaggctgagtctagtctgcatcatactgaactcaaggcctcgtgcatgtctcagggtccctcccccaagtccacatgttgtgggtgcaacttaaggcagcaagatgagagcaggtgcactctttaacaagtccccgtcatgctgtcccagtccagagccagcccggcacagcctgtgtccaccctacctgcctaggcctctcctgtcttgtggtgacccccagggcctgtcctaagaagacacaagtactgagcacccagcatgtgctcaacactgtgtttacatgttcataccttatctgacttgtcctcacagcgctgccaggaggtgagactgttgtctccctcttactgacgaggaagctgaggcacagacaggttaagccgcctgcccaaggtggcatggctgctacgtggcagagcctagactcaagcccaagctgtctggctctagagttcaaggggtctagaatttgaccccttcgggggaccctggcctctaagcagcagcccacagcattcttgggcccctcaaaaataataacattcacaagcacagaacctcacagtttataaggggcttcctcaaacatctcattccatctcagtaaccctgggaggaaaccagcccaggctggagcccagctgttgccttcagatctgccgagagtgcctcagtgcgtccaggctgctgtaacagaacactctagactgggtggctgataaacagcagggatctattcctcacagttctggaggctgggaagtccaaggtcaaggtgctgacagattccgtgtctggtgagagaaccacctcctggttcatagatgatgctttctcactgtgtcctcacatggtgggaagagggctagagagctctgcagcccctttaataaggcctctaaccccattcatgaggcctctgcccccatgacctatcacctcccaaaggccccacctcccaacaccatcacctttggggttgggatttcaacatgaattctgaggggagacaaacattcccaccacagcagagagcagcagttttggatgcatacacagcccccctgcaaatccagcctctccctagttgctggatctgctggagcccatggctttagcctcatgggagtcttggctttcctgcttctaggaggagcagccagaccactccctcaagagcactgtgggaatgctttgcatgcggtagtgtgcaggacggttcacgtgacyttccttccaccagccattggacagatgtgaaacaggctcagctttagagagacagaccttggctctaatttgctgtgtggccttggcaagttacttgacttctccggacttcacactcctcatctgtaaaatgggctaacaataccagcctgtggggtgctgtcagaagtgaactaccaatgcagcgtgctgtctgcacttagaggttgggggagcggggctctggaaccagacagacgaggccttgaattgtggcttcatcctttactacctgtgcggccttggcaagtctgcacaatcccctaagttgaaaaagcagggctggtaaggcttgctggggttatcccagggattcaatgaggtgaagtatgcagagtgcttggtttggggcctggggtttgataaacgcaggttttctttcttcctcccatgacacctcttttgctttttgagggacggtaggaaagtgcgaagctcagatgccctgagagacgttggtgtaagacccaccattgcaccactgttgtgttgagaaacagaacctcatggaggccaggaggagtccttgccaagacagccgggactgttgcaactaggctcaggtcccccacctgtccactccccacatacatgctgcccctggtgttctcaacatacgctatgttaccctgggttaaaattaacgtagggcttctctttataattttcaaatgccccttgagttaactgcagatggtaagtgtggcactaagtcctagaatgatgcagagccagtggtggacatttgtcttcttcctaaggcagatgaaaacgtttaaagctaaatggagaaggccgggcttggtggctcacacctgtaatcccagcaccttgggaggctgagggggaaggactgcttgagcccaggggtttgagaccagcctggacaacatgtcaaaaccctgtctcttaaaaaacacaaaaattagcagtgcttaaaggtgcrtgcctatgatctcagctacttgggagactgaggcaggagctacttgggatcgcttgaacccaggaggtcaaggctgcagtgagctgtgatttcaccactgcactccaacctgggcgacagagcgagaccctatcgcaaaaaataaaataaaatgcataactggaggaagacagaaatagtaaagggttgccttgtgatgagcaggaccagagggaggatggtcgctgggtccacgaagctcacggtgagcagagagcagctgcctctgctcctgttggtgcaggagccaggctttcaaggaggcaggattgggagggtaactgcctgaggcaatgagcagttgtggttcctgcttacatgggcttggttagcacaaattgtagggttgagacataggcagatgggggtttaagcaggcttctggggcctaatcagggacaagcagcataaagagaaagaggaaattggtaaatcattcagtcttgtgaccttggacacacatccttgtgaccctgggcaccttgcctgtgaccctagatacctagcctttcctgggctcccagccttatgacctcgacgctcacccttgtgaccttgagtacccagccttataaccttgggtgctcagccttgtgaccttgagctctcagcctgtgacccttggcactcacccttgtgaccctggacacccagccttgtgaccttgggcaagtcactgatcctctgaccttggatcacaggccaagtggttaaagatgtttaaagactccaacagggttttgtggcctggttttgctccgtacagccctgcctcctggagwctattccatattcttagatattcactgttcatttacgggactccctctatgcagctgcacctggccctcacgccttagttctttgaccaacccatgccacggcttgggcatgacactctccctcctgccatctcggttctttctgaaaggtgaagagacctggagtggatgagggaagttccaactgccctggggagcctatatcctccaaggggctgtggggagggtcccagaaacctagagggctgagcactgcattctttcccaccttatgcagggccattcagctctttttctgtacaatatttcatttgattaaaggattcacttaaaaaaaatgtttcagggtgaggcattacagtgggattacagtggttcacatctgtaatcccagcactgtgggaggctgaggtgggaggatcgcttgaggccaggagtttgagaccagtctgggcaataggatgtgactctgtctctacaaaaataatacaaaaattagctgggtgcagtggcgtgcacctgtccccgctacttgggaggctgaggtggaaagatcacttgagcccaggagattgaggatttaggaagtttcttccacttctagaattctctgattctaaatgagaaactaggtatgaaagctctttgcgagttacaagggaggatagttatgaagagaggcaccttattgctgttgcagcagagcggcctggggaagggcaggctgatgtcgagatgacaggtggaagaagaaagcagccatggcgcgcgccggtcactgagctgagcactcacaggagccccgctccatcctcaggacagaccccccagcactctgacggggcttcgggggtggggtgttgtggggtggaggcagggaggctgctctgctctccctccactcagcaagtatttattgaaactcactatgtgcctgcactgtctgggcactggggaaatgctgaaccaaacagacatcagcttgcagcctcttggagctcacttgctacttaaatatgttcagtccctcagggctaagccacccgggctggcagctcagggtccagtactccctggacctggagaagacctcagctctgatggcagcctccccctcaccagcctccctgggccttgccatcttcatctgagaagtggggaggatgcactacctccgtcacagggttttagtgtggactatggcactaagtgagggcagcgtctaggtgatgcaggttagttgaacttttgaaatgccagttgtttaaaaattgatttgtaggaagcttatggtcaaagacaatccaattctttttttttttctttttttttgagatagagtcttgctgtgttgcccaggctggagtgcaatggcatgatctcagctcactgcaacctcctcctcctaggttcaagcaattctcctgcctcagcctcctgagtagctgggattacaggtgcacaccaccacgcctggctaattttttatttttagtaaagacggggtttcaccatgttggccaagctggcctcaaactcctggcatcaggtgatctgcccacctcagcctcccaaagtgccgggattacaggcataagccaccgctcctggcctgacaatccaactctttctagcagagttttacccagagactccatatgctgaactgaaaggaaccatctctagatatgagggctgtgagtatggtagtggttctcaaagtgtgattctggtcaaaccagcaacagcaggagcagcagcagcaccacccagggatttgcaggaagtgcacactctccggctccagggtgggaccagcagtcagtgtttagcaagcccttaggcaactctgatggacactatagtctagaatcactgcccaggggtagacacatgagtgatgcgctaggttccctgaaagaggtgagcactggggcttggagagctggaggggtggacaggacagggagcttcagtaggaagaagagaggaaaggatatttctatccaggggagggggaaggaaatgccaaagagagaagggagagtcagagtggaactcttgggaaatactcccttacttagtcatcttggatgtcagagtaaagtaggtcaggcctcgattcttaacattttatttctatgactccagtagtcattacacatccccaaaatgagggctctgatccctaaaccacacaccagctgtacagaagcaactggcacaggaagtggcagtgtggtgtgatggttagacacacgggctttggcatcagmtatgggctcaaatcctggttcagtcatttactagctgcagggctttggtctgcagtctgttttttgttatggccttctccagttttggtaccagggatattctggctaataaaatgaattgggaagtgctccttcttagttagttctgaaagaatttgtgtaagatcgttattattttttccttcaatgtttggtagatcagtgaggctatcaaggcctggagtgttctttacgggaaggattttaattataaattcagtttctttaactattaataggactatcccaattttctttttctttttgtgtcagctttagtagtgtttttcaaggagtttgtggatttcatccaagacatcaaatttattggcatacacttgtccataatatcctctgttatccttggacaagttactggaacattactgagctttggtttcctaatctatgaaacgaaggtattgaaatttctacctcataagttgttatgaggattaaacagtcatttaggtggagtgtttatcaaaggttctggcatatagcatgtattcacctgttcattattattactgatggcctcaccacattccagttacctgctgaagacatgtactgaaaagtgtttgaattctattgcttaatagctaaaacctggccacactggatattgtcaaaagcatcattctgagactataagtttacaaattgctgttccgtttctagagttaaacttgcttcaaaatttctttgagaacattttacactcttatggaacagagtgccccagggctctgatagtctctaatttcttaaataatccattcattcactcattcaaaaaagattcatcgagtgcctaccatgtgctttcactgtgggatagaaagaggaatgagacaatgctcctgcccttgagaatctcacaagctaaggtccagccccaaatgtgtttttgaattatttgatccttgccacgagccatgaaatatgggattttatgactgcaattataaacaattggttaattatttacaatctttggaaccaggcaggcaagaatgtcaccctgcccttgccactgactgcttatgtgaccctgggaaatttcctaacctcactgagcctccattgcctcatctaacaggatgggtgcaatagtacaaatattgagagattagataaatccaggctccatgacaggcacccatagatggtgatggtgatagtgatggtaatattggtgagagtgatggtgatgatggagaatatgaggaaggtaagccttaaaggataatttcctaactagttttttggggktttttttgtttgtttgtttgttttttgatagagtctcactccatcactcgggctggagtgcagtggtgcaatctcggccctacctgcaatctctgcctcccaggttcaaccaattctcctgcctcaacctcctgagtagctgggattacaggggcatgccaacacactcggctaatttttgtattttttgtagagatgtggtttcgccatgttggccaggctggtcttgaactcctgacctcaagtgatacgcccacctcagcctcccagaatgctgggattacagatgtgagccactgtccccggccgtaactagtgttttttaaagaggtaaactaaggcttcatatttgaaagaaaagagctcattacaaatatcttttgtcataaaaatttatgtcatgtggttttgcattgattatggcacaactgacttccagaatcctctataatgaaccaacaaagccactgtcttcggagttctttgatgctgtttttgaggacacagcaccctttataagagtgcccctgcttggctgataaacaggccagaaaggcgcagttgggaggcgaccctgtgcacaactgaggaagtggattggggctcccactcaagagaggggtttggcagattgtaaggagaaaagagccaggggcactacgagtattttctgagtaggatttactttcaataaggtgcgtgtctacatagttaaaattagaaatgtatacaatatttgcaataaacagattcaacagctattatatgagaacctgccgtgtgctgggtcagtgctgggtgtggaatgaggaaatcacacagacctggttactgcctcaggaatccatggagacagacatgcttcaaaagcaaaagtagttggtggggggctattacggggttctggcagaagtgtgcatgggacatatgggagagggagrgagggcccagactacctttgggagtgatcatggggaaatatcttcataggacatgacatttgtgacgttggacaagctactaaacctcactttaaactggtgagcctcagtttccccacctgtaactctaagtcatagtatctacctggcgaagattaaatgaatgtcttagctgctagcagagtggctgctgggcacatagtaggtgctcaacaagcccccatactgtcctcttccccaamacacagacccctgctctcctcaccacacattagtcactggctgagaagagaaactttttttttcagttccctgaaattaaatagacagcccccatcttttctatagaaagttgttcatgcttcccatgttagctaatctggagcgatgcggccacatgcggccgttcctgcgggaacactcttcttcatcagccttctgggcttcccttcagtgatgttgggggtacgtgtttctgttcgtttacccactgttgaacttgtttttaaaaatttacaaagtggttgctgtggcaggtacaatgtgaaccctgagctattcacacagraattgggcacattgttcactcagcttcactgaagtgacaagaacacgtggctcttccgagggccgcagcaagtgtgccatctgaatgctgaatcgcagatctgtgttgggggctttggaagccaaatggacactcctggagacccagcaccatctcttctcattctagtgcccagcggcctgataatttaccacctggttatctttcagaaggaatttaccccaaaggcgtagtcattcattcaaaattattcatacggtctctcagatgaaaatatttaaggtttcctggtgagaagaaaacagacatcactctaggtccccagaagaagccgtttctgaagtgtttaaatgagtcacttgttggaggagaaaaaaagtcaaattacttacacgtgatcctgtgttaaaaagaaagactgaataattctaggaaatgaaattcttctcggcaccagggatgctatttgctgtggttcaggagctgagaaaagatgtagctaattataacatatatgcaggttatatttgggtgtagaacaaataggtggtccttgttgtctgaaaggcctgaatttgagtcagtttaaccacttatttgctatgtgactctgggcaagttactaacctctctgcatctcagttttctcatctacagtaaaggatgagtcaaagtctctaccccatagggtcagtagggggattaaaaaggaaccaaatgagctcctctatgtggggggcctgacccacagagagtactccataaatattggctatgttggggtgactacttttccgccttaggaaaacctgatttgactccagtcacagtttcatgctaactagtgtggcttccaaatttgaaaagtggtgtgatattacctacggcatggagtatttataagaattctcagagagagatgatattcatatttaacattaattaatatttatcatatgcctgattatcgatgcaaagcttttcagacgttgccttgaacctcattacagccttggagtaggtgtggtaattattacagatgaggagagcacgtgagcttcccaaacatgcacctcttctcacccacagcagagcacaactgtggcccgggcctctcctgggggctttccgtccttcttctcttttattctgcaccacaagtatatggccttgatatctgtacgcccattctgcaggcagggagacatagtaaagtcacaaggtgctgagaggccagtgggaccccttccactccaggtctgcagcctcgttctctctggcacgacttcttccccaaatgagacagagttgccctttgtctttaggccattaggcttcctagaaccccaggagtctgtggtgggagcagatgctcacagaggagagtgtgtgcccctcccagggcccatctttatcatgtcagaggtgggttcytgcatctgagaggaaaggggaacacagctgggggtggtattcaggcaacttcagcatcaggcatggggtgccacccagagaggccatgtgatgggcattggggatttgcagcttagacagtggcatgcaagctccgagaagctggaggagcgcctgagagccgggagggaggagggtggaggtggagcctcttgcttccacccatgtcggaacctgggtcttcctttcctgtcttcccagcacgcagctgagactgcacactgaggtgggtgtaatgactacggcgacatcagtaaacttagctgctccttgaggacaagacccatctgcagtttagccttacctccccctcccccacacaggggttcagtctctgggagagtttgaggacgggagggcagtaggaagaggagaaggggcgggaggggaaggaaggaagctcagcgaggcagcacagagggaaggaccacagtggccgagcttagggcacagacagaggtccactccaggccaggtcaggggctggattggcctcagcacaggtccaggtggggctccagggagatgtccccacccaggttgcttgggcagggtccgagatccagatggccgtggctgctgtggcaggccccttggcaagcagaagccacactgtggcatgcttgtgagggtcccccattctactgagtcagagctggccttgagcctgaggggcccgtgctaccacagcaactgggtacagcccagtgttttctgcrtccaacctggcttcgcggggccagagggtgagaagaaaacagacatcactctaggtccccagaagaagccgtttcggtctttggcagttgttgctatcatcctcagactggcatcttcaaatccatcttggagatgatgtaccctccggagcctttctttctggcacacctgtcccctggctgctggggcagcctgcacactyaccgcacacctgacatcctatgaatccacatcgctgcaccctgcctaggtaataaggaccttgcatggtggttgttgtttttctatctccaaatactgagtatttccctaaagacattcaaggagggtggatcacacatctttccccaatcagagtgacacactgtgatccagcacacatgaagatcaagggcaaagctggggaggctgccatggggggaaggcagagtctggagtgacactgggttccagtcccagctgcagggcacaaacacagacctggcctgaggcgtccccatcacatctcctgtctgtgaagttgagatggtaataatggtacctaggtgtagagctccaatctgtaaacttaccattgataaattgcttggaacaggccctggcccagagcagcatgcaggaagtgcacctgttactacgtgcatactcataactgaagctgcagtaatgaccagaactgctctcatttgatggtccctgacagagcagtgggctgcaaggaacctgcaasgaagcctctgcccctccctttctcattgtacaagggtaggggacagacttcgaggtcccaccagttggtggcagttttggacccggatctcaggccccagctcccagaaccaggttctgtgcacctctccacccatttcgtaaattaaacttcaaaatcactctggctgcaagtggaccagaagaaaggrctcctcaaaggaactttaaaataggtagggtcagggctggcttcgctttgacacagcccttaagaaaggctgggggtgggaatgggcagagtctgtcttgtgagctgagcctttctgaagtgggagctcaaacagcatgtgaccaggaaatggctggcccaccaagaactaaaaataaacggctgtaatgctgccaaccgtcagggcaggcggggaggacgcggagagctcaggagcagagcccagtggggtcctgctcaaaatgaaaagagaaccgcatgccggcagacaaggtgcttcatgtgtcactaacgtggaagcaataaaccacgactgcactgtcaggctgccctttctgaagggcttcatattctctatttcatttcatttcattttccaaggcaggtaaagccatcgtcattttcattttacaggagagacaacaagccaggagtggtagagccaggatcagaattccaaatcacagatctattaagctgtgttctcggtgtcttggtttctcccctgttagaggtaaagggagaaattaaaaagcaaacagaggacccaaaccttgcatgggatcctcagatgcagtcacaactccccggcaagtgcgctgggtgcactacgcatatttagtgcttgtctgggcatttgagaatgaagctctgcctggagtccctccctgaagagctggggtcccaagggcccggccgatgaagcgaggagccgaacgtgccaggagggaggcagcctgcgtggcagtccagctctgcccacggccggctgtgcgccagccctctctgtgcctccgtgtcctcaccagccaaaagaggaaacccacagtacctttgtggtggactggtgtagcccagtcgcttaggggaacacgtggacacacacacagaaggcacttgaaatgcagcttgaagggcagtttgcagtctctggtccaggcagtgcagaagtggcctctttgactgctgtctctgagtgttctgtggcttccaccctggctgtggaggttagtactgcttgctggagaaggaggagccctggggaggcctccaccctggtccctcaaagcttctcatccccaccctaaactaagccagcacccccaacacaacacggtggctctaacaagacacagcagcaggggagaagccagtttgcccagtgggccctggaaagtgacgcagtctggtcatcagcaccccagaaatccctcccaggcggtgggccccttgatagtgcgaagggtccggatggccacagggaattgtacgttatctgaacacagcaactggggcctctgctctccgcatctgtgtggcaccttgctcatagcagctgctcagtgaaggcttgcagaattacaaggcatttcacagaaatgatggtttctttggatacgctcaagttcacacttgtgaatcctgtatgtgtgggtatgaatttggcctggaggatgagccctgtttaaagaaaatcaaataacgcttgcccagctggaaaaatccatgacttctgtgctaataattttttccacggatcaccccatttaatcctacggcagcagagtaaggcaggcaacgtccctatggaggaaacaagctcagagatgctgcctgatttattcaagctcacagtcattagggggcaaagtcggactgaaattcttacacacttgcaccttgctacagttttaacttttgggaaaatgctttggggtgcagagccgcaggttccattggaccagcgccccccaatcagtgctgtgcctctgagcagcttggcgtggggcacagcccccaggcgagtggccctggggtttctgcatcatctgacagaagtgccgcagcggctccaggaatagcttgcgacgcgcagtctgtcaggggtgccgtgccagctcctcacctcgcctcctgccaaggctctgctagaagatgctctgactcccagaggtggcgcctgagcctggatgagggacagagccagcatcggggctgactgcagggggagaacaaggtcctttcaccttcattcctcagcacccacgtgccctgtgtggcatggtgtgagcccagaggggttggtcccctgttgacaagtggagcttagcccagagagttctgttatgtgaacctgctgggtggaggcagagtggcctggcctactctttatacctgtgtgtccaggacagtcacttgacctctctgagcctcagatttcccatctgtatgttaggcctgaggcttcctatggaaacgttagctcataggaccccacacaaactcaatgtcccataaatggatgcttccacccctgtgtggctctgcccttccctcccgtcatctttcctttgcttttctttgaaagctgtgtgcacatccagcgctctccctgctacaccactggcttcctttctccaacgcagaaaaccaagccgtctaagcagggcctgcccgcaaagacagtcaatgtgagaggcaggggccagctgcctcctcctcagagtcgtggagaagtgctggatcattcagaccccataatcataattatttctctcctcagttattgtacagacgccaccagattggaaaaatcacttaaaggttttattcagtggaagctttcttaccaaaaaaggagaatcatctgaaggccaaagggaccgattccaaggaccctgtgttgagtgagggagaaggagctgggctgatctgagcaggtaggagctctgcatcaggccactccttcctcccagtccacacgagaaccaagagtctctgaagtcatcgggatctctgggctcaaagcatctctgtaaagtggcactgcttctgtgaattacattctctcttcccttccttggaaaatgacctctaagcaggggaaggtgcagtgagacatgagaacatgcccacagctgagatttttaaatggccgcaggtgaacacagacatccctcttgagcacgtgattcagaagagaggcacacccacctccagtgagcatctactgtgtaccaggcacggtgctgagagccttggtcacatcaggtgtggtaggggaccaagggaggggtaaggacagtcccgcagaggttggagatgttagccagggtcacgcatagcagagagaagggttgagagccgcctgactctgtgtctcagttgctggggtcacagaataggagagctggtttataataatggacgctgtgagaaatagctgccagggccgggcgcagtggctcacgcctgtaatcccagcactttgggagaccgaggcaggttgatcacttgaggtcaggagttcaagaccagcctggccaacatggcgaaacctcatctctactaaatacaaaaattagccaggcttggtggcatgtacctgtaatcccagctagctactcaggacgctgaggcaggagaatcacttgaacctgggaggcagaggttgcagtgagcctagatcacaccactgcactccagcctgggcaacagagcaagactctgtctcaaaaaaaaaaaaaagaaaagaaaagaaaaaaaaaagaaaaagaaagaaataggtgccaggagcccccagaatatcctttcctgtgagggtcatgtttacaacttacagccagtgcacttttgcacattttcaagaatgatatttttctccctagcaattgcttgtcatgatatgaaaaatcgacccattatcccattgttttttataacacatatctgatttttaaagacccttttaaaggggaagacagaaaagaaaattacaggtgacttcccccattctcctcgctcggtacagccgaattgttaggaaaggagactggcactttgtcagcactaacaacggaacacaccatttaattatacaaggctcaggggctgctctaagagggccaagctgacctgggcttctgtctagcttgaaaaacttctagctattgactttttgcaagctccttcacatctccaagcctcattcgtgtatttattcattcgttcagtctataatgtattagcttgatgcccagttaccaactccaggcatggtgctgggcacaggagatgcagctgtgaacaaaacagacacaagtccctgcccttggcagacaatgagcagcaataaatgactttagggtatgtccattggagataagtgccacaaagcaaaataaaaccttggaggaggagggcggggcagtgggggcagggggccatgctcaagctgctggctccactgagaaagtggtagttgagcaaagacccaaaggaggcaaggaggagcctcacagatgaccaggggaaaagggggtggccagtgcaaaggtcctggggcaggagggtgcctgactcatgaacagtcgggagacaggaggtgaggtgagaggagagcactgtaggagaggagasagaggtcgtgtgcagctggccacacagggcccagagatcctcagttttctcctctataaaacaggaacagaagcccccaggcagctcccgtacagatttgatggaataacatcagccaagtacctacaggtgtgctaggtgccccaccagtgtaagcaagtgtgcgtttcttcccggcactcctgtatcagcaatctgtttacaaggtgtcgatgacacgtggctgaacacatctgggtcaggaggaccctgagcttggattcggatctacccaggttggggtcaagaaacactctctcggaggcaggtcccccagcttcgtgacactgtcacagctttcttcattgtccccaaggttctttgggtgctttttcttttagggagttcaatgaagagtttcyttctctggtgtagtcacttcacttggagttacgattcctgctggagttggcaactgggcatctagctaatctcagtgttctttgaaagcggagagttccagagctaagtcatcaatttcttgaagccaaaagccatctcactggttgtatatatgtgtgtgtatgtctgtgtgcatgtgtgtctgtgtgtattatatattatatacaggcactgggatatgcctagggcagtttctaatttaaaaattagaaatcaataaatatatgtagattgctgccttcccgactgagccagtagttactgcaataatgctgcataacaaatacccccgaaactcaacagcctaaaacaacaactcatgctttctcctgtgtctgtaggtcagctgttttaggctgggcttggctgggtgtggctccaggcctcaagttgggttcggctctctccacatgtctgtcagcttccagggacagtgggctaggagagtcatgttcttttctaggacaacagcagaagctgttgatggtggtgatgatttttaaagtctgcactcagactttcttaccatcactctgtccaccttccattgaccaaagcatgtcacatggccaagcccaacatttatttacagggtggggacagtggggacagatattcttcacctggtgggaggacctgaagggatgtatggcaagaaacatggatggaggaggtcttcctaggaagacgagggcccctcctgctactgacctaggtctgcgtcatcaagggtagcagccatggtggttttagacagcatgcaggcaatcacttttttcttatttatatgtatttattttatgatttctacatcagttaggaattaagtttgactgctagaaataaagactagttktaacagtcaattacacaagaaaaaggtttatttctcttctgaaaagaagtctggagataggccaggcctgtgtttgaaaatgtaggttgtattgtgattcaggtatggtgaggccaacacatcaggagaggctgccattgaaaagatagtttgytcctctcagttcccaagagaaggggccacagcataccatgggggcatgtggggaagcaccagggctgatcrgggatgggtgagatggggtgagcaggcttagaattagccagtttgaatgattttgtgggctctggggtgtaggggcttctggcatctggccctggggtgatgaaagcagagaaatattggcctggagtggaggtgtgggctctggaccagttaatttgcataggaaagatgtgcttccctgtaagacctttactatctctagtaattggctagccctagaacaggtaatttccccagtcagcaaggccctagatgccaaaatatcagaataaaaagacatacttaatacttggagtaacagctccattattttatcaagaaaccaacttcttctatctgctccccaacccttagagcacctagcttcatttacctctttgcccaagatggctgtgagagttccagccatcacattacatttatatttcagacataaaaaatgatacctatcttccacttaagaagcctttctggaagttccatctatccatgccatcctgtgtctcaatgaccaggagttagtcccatagccacactgattgctagggaggctgggaggtagagtgctctgcccaagcacattgccagtctgaataaaatcaggtttcagttactaagaagaaaagagagagtggatattgggtagacaaacggccatgtccaccagttactctgtgtttatgggaagtgacagattttctacaaacaatagtcatagaaagtgtctttgataaatacatcaatttaagggggcgagggaacatgagtgtgtaattaagaagtatattaggtaaataataatacaggtggtgcgcgaagatttggtgactctgcccggtatatctggggagacagaaggttggatgcattctctggggcccgcagtggggccccttgtcctcgttcggagcaacaggcacatgtgccagtgtcccggctgcactgagtctcgccgctgcatgtggtccgcccttgtgaccgtgcacctcccacccacacgcattcataagcaaccttctccttgtccttgtcactgaaaacccattgacctacaactggcatatcgtgtctcccatgtttgggggcctacagcgatggattgctgggtaagggaaggagctgagaccccagaaggcaggctgggtgggagaggcatgctatcctttataaagctgtgagcagctgtttaaacccttccatttctttaaacaccctcttcctccttttacaagagcgttgagtctagctcacgtgaacagtttcatctttggtttttcccttgttcccaggtcacagtggctaatgagaagtgaaatcatttgaatycaggttttatcttctccttttctctctggggttgagcaatgcatggggcatcccctagttgacgaggccgtgtgggcaaaaagaacagcccccgcaatggcaaggacctttcccccggggatgccacagctcgtgactgtgcagaaccaaaaaatgccgagaaaacaaacataaaacacccccaccatctcgtggaaacccgygttcctcccacacaatcccttctctggggcgctaggtgaatttgaaagggaatgccacgtacctagggaacgcttccctctaaagagcctgggacacgtgggcatgagtgcacacacctagaaatacagctcccaagatgcacaccccacgcgcccctctctgatgacgttctcgctctctggtgtggttttctcagcagctgcgggggaggcacacgggaaggccactgaggcctgggtggagatccagcgtgaagcctacgctttcttgccctccgacaaggaaaacccatcctcctgccsgacccagcctcagaagcacacctgtaggtgcccacygggaccaacagcctgagtggtgagaacagacctagaggctgtggatcccagcccgccagccctctctcctctctgtgcctcagcgtccaccctggtgaaatggacacaggcggtactgctgcctagcggggccgttgcaagtactcatccagttaacgccggtgaggggtgaggccctgtgtagagttgaggtgcgtggagcagaaggggaggcccttccctgaagacggcttgcagtcctggaaggcacttgtgtggagcttttgatagatctggttttttttttctttcttattttgccttttatggttgtgggggtgacagcaggactgattccctaaaagggagagattttctcacttagtctaagcacctccttcttttcaggggaactgggagtgagcttggtggggagtgggcggcagtgcctggcgggtcgtgacctctgagttcacagagggaagcccctgccctgccaaggaggaagctggagagtgaggccagggcctgggtgagcgggaggctgtggcctcctccgtagagtgcagcatcaggccccagcgggccaccacccaaaagtgaccaaaacagaacagggtgccaacagaaacagctactgtggctacagaatgggctaggagtgcagggcgctgacagctgtgacgaggctggtgggaggaagtgacccctgaggaagacagggcttacacctggtgcctcccatgccaagtcaagggtgggaatggagacccatcaccaaggaagagtgttggggtcctgtagggccggtggagacctgcctgtgctctggaccaggctcctttgccatctctagctgtgtggccttgattcagtcattgggctgtttctgagcccaaatgcagaaggaacatttgtagatggaacatctcctgctcttcttgccccctgtagactatatgccgaccttattagtgtggccattttaagcgaggaaagtgaaggccacagaggttatgctgtctgtgcacagctacccaatcacagagacaaagctcaggcccaggagtgcctgatgctgattcgatgaggcaaggtctgcagaagcgcccagcacgtcagttgacatatgttgtgttctcagcaaacgctggtagaatccgtggaatgtgactgtgggaacaaagagctatgccaacttggaaacccatgggcaagggccattttgtgcagggacagatggcctcacacctaagccctgagaacatccctgggttctgagagtatgttaaaaactggtcacatcaaggacccagcatcagcagggaaagggcacattatcgtcactatggtctgctttgggtgaagggaattcatcgtcgacacctgcagcccctcacctgtccagaacactcaccatccaggttgcaggagagtgactgggtgataggctcctagagatgctggggaggttgctctgcagctcttccctgtgtcgttacttctcttctggcttcttgttttcttttggggcttcttttttatttacacctttgactattgtgtctctcatttttgtaatgattcctcttacagccttctgtccatacgaatcaggtgttccttttataatacaacagtagaaaatctttgtttttccctgtgcaggaccattgactcagaaaaaaatcaatcaagggcacaacaaaatgactaaatggagggtgatttctttcccctcttagaaaaatatagccacttcagtgcacattcactttagattaaagcaggaaaactctacctgacaagccccatgctaggtgcatttcaggctcggggaagagatggtaaggaggcagcctgagagsggtgggaggtgaaagacccagggctggggaagctcagccggttttgcagaaagggtcagttattggtctgtggattttgggaaggttccatctgccaccgttttcctttaaatgctcacttgaccagggatgccatatctctgcttgctcactaaagggatctgccgcatatgtacagagaaataaacctcattatcatgaaaagttgggaacaactcacatgcccatgagcacaggaagagtcagataaactaaagtactgtcatcctttgccatgattaaaaagaaggagttaggtctataattctggctatggaaaggcctccaagacctgttgttaagggaaaaaaataaagtgctgtttatggaaagaaaaagaaggccataaaacaaaatgacggccgggcgtgrtggcttaygcctgtaatcccaacactttgggaggctgagrtgggtggatcacttgaggtcaggagttcgaggccagcctggccaacatggtgaaaccccatctctactaaaaatacaaaaaaattagctgggagtggtggcaggcgcctgcaatcccagctacttgggaggctgaggcaggagaatttcttgaacccaggaggcagaggttgcartgagccgacactggccattgcaccccagcctaggcaagaagagtgaaactccgtctaaaaaaaaaaaaagtgacacagagctgagacatgagtgtgagtgtgtaggaaaaagtctagaatacacatcaaagtgagaggattggtcacctgagggaatagtgagactgcgtacatgtattttgttactttaaataacaatttgtaaagcagtagatgcagtgcatgttaaccaagcatcattcacggcttttcacctgccacagtgcttgacctctgaaaggcccactgtgaattggaaagcccagatgcccatcatggtagagccacccttttggccagagccacagattctaaaatgaaattctctgagggacagtttcaatcaagccaaaagtgtttttagttttattttattttttggggtttttttttgcccaggtacatctgtgacagtaaccagttaatcaattagttacagctatgtaacaaaccaccccaaaacttaccggcttcagacaacagccatttatctatctcatgatgcttcaagccagtgcatgcgtctgggctcagctgggckgttctctcatctcagctgggcccctcacacatgtgtggtcagctgcaggtcgcatggcagctgtgtctgggaatcatctggctgttggctggggtgacagatgcaagagaggtgactaggwtgtgtctctgatcacccagtaggttagcttgggcttgttcacctggtggcagcagggtttcaagagaccaagcagaagacgcaagacctttcaagcccaggctcaggcgtggcacacatcacctttgctgcattgtgttggtccgagtgagtcacaagcacagactccagccttgctgggaggagctgcagggcactttgcagagcggcatggacaggtgcaaatggaaggaggagggggagttgaagccatttttgcagtcagcctaccgaatgaccgagagcagtgtgtttcagagaaggcaacaatggcagaagataatgaaaaccattcctgggagctatttctgatcttcgcttttctccatcccagggatgtctcagtggtggtggtgattgtcttgaggctgtaatccagacrcccagaaacaccactgctatggcagggcaatgccagatcagtgatcctcacctctggtccctccacacactcagctcattcattttcacatcctcaactgccagccttgcccctggcaagtccatttaatgcatgaaggcactaactccaattacagtggtttctcaagagcagatatgactgtgggctgattcagagccagctggttttgtcttcatgctttctgtactgtgcatatgtacagttgcagtttgggggtagggaagcctttatttttttcccctcatgacaaaataccagttcattgtagaaatcttggaaaacccaaaggacaaaacaattagccttcactcaattactcagagaaaaacagtacccattttgtggcatatcctttcagtggtgtgtgtgtgtgtgtgtcagtgtgcgtttgcccgggagtggaaatgactgaaacctgtggtttgccaacagaatggacatctgttccctgtgagtcccrggggccctggcctccacctgctgtttggggctttctcggtttcctccaccatggttctctctccctcgtttttgcactaccctctgttttttgataagctgcttctgaagttagagaatgagagtgcagcctttgaagcgtgacgggagatgtggagaccgtctccttggctgcgcagatgaagaggcacgtggcctgcccgaggcccccagtgagccgggagcaaaactggatctcagttcctagcccagtgtcccagaccaccttttatgccctccttgtcactcagatgccttctccacagcaaacccagaagaaacggtgccctgattacaccaggagacgaacgggacacagaagtagctttctcagcagggagcctctaccctcacccccgcagtctagtccccacacacgggcagagggatcccttcagcccagatgagaccatggccctcctcagctcccaccacctgtgtctcccacctccctcggggtaaaagtcaaagtccccaagaagcctacaaggcccccgtgacctggccccatctctccctgtccctggctccaactcactggcctcccctctgttcccacctactgggcccattggaatcttcaaacttgctgtcccctttgctaggaacatgtgtccccagatgtctgaatggcttgctctgtcacctccttctggtcattactaaaatatcaccttctcagctaggcctcctctwaaacagtaaaccccctcgcataacacacatacacacgcaccacatacccgctccctccagactgccagtggtcagactcgctttagattttctgtgtttattgtctgacccccaccatgacaaagatctgtactgatcttgtcatgaggggtgtgtataaggccctctttctagaatctgctctgggccacaggatgagaggcactggcgaggggtgcaatgtccactgctgaatgccaaaccatccccccagcacacagcaagtgctcagtgagtaaggatgaataaaggatggaatgtggaatgcgggagagctagaagtaaaggaatagaagagggcactgtgcacttttccttttataatgaatggtatctgaatttgtaaattctaattccttacagcagaaagctctgggaagcatttgctttatttctttcaatcagaaaatggtgtttgtttggagatcttggctagatgctgcacttcccaagttctgatgaaaatgttctttatttcagagtaatggggaggttccaggatgaagttttctgatccaaaagtcaagacagtcactaataaataaatagaagagttgagaatttgaatgaatacatggagagtctgcggcacgccaggccctgtgccagccctagagaggagtcctcattccagtgtcgagaggctccgactttgcccagatcacaggcatctcgacacattgccaaacccaggcttcagcatgcttagtaagagagtgatcagggttgtagacacagagaagagggagcactccctggggaagggggcagagggcaaggtgaggctgcacagaggaggtgctatctacaagggttttgaaggttgaatagaagtttgtgaggtgggcagaggtgggcatcattccaagcaaagagaattacatttgcaaaagaacagagtcacgtggcagtgagagttgtggagggagctgcacaccactcggggctgttggagcgtaaatgaaaagatgctatgtgtatgagtccgctagggccagcataacaaaattctacagactggggagcttcaacagcagggatttattttctcacagttctggaggctgaaaatgcaagatcaatgtgttgctagggctggttccttctgaggcctctctccttggcttgtaagtggccgtcttctccctgtgtcctcacatggtcctccccatctagtgtgtacatttgggttatagtggattagggcccacccatattaacttcattaccttggcaaagaccttgtatccattcggaggtactagaggttagggcttcagcctgtgaatctggggaaacagctcagcccataacaccaagataggaatatctctctctctctctctctccctctctctctctctctctctctttctctctctctctccctccctccctcctccctctcccacctctgttgtgtggtctctctctctctggggaatgatcaaggatggaacaatgtcaacagactgcgatgcgtaaccctcagttgagaatgactcggatttaattcgaatggtcctctgagtgtcaggcgcctctttgtggtgtggagaggaggccaccctagtctgggtaggcatgcttttatggaaaaatattaaaccagccctgcccgtgttagtcagatccagtgaggggcgttgcaagttgttttatatttgttttggattactttcaacacttgtcctagaatgctccgagtctcttgctaatgagttttcctttacttaataccagacgctgtggctcctccccgcgtgaaatctcacgtggacttgggaagagagagcatctgtccccatttgactcattttcaacaccaggtccccgagtgccaggttgtggccaaatcctgttccagtgggaggaccccccttccctaggatgtggctgagtcacttgtttgtgcaggctcaggagtctgggagccaccccagggaccacaggtgtggaaggagaagcccgctccaatcacggtttctgggcgtcaccttggagacagcagctgaggagctcaaataggtgttaccgtggaagctcctgtctcaagggagcctgaggttttctttcccaagtctgtagacagccacttgatggaaatgatcatacctgtgcccatttgcgttgggctggaccagagaccctgtgcttacaagtctccgtggcctcttagctgccctggagggaacctcttgttctgtgacttaagaaaccacaagctcttgtcctgatgagttctcttattcttgagaatctgtggtgggcctggtactttctaggtgctggagatacaaagacaccacaaggcaccctgcccctaaggagcacacagtccagcaggggtctgtagtagaccctgattatgccatcctgtgataacactggagttggacctctagacacacaggagaaggctgggggtttttctaggggagagacaagacacgcagatgttccacagggtggaggggtgtttcagatggagcaggtgtgtgtgcaaggcccaggatgtgcaggagtgcaaggatgrgtgagtggttgctgcctggaggcctgggatggtggccttgggtcacttcccctgagtcccagaccaaatctccagatgttcccaacagcccatcaaagagcaggtagtgaagagggggctgaggagctccttatgtccacttaagtggaggracagagacacagtacaagagaagggaacagagacagggacacacaaaggcagacacagaatgaccyacttgtgacctcaggtggctccatcagcaatcgagaacagggctgagtcacttgtttgcgcaggttcaggagtctgggagccaccccagggaccagcttcctagaccccgtcccctgaggaaaattcaggaaggaggagggaggggcagggttatctcctccccaggcccatggactgggtggatcttgtggaatgcactgggctggagggagattgggggctgggggtggggagaagggctggaaggccagggaaccagccccagtagacgagagggaggctccctacgggagtggcagaggacaagaaggatggcgtgcatgcctctggagggagtggacgcagagggagacggaagagtggaatgtgarcctgcagttctacccccacaaagacagggggtgcagctagaggtccaggttgggaggggaacataactggttccagacaggtgggaaacataggggtgggacctggagccaaatgaaacagaaaccagcccagggatcacaccagggtgtcttaagtgttctgtgtggatgaggcccccagaaccagagagaaaagggagggcagggtggagaagggaagatcgtggcagggtgaatggggaccgcctgggggcagttgaggcagggtggatctgtgagcccaggacaagagagtgctgtgagcagtgcaggggggactgccacctgcccaggagccaygaacagcttgaaggcagccagaaatgtaggaaggacgctgtgcagagctgccatgttagaaaactcaggagccatggccgcatgtttggggcttgttttctccctgaaggagagtcaggaggacgtgctcattcccgctggcctcagctccatcctcaccatcccaggcgttctcacaggctcctcttccccagtctccctggccggtgctgttggcttctcaatcttccatctcttccatytccaccttccttgtttctgtctgggcccccatctcccaagctgctgtcactcattctattcaaactctgttctttgcctttacttcagtaargtcaaaataacttttgttaacatggtgcacaaaaatgtaaagttccagcgccagtcttgtgaagggtcagtccgttgtgcagccttccccttccatgccccgcccctgtgccttctgtccccacttgcagggatggcagctgtgacaccagtatgggggctgggactctttcagggcacagctttgggaaagcctgtgtggcctgagcaaggcagctgcatcccagaggatggatggacactgcaccaggaaccccggcatcctgaagcaggctttcttttttattattattattcatataaatgtatgggtacaagtgcagctttgttacatggatatattgcgtggtggtgaagtctgggattttagtgtaccatcccccaagcaatgtacattgtacccataagtcatctctcaatcccccatcccccatccttccacgcctccagtgtctgtcattccaccttctatgtccatgtgtgcacattatttcactcccacctacaggtgaggacattcggcgtttgactttctgtgcctaagtcatttcacttaagataatggcctccaggtccatccatgttgttgcaaatgacaggatttcattcgttttgaggacctagcagcattccgtgtataaatgcaccacattttctttatccagccatctgtttatggacactcaagtcgatccctgcaagaactaagcatgaaaggtggagaaaggaagactagcattttttggatgcctactgtgtgacaggtgctttcacttgcctcctcatttaaccctttcagcaatccactcagtaaataccctggccccgatggcggctttcactgatgaggaaaccaaggatcatagcggtggagacgtttgcaaggtcacacagctaagacgtagcagctgtggtctgtacccggatctgatgccattgcctgcctgctttctgctgccttccagggactctgccggtcagcaggtgtatgacagaagcatatatattagccaaaacatggtctctgtcatctgttttctaactcagataaaggtgatcttaaggacgtggacagcacagtttaggatcaaatgttctgcaaaatctgggtcaggtcaggaatttacctaatttgacatattgtttccgactcctttgacatttctcttcatttggttctgaatatacagtataggagatttttttcctattaaaccttgtccggcggtgtaaaagctcttggggttgctgatctcatggagctctgcagtttgcctcaagcaattctttggacttcacagagcatcctgttattttgttacagacttaattccttgatctcatgcatcctggaagtttctagtggcaaaagcctctccccactctgcagctgtcacttatttataagccagaggcactttctgtatatgcaactttcatcatagagctctgagagaaaggtctggcatttctggatgattctggccaacccagagctgcacagagccctaacatttcatgagagagaaaatcaacaggagaatggccactgtgggcatgacacgtggcaatgtgatcgctaaccccacggaaccagccacttaccgctttytgaaacccagatcgtcatcccgcagygtgatacaaaaggaagatcatcttgctagatgccaagaaccgtagttatgacactttttgtcattctgtttcctcttatttatacagtggagagtaggatgttttcaaataaaccttctaaatatgaaatcctgagaatgcattacttcaaaaatgctgcaccgttagcagccttttagttggttacattataaagcatgtagtaacagcttaaaaaaaaattctgagtcgaaatgtgtttccagagcccatatgctgaattctggcatctttatacctttttcaagctgttgtcaattagtaaagaaattaatttctgcctttatctctcttgtaaagccgagcttgtgcttggatgatgcagagagccacaaagggagacatccttcctcgctctaaggtaactcagtgcagtggtagtcggggggacgaaaacatgttgtgctgagtggccgtggattgaaactgggaccatcagcaaacagaagagaaggaaatggcttttgttgagggaaacaaactgttttccaggccaacaagctgtgatcttggactttttgccatctgtacattttttagaaagcgagaaaagcagagcccctgtggtcatacgctcttccttgccctggagagggaagggcagcgtgtaggggtggcacgcagttcttgtctaacacattgcctctccggccccttctacctgtgactttgagcctccctttgttccagtactctctgcttggactttttttttttttttttttttttttttagcattagtggaatgtgtcggctgatggccaaacatagttttgtagtggcagcaaaaagggacagacctatggcatttcatctaaggaagcggttcctttgcttttaatttgtcattggtcttatttccttatactttggtatataatgccctgctattggatgtcgcaggagcatagaaaacaaaccaggctttcattaggaaagtgtgtttttgaaacaatgatagctaaattttttaaaagcatattcaagttgcagcctgaagtaggaaggaaatatggagatgctggcatcctctctccaataaagcattgaggttaaagactggaatctgaaaatacacagcaatttcaggggaatctgctgaaactggaagattgtttcttggcatgtaggtggccactgagctggctttctgtcaaatcacttttgggtgcatttgaaatggctcaaacaggctgggtgcggtggctcacgcctgtaaccccagcactttgggaggccaaggctggtggatcacctgaggtcaggagttcaagaccagctcggccaacatggcaaaaccccatctctactaaaaatacaaaaattrcacgggcatggtggtgggcacctgtaatcccagctactcgagaggctgaggcaggagaatcacttgaactcaggaggtggaggttgcagtgagccgagatcccgccactgcacaccagcctggtgacatagcaagaaatggctcaagcggccacatggtctcttcctgcaatcagggcttccaaatcagtgggctgacagcccagattatgttctgatccactgtttgggtcacgtgtagtagtgatacggctctctctctccccaccaaaggtagagaaaacaggttgccttaagaaaagaagcgaggagaaacacataacttgagctgcatgttcttcagaccaaaacaatgccttctgtagcttttttttttttttttttttttttgggacggagtctcgctctgtctcccaggctggagtgcagtgaggccatcccagctcactgcaatctctgcctcttgggctcaagcgagtctcctgcctcagcctcctgactatctgggactacaggtgcccaccaccaagcctggctcatttttgtatttttagtagagatggggtttcaccatgttggccaggctggtcttgaacttctgacctcaggtgatccacccacattggcctcccaaagtgctgaggttacaggcatgagccactgcgcctggcctgccttctgtagcttttgtctgtaaaccaagtactacagtagaaagaaggtgggttttgccacctattatataataaggacatttttttcaaatggtaactcccgtgctgacaaggatgtggcaaaactcaaacttccatactttgctgatgacaatgaaatgtcaagttgaaaagcatttttagttctatgtattagaactcatgaaaatattcgtatcttttgatctagaaatcccattttggtaagtttatcttgagaattccatagacatctgtaaaaagatgttcatttcagtgttatttataaaagcaaaaaattgaagtcactctcaatgctccacaataagtagttgagtcttgatgtatcccctgatgggatattatacagtcagtgtaagtcatgagtayaaatgatgcaataatgtgcaaaaaaatcacagattatgtatatgaagttacaagtcaactctaagcccccagcatctaaccaagacctgacacaaaacaggtatttaggaaatgcttgttacattgaaagtgacctgcttgcacgatcttcctgtagcagccagatagaaaaaggctttgtctagtagaagggctgaccttgtccccacccagcccctaaagcacaccttgggaaccatgagacaaggggatgttgactgagcaaggaggcaaattacactccctggctgttcctgctggaaggctcatctgtgactgctccccacaaacctctgcccgctccccacaaacctctgccccggtgtaacacacgcatcgtggtgtcctagcatgggcctcgtgctgacaaaggagtaagcccacaccaggcggctttgtctttcctgggagatggggtctggctgggaagagcctgagagggccatgccccctgggagcacccagcctgccctggcatccagcgccacactcagggccaccccacagtctgtgctggacaggtccactttcccccccaagaaagcatgaggagtgggcatggcctggagctggggtcgccacacacaccatgttgtatgtttccattctcattcactccaccccactgtgtctctggatgtcacatcctaggtgctactggatgtgtttcctgtgatgaagaagaagaacattgtatccatggaatgtagaggaaacagagacctagttgtcctgtctctctttgggcacagctgagctcaggcacctggccacagagaggttgtcactggtcactgtggctgaaggcccagtggttaggtctaccaggtcaggctctgtgctcactgggggtagccgtggggagcagcattttccctgctggctggggccaggcattggtacctgcagcctgggccagtccagccccrgggaaagcttgcactgctttgggggcgttctactcccctaggccctgcctggctgaacagaacacttttcccgtgctgtgttcttgtatgaaaacagacgtccagaatccagccctgggaggtccccacactacgtcgacacggccacattttggcccctgcaagcctcacctccaccctcagtgtggggagctttccttccaggccagcgtcacaccattgtccccgcactggtgacttcatcctccacttggaatatattttcatcctgaagtttacgtgactcagaccacaggccacttcccttggggtgtaccccctactgccctgcacaacccccacagaactggaacctcagggcccccgcagagcccctgccttcctttctcttgaattctctaagctggagggtgaggccagcaaacggcgacctgggtcccggcagtcctcagaggggtttttgcgaagtccactcagactttttaaaactggaactgatatggacagatactctatgattccacctacatgaagtcctagagcagtcaaactcatgaagacaaaaagtcagtggtggttgccagggggtgggggcagggaagacagagttgctgaacaaggaccgcgtttcagctggggaggatggcagggttcgaagctggatggtgctggtagctgcatgtctgtgtgaacgagcttcatgccacaagtggtgacttcggacagtgaaggcggtcaatttaggttatgcacatttaccacaagtttttaaaaagagaactaggagacttgaccttaaaactggatttctagcttatcttgaacatttggaagactgggccacgctggacccacattcctgtgcggcctggacctgctgaggccagggcttccccactcagagctgcctgctggcccgcaggcctctgagcgggctcccacacaggcaaggggactcgctgtgtgtgtgtctggccccaggcccacacctgcattttatgagtctctatacgtgcttcacctagacactggccagcatacagcaagtgcttagcaaaggtgcrctgggggctggctgcatgcacacttggaggatggtagaaagcatctccaggaacccccaaagcctcaaagaagcagcacagtaccactggtccacacccctgcgtggcatccagttgtccatgtaagagttccatgaatgaaatctcaggcctgctgctccatcccaaagccctccataaggtcaccagcatggccggtttgcagtataatcttccagagctttctctctgctttgatatcacgtatgagccaaaggaaacagtagtattttgtgggtttttaaaagcatcagtggtgagctacgtaggcgtcattcagcaatttaagctttttctatccacagtggctcttggaggtcttcccaggccagttcatacagttcacgttggcaagttattgaaaggagaccaaactaataatacttaattatttctggttggcaggagtggtttgacttttagttcttatttctacaaccaatatttactgcccacttactctgtgtcttactgctctaagcactttatagcaattatctcagttaaactcactaacaagccagagaggtggggactttcactaccctcaatttgcaaaggaggtgactgagcctcaaagaagttgaaccccccacaagaggcctccctgtggtggatccggatttgatctgaagaagtctcattctggggtctttgcactcagcggccacttgaggcttttcgggatttttcccagatagctcccttgaacatgttttacttttgcaatcagagcagagatgcagtgtgtatcatttaagatgcaggcaaatggacacaggcatttccttcattccacctggtgcctcctgaattgaaggcatcttcaatgctgcctactagaaatttctgcgatggtggacatgttctacctctgcccatcctgcgtggaagccactggttgcgtgtggccgtagggcattggtaagactacagaactgagtttttctgctttttcattttaactgatgtaaatgtaagcatagctggcctgtgcggctggtgcagattgggaccgcttctttatacagtcacactgtcagttggcatccagggactctgtgccctgctgcagaagcccctcacaccaccctgccgcttggtactcaggagtgctcactcctacaggggctggactggccttctcccccatgctggaagctgagcagtgtgcccagatggagagggccagataatccctttctaacctctctgcaggcaggcccaaggagtgggacccaggctgcagggtgctccagcctggcagatggctcctgcccaggacctccttctgcctgtccatggttgtgagcaacccagggctgagtgggtgctgaacaccagaagcctgaccagcctccacccttccaccagcagctccttgggaggtagaattgtgattccagaaacaaggcctcccaaggcgtggcttgctcctgtgtttgctggaggaatcaacaagaaagatctaggttaccatttcctgcttccaggaaccaagaacacattttttttttttttttaaagagacagaatctcactctgtcacccaggctggagtgcagtggtgaaatcacggctccctgcagcctcaacttcccgggctcaagcgatcctcctgcctcagcttcccgaatagctggaactacaggcatgtgccaccacacctggctaattttttgtattttttgtacaggtggggtttcaccatgttgtccaggctggtctcaaactcctggtttaagccatctgcccaccttggcctcccaaagtgctgggattacaggtctgagccactgcgcctagccacacgagcacttcttacgttattcttacttagataatattaccatgtgccatatgtgaatgcataattaatgcccgttttaagaaggagttgatgggcggtggctcatgcctataatccagactagggcaggggatcacctgcggtcagaagttcgagactagcctgaccaacatggtgaaaccccatctctactaaatacaaaaaattagccaggtgtggtggtgcatgcctgtaatcccagctacttgggaggctgaggcaggagagttgcttcaacccgggaggtggaggttgcagtgagccaagattgcgccattgcactccagcctgggcaagaagagcaaaaccctgtctcacaaaaaaaaaaaaaaannnnnnnnnnnnnnnnnnnnnnnnnnnnnnnnnnnnnnnnnnnnnnnnnnnnncctggaggtggccagtgatgtcctggaattgcaaatgacccgggcagatgttccagtgcggagaatacagggccgctttggtctgcagcctcaattttcataatgacccttatcatggcagtgggcatttattgagtgcttcctgtgtgccccgctctgtgctagccatcatccattccctccctcactaattctcacagcaccttctgacgtgggcttgtgagtgccccttattgcaggtgacgaggctgagccttcaggaagtgaagtcactgcccaaggtcacacagaggtgacctccaccttactacagtcacacatcagagggtgctgtgaggattagtgagggagggaatggatggtggctagcacagagcagggcacacaggaagcactcaataaatgctcactgctatgataagggtcattatgaaaattgaggctacagaccaaagtggccctgtattctcctcactggaacatctgcccaggtcatttgtaattactggccacctccaggatacagtgctactggccttagcctcctcatcttccaactggtagatggtgactcttccctcccagcttgggttattattaaacaagaggagggccgggcgcagtggctcatgcctgtaatccctgcactttgggaggccgaggcaggtggatcatttgaggtcaggagttctagaccagcctggccaacaaggtgaaaccctgtctctacaaaaaatacaaaaattagccaggcgtggtgacatgcgcttgtggtcccagttactcgggaagctgaggcaggaggatcattggagcccaggaggtcgaggctgcagtgagccgagattgcaccactgcactccagcctgggtgacagagtgagaccctgtctcaaaaaataaaaatacacaaataaataaataaacaaacaagaggagtagcaggcctgatggcctggcatggggccaggcataccgcaagtgcttaacaaatgaggctcttttctctttgccttcattacatcttagctgaattcaaatttggaatagtgcttattcattcattaaacccaggtgaaaggagcccttcccctcacccagccctgcctgggcagggatgcatgaagctgaagtctccagggcagcggagccatttctcacgtgttctctctaggaccagactcatttactctttgtgactcattactctttttcgctgacccaactcctgccttttctggaagctctgggatcctgacttcagctgtttttagttgcttatcacccaggctttctaaaagtttcacttcttgttaaaaaatatagtatctcacatcctagagtaatgaacgtccatttttttaaagcaatttgcttttcctcatgcaatcttctttgttttttaaagtgatacttacaataatttcagcagaagtgaaacttgggttgccaggtgtctgtacttttattaggtttgactgaccctgagctccaaacaatggaactagcactgtttgggaacttctgtaatctcacagaggacaacagatctaactgaatgttttcaagggaaaataaaaaggtctgttccatgttaaacctgggagcttttagcgtgaaggaactgagccgaaagatggtttaacgcttgcaytctaagagagccaggattctaactgaaggtgcagaccagctgccccatctctttgcagagctgaacaggagaaaatccttgtaagtgggagagatgcagactagattcagaaggatcttcccctggaaggatgcgagcaccaagagaatgccagaatttatacatttttctcctctgaaaccatacaaagggagggaatgggagaaggcggggagcgagcacgtgctggaaacccaccttttgccaggtatgttcagctgtttcatttattcccccaacaacttgatgagtagacaggaggtgactggaggtaactacaatcttggaatttgtgtttcattctcttgcttttttattttatgtgtttatcacataagtatgagtctctaaaaatatgtatatttgcttttgcttgttttcttaacattataaaatggagtcatacttactcagtcttctgtgatttgctttcttcactttgtgtttcttttctaagactcatcagtgctgctttgtgcagctctagtttatttgcttttcactactgtgtgataatccatttgccacaatgtatccattctctagttataacaacggggctgctatgaacagtccgattcctgtgtctaagagcttctcttggacatatatcctggtgtggaattgctgagttgtaaagtaaggaaattcaaccttaccggataccaaattgttttcccaagggggttgtactagtttctctccctcctgttgtagcatatatgagtttatgacttcctttagatctaaaaatggggactaaggcaattcttcctttctgctcctaaaacaaaggcttgttccactctggtgttcatcaacaaatgactttaattcttcctttgggtctgaatgagccaagactcccacgtcgggctcctccgggtctgttgtgtggttcttgaggctagaggccccacagtgatcgtctgtcttattgccctgaccacacattctgtaagattcctcctttctgatgctggctgacttcctgtgggttggccaggaatgcagggcagacacccaaattgtaagggaaggaagtgtctgtcctcctcacagtcaggggctcccatctctccagagcctcagcccgtgtgcctgccatgactggctggcttagtcacctgaggagagatgaccaggaaaatccagagagaaggcatttgctgggctgaggggaataaactgcctgtggaaaggtggattggtccttggatctcttyacctgggggctgtcaagttgggacagagccaagataagagccctttttcaaatgtgttctttcatcttttaatggagttggtttctttggcaggctagcaaatcctgcagggcccctgtgcagccactctggagggtcagggagacactctgtggttggcacctgcgaaggagcaggggtgagaaatgaggagaaatgtctgtctgtgccgaacccccagtggagagcgtgtgggctcrgarttagggtaaatgaaggcacgggcgcactgcagacccctgatgggagaggcagtgggcgatgcttccatggtgaaatggaatactgggagccaggtgccctggcgcctcatggcaacgcctccttactctaggycggcctcsctggcattcctctttgagctgatgagggaccagaccagtcccaggttagcacctggatccactttcctgcattttgggtaacacatgttgcgtctttcctctggttatgaaagtgagacccggtcaaggtagattcaagggaaagcagcgctgcatcaaggcagccatggatcccacagggttaagggggtgggctccagaattagactccttagaccaacccggctccaccacaggaaaggctccagcagggttttctacttcagacctgggcctcctgctctgcaaggaacgcccactttcctctgcagggccacaacgctctacgctgtacgattgggaggcaggctggaggggctcggctgccctgccctctttactgggctctttagtgacttgctccacgtcagcacacccacccaggtgcagctgcgcacccagccactccatccctctgctcagaggcaaagcttctccctctgaaccctggaagtcagagcgatggctgcatagggtcctttctmcccagggaggcatggagttggtggatgaagcttttgacaagacttttctataatgatcttgtggagacagtgatataatgaggccattttttaaaaaatgcaaacatccctcttgtgcctaaaactctcctcagcctcccctctctctaggtagaggccagcatccttaccatggtctcaggccacgtcctcccaagacagtgacacctctcctcccatccagtggtctgcatctgccttgcctcccaggcctgaatccccctcactcttgttaccagaaaggggtcctgatccagaccccaagagagggttcctggatcttaagcaagaaggaatttagagggagtccrtagagtaacatgaaagcgagtttattaggaaagtagaggaatgaaagaatggctaccccatagacagagcagcctgagggctggtgggtgcccatttttatggctatttcttgatgatatgctaaacaaggggtggattattcatgcttcccctttttagactatactgggtaacttcctgacgttgccatggcatctgtaaactgtcatggcgctgttgagactgtagcagtgaggacaaccagaggtcaccgttgttgccatcttggttttggtgggttttagcyggcttctttactgcaaccggttttatcagcaaggtctttatggcctgtatcttgtgccaagctcctatctcaccctgtgacttagaatacctcaaccgtctgggaatgcagcccagtagctctcagcctcattttacccagcccccgttcaagatggagttgctctggttcaaacgcctctggcactctcaccctccttccacccaccgctcctcccagctctgctcagacagccctgggctggaaaagtcactgaacctcctgagacccagtcatggtgtccgtcagtscactcggtggcctcatagacatgaggtctccagtggacattggctgccatttgttgtggttacttccagggttagcctctgcccagcccttctgttcctattgtatcccacacttagaaatttgtgaagtcttcagaagaacatttcccagtggcctccctgwttgcacatctgcaggtgctggtgagtgtgaaccacctgtccctgcctgacacggaaccagatccttctcaggactcacctggggtgagcagctctaggcacaagccctggggtctgggcgtgtagggaagatgccagccctgtgttttcacacagcgggttctttatcttgttaagaaggcttttctttccctcctcaatcttcagtcccctgcttcctgctgtgttttgccctgagctgtgagagtgacaaccctgagtctggagttcacaccctgtactcaagtccctccctgtggctcacctactgggggctgagcgctgccctttagtctctccagggtcwgtttcctttgctagaaaatggggaaagaatccctacctcacaagcttgtggggaacaaatgaaacaaactctgggaaaagtgctttgtacgttatgaactctcacacaaataccaagtgctgtttttactactttttaaaggcttcgtctcactttccttacgcaaagctattttttatcagctttttcttctgtaagaaaatgaatgctaagaaagcctggttccctgaaaaaagggaagggggaggctggctcttcccattccagcagtaacaggatcaccagggttctataggttcccgggggactcattttgtacatggtaacaacatggaaagttattttcagacagaaatattttgtaggagactatttaatcattcaacaaaggattatcacgaatttattatacttcgcatcgaatgcagtgctggggtgttttaagagtacctaggatctgttttaattggatatggtaagacacacagacatgaacattactgtcatgaggggagaagtttattccattgacaggtccctagaaacagatggcaaagcatgccacgcagggccctgcaggggagcacggggcaggtcaggggccagagggagagggaactgtgggccggggcttttattgtggcttccgaggggaagaacaggtgaggtgcagtgagcaggtttaggattgattagtttgaagaatttcagggctctcagatgcaaggctgtccttaattgtctgttgcctggccctgaggtgatcaggacagggggacagtggcctggagcggggagagtctgataaaggcaattgaagtcccatccatgatggggtgggactgtctttccaggatcagcaaggcctgagatgttaaagcatcaaagtacagcaaatttaaaaacatagttaatacatagagacacaaaactaaaaatatcttaaagtctgcaaagcagggttctttaaaataawaataataataataataataataataataaaagccaccaagagagcagccaggcatagtggtgtgcgcctgtagtcccagtacttgggaggttgaggcaggggattgcttgagcccaggagtttgaatccaccctgagcaacataacaagaccttgtctctaaaacaaatgtgtaaatacataaataaaaccaggagaaaaagaattctcattacagatgcaaaactacttctcaacaaactctgtttccatggtggtcaaggaaacatattgcatcagctatagctagagtaatggaattgagtttctttggtaagtggccattatggaaacactgcctacaattcatttcaacagacattgatcaaacacccaccttctgccaggcccgtgccaggaaccctagggaatgcacaggtgaataaagtatgatctttgctctccaagacggccctggcagacatgggcacatgcacggtgcattccctccccaagtccacacaaacatcatcgttcactcaggactgttttgcgccccatccagccacactcaccttagaagccactgcagcacagagccatgtggcacccctgctctcaggaccctccatctatagggtgggggatggtgctagaggagaaaacgagggaggactgtgatcaactcacatgtgacaggggcaagaagtgcttcagggttatggaaggggtatgttgcctttgaacttgcagtagcttctccaatctccctgcccacsctaagctctccatgactcacctcctcttccggaagctgcacctgcatttagggaattacagtggatgccatggatgaagggatttaaagggccttaaaggactggggcagggtgaggacctcaaggagaggctgcctgttcagaggcacagggcaggaacgtgtgcgtatgcttcaggaaccgtgggcaggtgggtgtgcatgtggctcagattgtggcagaggaacaagtagaagccttcctgggaggctgggaatactgggctgggatgtgcaggctgcattctcaaacagtgggggccgtcggaccacgacaccatcagagcagcttccggaagaggaggtgggtcatggagagcctggggttgggcagggagattggagaagaagctactgtaagttcaaaggcagcaacagtctccacccctaccgggatataacrtgcaaagaaggagactggatgyagaaatctagaaggacttggggaccaattgaatgtagaaatagaattaaagtcaaagacgacagccctgttttgagcctgaataatttggaaggctcacagggcctttaaccgctatgtgaaggagagccaattatttgcaagcaatctgaggagctgtggaacagccaggagagtctgaccacaggttggcaggatggatctgtagctctggaaagaagccagagtcagaaacagtttatccaggagatgcctacattaccatcagagtcaaagcatgggagtgatgcgcttggaccagggagagctcgcagagtgacctggggcctcctgcatgtaatgtgtgtcaagggcaggctcctataatgtctcaataatatgggggctggctcatgaataagcaaaccagtggagctgagcagaaatccagaaatagactgggcttgagtgaaaagggaactttaacacatgataaggatgacattgcaattcagtgaagcaatgaaggacttgttcataaattctgctgagacgattacaaaccatctacattttggaacttcttatagatagtgttgcaacaatattgtggacatactaaatgccactaaatcggtacactttaaaatggttaattttttgtgaggtgaatttcactgaattgaaaaaaaggtctggtaaaagatgggtatctcctaccctacaccaagacaaaattcaaatgggtcaaagattcgaatgtaaaaaaatgaaactatctagagatggatgatggtgatggttgcacaagaatgtgaatgtatttaataccactaaactgtacatttaaagtggttaattttttaggtcatgtatatttcactgcaaaagaaatataagtcacagaaaatatggctgaattcctttatacccgtggagtggggaaggcctttatcaccargaatcaaaattcagaagccataaagtgaaaagattgataacttgactattcaaaaataagaatctcaaaagaaaccaaaaataagaatcttctgcttggctaaatacaatgtaaacaaagtcaaaagacaaatgaccaactaatatacaaacagctcctaaaygttaagaagagatgcgaaacccccatagaaaaaaatgagcaaagacatgaatactcagtttaccaaaaaagaagtaatggctcttaaaatctgagatgttcaacccacactttgtctcctatcatatgagcaaaaacctaaatgtcaaacacacagtctgctggtcatgccaagagaaagaggccctctcccgcatctcactcatagagtgaaaggtgacactcccacatggaggggaatttggtaatacctacgaaaattacatatgcatttacatttcagccaagcaatcctgcatctaggcacataccctgaagatacaacatcatgcagatgacataaaatagtccaagtttatctaccgcagccaactgtttaataaataagagcttggatacaatccaagtgttttgcgatgagagagtgcttgaaaaaactatggttcacccccacagggcgtactacgcaacagtaaggcagaatggaggcaggtctgggatctgtgacacagagtgacctccagaatatgttaaacgtgaggaaaagaaaacctggtagaaatccagaaatagacaagactgwttctagagtaggatatgtggcatactatcttttaagtaagaaaggaggaaaaataagaatagatgggtggatggataaatagattagacagagaatagatagatgatagactagatggataaatggatggatggatggatggatggatggataaacaggtagttttcttatttttgcaaaaagaaatgcttagagggaaaaaacagaaaataattagaatgattaacgctagggaacgagcggggagatggaggagatggggtagaagtgagacttcactggatgaattttttaatatatttctgactgttgtgtcaagtacacgttttcatatttggaaaagaaaattaaattgaaaagcaagaaggaaaaacctacaaatggaaagaaatttaatttgaagttaatgcatctaattatcaaattagtaacataagcacacagagaaaataattataacctgtttgtaagaatttaaacttcaaacacaatactctagtcatattatgattgaactatattctaaagacaaaaaaatgcaaagcaattctagcttcttgccgtaggcttattattggtggcaatattggtattgtaattttgacgctatgctataagtaaatatgttaatgctattaggaaccaagattttcagtgtaaaasaaaagagataaaatacaaaatcaaagaaggtaagagaaaactttagaacattgatttcttgctctgtttttttttttttttttttttttttagccttgctctgttgcccaggctggagcccagtggcacgatcatggctcactgcagccttgacctcctgggctcaaacgattctctcacctcaacttcctgactagctgggactacaggtgtgcaccaccatgctaggctaatttttgtattttttgtagagatggggttttgccargttgcccaggctggtctcaaactcctgggcccaagagatctgcccaccttggcctcccaaagtgctgggattacaggcatgagccactgcgcctagccagaacattgatttatagttgaaaatatctatatggactcattttttaagaattaagttttcttaagtctcatgtaaaaaaaaaagaattaagtttttcagctctgcctaatgaagagcatgaaagcaaaggcacctcggtggcattggacactcccaactttaaatcttgatgtttaaacactgaaaggaagtggggctccctggagaaatggttaattccaaatctgggacaaggaaattataaggtgagcctagtacatttgtgttgaggaaggggggaagttcttggtaatgaatgggaacacagaaacaagtcaaatgacagaccatgacgggaaacaatcagatacaggatgtaaggcatttactagcctggcccctctaagactaaaggaacatagcaaacaaatacagcataagagttttgcatcctggttctaaaacaccagctgtaaaatacttggagacaatggggaaattcgaatttggattgtatattagatgatattagggagctattgctaatttacttaggcaggaaaatagtattgtagttttgaagagaatgtcactaagcatgctgaagtgtttagggtgaagtgttttaatagttaatagattatttttataacactttttattcagaaataccttcaacttcacagaaggtttgcaagaatagtataaagaacccctgtaggccaggcgcggtggctcacacctgtaatcccagcaatttgggaggctgaggtgggtggatcacaaggtcaggagatcgagaccatcctggctaacatggtgaaacaccgtctctactgaaaaatagaaaaaaattagctgggcatggtggtgggcacctrtagtcccagctactcgggaggctgaggcgtgaacctgggaggtggagcttgcagtgagccgagattgcgccactgcactccagcttgggcaacagagtgagactcctactaaaaagaaaataaaaaataaaaaaaaataaaaaacctttagatcctttacccagatttgtctgttgttataatctgcaacttacttttctttctttcattcttttccttctttctttctttcctctttctttctttctctttctttytctccctccctcccttccttccttcctctctccctccctccttctctctctctttccctcccttccttccttcctctttctttctctttccttccttctgtctttctttctttctttcttttctttctttctttctttctttctttctttctttctttctttctttctttctttctttctttcctgctttctttctctttcttctgtttcttctctttctttccctttctttttttttttgagatagggtctcacttttgtccaggctggagagcagtggtgcragcacagctcactgcggccccaacctcatgggctccagtgatcccaagtagctaggattacaggtgtgcaccaccacgccaccaatgtccagtttctgttttaaattcttttttagcaacagggtctgtcttgttatattgcccaggccaattgtgaactcttggcctcaagcgatctttccaccctggcctcccaaagcactgggattacagatgtgagccaccttgcccagcctgcaatttacttttaaaagattcagccatttttatattcataaatgtgtatgtatacagcaaataaaataacaactgttgaataaagatagtaggcatatgggtttttattggaatgtttttttcagtgtttttgtgcatttgaaagttttgtagtaagaagctggggaggagccctatttcaaacgttggaagatcttcaggatatggtgtcaagtgaacgaagccctacacagagcaggatctgttgtgtgtttctttgtgtttaggaccggggtaaaaattaggatttatatttgtatttgcttgtaaagaggctgagacactaagagaagagtttaggggaagatagggaatcgggtggatgggaggaagtgggaaagggaccgtcagtgtacatctttcatgccactttgattttgtaccatgtgaatcaaatgtcttttaaaatgcaattttttaattaaaaatgattgaatgaaggaataaatacagaaatcagccaggaaggaaaagagaaaaagaaaacacagccagatgagaaggaggagagccaaggaagtccatttccagtgcaccccatgacaaagtcagcaggagcatgtggtgctgagtgagccaagatctcggaagaggatggggtaaaggcttactggggtggactcagctgagggtcgcacggagcctccagggctggagagagaatgtaggtgggaaaagggccatgagtgtggaccaccccttaaggagggaggggaagagggcagcttgggggctgtggatgaaggagggaggatggggatgcagctggcacagggagcaggctgggccaggagtggtcggaatcagaaagggggatgcttccaacgtagagggccattttagactgtccccatgttttcaaaaaaatgagtgatactacgtccccagggttgtgaggtaggattgcaagttttgggagaatagaaacatacggaagagatgcccagatgagcttgtttggagaccaagcctgtgggaagagggagcctgacactgggcagccctggtgttgccttggctcagcgtttgtgtgcagccagccctcaggctttagagtgtggaggagcagcggctgcatccagagagatgttccacatggaaatgcggggtcatgcctcaaaaattcaacacagaatcaccatctgacccagcaaccccacttctgggtatataccccaaagaattgaaagctgggatgtgaagagatatttgcacacccatattcacagcagcatcattcacaatagccaaaaggtgggaaccgtccaaatgtccctcgacagacaaatggataaacacaacatggtccatccacagaatggaatatgctgcagccttaaaaaggaaggaaattctgacacacacgactacatggatgcaccttgaagacactgtgctacattaaataagccagacacaaaaagacaaatatggcctgattccactcaaatgaagtccctagagtagtcaaatttatagaagcagaaagtggagtagagggtgccaggggtgtgggggaagagagagtaagaaggaaaggggagttggggtttaatagctagtatgagtttgccagggcttccataacaaaggaccacagactggggcctcgacaacagacatttattgtctcacagttccagaggctggaagtccaagatcagggcatcagcagggttggtttctcctgcagkctctccttgccttgtaaatggctgccatctccctgcatcytcacataatcttccctctatgtctgggttctaatcccctctccttacaggacaccagtcatttggattagggcccaccctaaggacctcatttaacttagtcatgttttttaagaccctgtcttcaaataaggtcccattccgagatcctgggggttagagcttcaacatatggatttgggggacacaagtcaacccatatcaattggtatgtagtctcagcgtgggaaggtgaaaaagtacagggttgcacaataatgttgatgccactgaaccttacatttaaaaatggttcaaacagtacgatttatgttacggatatgatagcacagtaaaaagtaaaaataaattttaaaagagaaaaaagctcagaagggcaaggaaagggggagtgctgctgagagggtagtgggactcccgggcccactgggatggtcagacagaccgtgggggggcgactgggaaggtgggtgtgggggaagggccagtgggaaacacgggagcttggggcctgacagcaggagggtctccaagctggaggtctgggcagcctgtcagttccaggtggtgaccgttattacygcagcagcctccccagaggtggcagaggcttaatgagtgcttcaggctctcagcagggaaggtctgggcagcccctctggctgtgtggtcccagttctccagaagcgctttcttttttgccattttcaaaccatcacagctgctttcagcccgaatgtgaagccacagccagtgagttgtttctatagcgactgatgtccttcaaagagggagaaagtggagggccctaaggaaagaacaagggggtgaacagcacagatatgtgacagattaaactcaagagggagagaatgtgacctagtttcactgcagcttcgtcgagaygctttctggcaagcacacccgatgactacatattattttatgtttgtcatattatcttcacctaaaactgtaagatgaggggctgagtgtaccactctacctagtgaaaggccaatattcaggcacagctgccrggrgcaaggaacagggaaaatgcaggaaaattctgagccttcttcgtcttactcccggctgctttgcagaacactgggcatgctgaggctctctgtgtacctgtgctttttcccttccttggaaaccacccccaagggagcctttgtagtaggtacaccctggctcgttgcttcctagtggtgtgatcttgggcacattcctcaaccactctgtgcctcmgtttcctaatccataaaaagtggggagaagaattccaacgttcaagagtggctggaaagggttaaatgaggtgacacattcaggcgctcaggagagagagcgattgcagtgaggagaactctgggcttgtgtaggagtcgacctggtaactgcagctctctctcatctcccgttcctttccagttggccacggacagagcgaaggggagaggatggtagtgtctgacttccacgttttcgtcagggatgtgttgcagcatgtggattccatgcagaaagactaccctgggcttcctgtcttccttctgggccactccatggtaagcagaccacagaagacccaggttaaatccwccctggcttccagccttgcagggggaagggggtggccctgacttcctgccccccactgctctctgcctggctggcatgatgtctccctttgtgcactgcacttggagttcctgggcaattccgtgcttaggaaacaagggaggctgccagccggtccttagtgagcagcttgaatacggggcctcttggaaaactgatctttttctcaacgttctttggcccacttggtgccatttcatagtgaggctgctaagagccacttcttggaggggggaatagctccttcatcaataagaagcacatgaaatgtccccaarccctgtgtgcttgtttcagaattgaactcagatgacaaatgttaactagggacagagggtccacatggaaacaattccttaaagcttattccaactccttccaccttttaaatatgtaaattgagcaaatataatcttaaaatgtaatcgagcaaatgtaatcttaaatcggggtccttaaactggcagcccacaggccaaatctacctacagacaaagcaggctggttggctgaccaagatatattgaactgcttgaatttgaakgcctggggacatctgaccagggcaggccttgcctcctgccccatggtcactgcctggctctgtccttacatttctcttacctgcccagccccgtgagcatttgcggttgcaacccttgcttttaagcacctttgtgcttcagcaaacaggtgaggcctctctccttcagcaccatccacrttcactcccatttttcttggaatttaaatttctaggacctttactaaaccaggaaaaagtatagtatagcaatctattattatgatcagattaccccccaccaaaaaaaaaaaaaaaaaaaaaaaccctcctattaagcctgtcgggatggatgaattggggttttgccagctttgggcttgaaatgaagtgggaatgtgttattgtttaacttgcggcccacaagcaggaaccttatttatatctctctgaaatgtttgctcttggaaaacccagagaaaaaaacatgtataataaaataattgcagatctagtttagccaacatttgatggygcctcttccaaggtagtcctcctcagggctcttggccaggactgcagcttaagaggactgcattggtcatgtttattagaaatgtgtgcactggtgcaagccgaacacagcagctctgcccattctgcattacagggaggcgccatcgccatcctcacggccgcagagaggccgggccacttcgccggcatggtactcatttcgcctctggttcttgccaatcctgaatctgcaacaactttcaaggtaaaaggaccttccagtctgtacaattcctacaggttccccgggacatgggtcttccatttgtagcctgagtctatgtaaaaagaccaaaggccatccttggacctcagacactattgcgtgaggggttggacaaatatccaacactgttgccaccggggttctgtaatttctaaaggcaggtgccattttcccccaagacaaaaagacaatgccttcctgtttgtgcatgttttattgatgaattttaaaaggagacgaggttagacttgttatttgtccagcaaagtcacgtttgttaacaagtcacactcaaggcctgggctgtttttcactgattatttgccaacttcagcagaaagtgaacagtgagtggaactgcaggcactcctaactgcatgcagtatggagtcgcatccactgccgcgctcctccrccccgggcacttttgacctctgactgttagggatccgtgattttgtttttctggttggaatgacccataggaatgatayaccctgtaggtactgggactctgggctgcttttgccaaggcaaatgaaccaacaaatgatacctagaggtggagcaggcaccttctctccccgagaaaggagatgaaaccagtggcctcggtagggcggcttgcttgtgactctggcttgttgacaaggtatcagtttagacccggccttgggggcatcaggcttaaggtagatacatagccgcagtgagggtggagaatcccaaccccacgtatccacaaggaatcctcagtctcaccccagtgctgggcaggggctgctgcctcctgagtcagttctggagactctcaaaggagaaagaggtgagrtagtaggtcatggggccaggtgcactgggcagccgtcacccacaggcttaccctatgaactgtgggatcatttaaataatgacattagctcttattcccccaccrcactcycttcaacacagtacagggaatgaaaccttataacaacatcctcaaagggtttccttcagcccatgaccacagacttgctcctggctctagagacaggctttcaattaaaaacagaaaatttcagccatctgaaatggggctcggcttggcaaaagagaaatcagggactatctgatagtttagccagagaacgatgatttacttagtttgcgagagagatggatgatatctcctttgaattttactccagtttaaggaaatcmcggacttactgaaattgactatcatgaatgaagttcagtgctgtgtgggacagtaccagggttctgtcacagagtgatcgaggtcccttagcatcacaatgccyggatgtgcactacctcttcatcattgaaacgtgcgaytgrggggagacatgacctactcaacatctcccgtgactatggttctaattatctaagtagaataagcaggcccagactcagcagcaggggcgttcccgctgcgttccatgggatttgctatatgcaggtctgcaaaattcagccaatgccaggcatgcactgtgctctcccaggcattgtctcatttaactcctctccagcccaggagcaggttgtagcagcactttccagatgggaaaacctgggcttaggaaagatgaatggctggccaggattgtgcagcccttgtgatgggtttgaatccagggctgcccactccccatctaggatatttccccagggaagaaaatggatgtttctgcaatggatgttttcccttacagaaaagccagggcccacaggacttttcagataaagtgcaccagggggacctggcagctgggcctggaggtgggaccaacaagggtttcctcccagagccccctgggctctataccgaccaggggagggggcacttctgggcaaggccaccactgtgacctttcaaagacttgtgctaatagatcaccttgtgacattcggagccagctgcccctgggggaacacaggtctcctcttattaaccaagacaaatgaggtttccctttgccccagacttgagggcccagcttcccctccctgagatctgttgctgctcctgcatctctggcaattttggctgacaaagtccatgatgcattcgtccaccctgcccctggaaggcttcatcactcttggcacattttctagtctggtctgacaaccttcctgaaagtctcacaggatctattttttaatgtaatttaaaagttttmagaataagacatttctatggttcaaaattcaaaagatatgaargaggatgcagggagagtctctctcccggttggcgtgggcagcaacccatggtaccagcgagagtctctgcaactcccgtcaacgctcactccatttgttcttctttttcacacaaatgggagcttgctccatgcrtgtcgggggtactctgtgtttgcttttgttgttttggttggtgtgtttgtttttgtgggttttgggttttatttggtggttttgcttagcaaccttttggtgctccttccccatcaggacctaccaagggtcccactgcagggataggtcctggtttcaggagggtgccctggggtcatttccagttgtttgctcttatgagcctcaatgatggaacaattcctagagcccacctcctccctcyagcgttctgtttgggaaatctgtttggtggtggggctgaggggcttccctgagtgtggctgtgagtggtagcagagcacagtcaagtcccagcctcctgactcctcagacagtgttcaatccatcaagccattcaacagtttcccagcaccaggcaccttctagagcaactcccccagttagtaaggggcagcgtgagatgcccagtctgtgagtacagtctggcctgtggaagacggccagcccccaccccctgcaatgtgagaacgccagatcacccccaccctcctaaatctcgccaccatctggttcttatgtggatgctggttttcaacaagctgggatatatttagcctggagatgagacaatgaggawggatgggggggccccaaacattgtctctgctgagaaagtggtttcgcaaagtggtagcagcagaaattcagaaacaaaaactccatgcatctgaacaaatctggctatttgtgaggtcactctgtggggtttttcaccatggctcgcggctcgtgcctgggtacagaggtggaactgtggccccccagctggaagagtgtaaagctccaggtgcccctcgggatttcccacccttagttgtctgggacagcactcaggagcaactgcaggctgcagggcccctcctttctctgggagcctcttagaagagaaaaatccctctgggctaagcttgagggatgggggtctcagcctaccaggagagtaatcattctaaatgacctctccctgttgccaaggttgtcccttgggttcctggggcaggggtgcaggagtcagccagtgcttcaagatactcccactctccgccaagaagggcacctcgcccagtagggagaagggggttgcccctgggagcccagcactcggtgcctgacatgcattgtctccattcctctccagcaccgccctggaaggaggggaaattattcccaatttacagacaaggaaatgaggccaaatgtcttgctcgagtcagcttgagcaccagctcagaccagctagcatgccaggataccccctttcaccccaaaacacacctgaaatcagcttcccttaatggagcccactcccatctgaatgtcactcatctgtttttagccatagaatccagaagscccttggggcagtgggagattgcagggagggaggggaaacaagtggaacatggccactctttcaagcttcaggtgaatttggacccaggatcccggaacttagccatgcactggccctttgggcagcagcaatgagctgccgtgggggttagttcacctctgtcctgtgggcacctgctctctaatagctgggtgttgggctttctagacacctgttattccaggaatcagctgtcttcctagcaagcctcctgccacacatctttgctgagcccctgatctatcaggaaacaartgtcctggccttcccagcragggtcactgggaaaggggcacagcactttctgttttatggctgccttaaggtgtcctctcactctcaagaaaatctggggcaaccctgagggtacctgctgtgtcccccacatggccgtcctatgacccttgtcatagtgctgtcccacggaaggtggggagtcctagcctsctgcgcacaggtcagcctgtgggagccacttaggaaacagcatctgtaattgycttcctcatggcaaggctttcactggcagaagtgaaattcacttagaaatgatcacagggagccattaaaaccttctggatcaataaaggcatttgtgcctgtctctagtatttaaagtgacaggcgtgatggtgcatcgggaacgcccctcaagcctcttgctcatcaagatgttgacttcagctgtgggacagttgccctatttgtggatgactgtgtcatttgttgcaaagctgcacgtcacgtgcttttcctgaagtctctactttgaatgacatttgctcattcattcagtcaaccaacacctatttattgggcctctccttagggccagaagccaggaagagagttagggacctgctgcagagyggttgagtctcatgcagctctcccagcatcccttcggagttagtttaattatccctgtcttacaggtgaagaaactgagatcatagacttkctcgaggattcagaatcaaagttcaaatccaaatgtgcctgcttcgcgtctccaaatctggtttctccatttcatcgcctgtcccttccggggttggggtctagtgactgtgtagccatttgtcatgggttttggccccaaattatcctcaggcgacgacccctggggtctgggttgagctggcataattgggagctctgtggttacacaaacctggtttcaccagggtcatggggcaggtgcrgggggtctcacctcaatgggggagccatgcaggggctcctctctcctgagctggatccaaggctctctcaatgctcctgtaggactattcgaggattttgaaacacttgatggaaaaggcatcaagaatgttaaagttttggattccacgtcctttttgggtgagcaactcccctctgaggcttccctggtgtgctcacagctcaggatggaggttgtgggagagcaggagcagcagtcatctggtcgacctcgacaatgtgatccatctgggtgygggacctgccatgactccttccttccccactgcttcctcgtcatgccgcctcaatggcccctgctcaaccgttctgctttccttcatgcacaatcaacccacttcctctgcttagctctttctcctcccatcctaccctttcctccttcaggagagattaggctcatgaaatcaacaaatcttaaaagagcagcagggaaaggggatctcttttgcagttgttcaaaacatcctgcccctgcatggcagctctcctctttcttggggcttttatggggaagaggctaaacacctaatttgttttaagccatgaagttatcattaaaatatttgcctctacacaattgagtcttgttagaaatatggcttggaacttactatgcaggtttagaaaaagagctgaagatcagggctatgcaaacatctcttatggtggttcctttgaaagggcagcttgccctgcagggacgtgtacacctccatcctagccagtgcctgtcagaggcacttctgctctagctgcacacaggatccctagggaactttaaaaaggccctgatgccagggccccactttggccaatacaatcagaatctctcagggcagcactgggaggaggtgtttctggtgtttcatggacacacacactgccagcccctgagacttcaccacgcacatgaatgcccaggagccctgtgaagctacagatcctgacccagaagccaggtggccctggagcccctggcgctgctggtttgaggaccacactgagcagggaggccctgggatgttgggatgggtgtgctgtgcccgctaccatacgccaactggattgaaggaacagaacagtacaggcggttccatcttcctgggaaracagggagttacagatcgttttaagggaatcccaggactctagaagtctccttcatgggtttctctttctgcacctttcctgtgaatggtgtatccacccgggtcccctcctgcctctttgcacactctctgtggtgtaacttgcacccagggcttcagcarccatctatgcactgagacctttctgttcttggggtggcattcctcgggatttagtgccaggacacacctgtgtgcgcattcactgggaaaagtctgcagaatctacaccaggccttcctggagggcgtgttcctccatctacattcgtgatggaacaaccagttattgtcgccgggacaccagtgcctcatgcacaccatcagccacgggagttttactgttacaagcttgtcctcttaggcacattccctcatcctgaacctgctggcagcagctcctttaggggagcgagggtggctgcttgtcccttccgtccttgggcagccagcgctcagctggatgcatgcagtggaagtcaccttctgcctccactcctgagcaggatgtgctctccccacatctcctgtttgcgctttcagcaatrgatcattcacagccataggasggggaggcctcccagtccttggctttttgtacctggaaggggatggtgaggcgttcagctgccaggaatcacttccttccctccagggaccagccccttgcattgttcattttctaaagcaaatacttctcaggaagtggctctcctctttttttttttttcctacgaagctcttttcttaaaagcttactttaactgcaaaaagttccmctgttcatggaggaagaaaatcaggcttgctgggtgagacgacagaatagggmttgctgtaattctctcctggaggcaggctctctctctggctctctgttcccccttccccaacctctgtgaaaccacttcaaggatggctcaagctgcgctgatccttgaggcgccaacagcctaagctgtcagcatcttctccagagcctggaagtagaggccttgtcactttttggtataaaagttttgggttaagaggtgccagcagcagaaacatatgttcaaggrtgaaggtaagtctgtcttcacaaatgactgatcctgaagatggacyggcacctccaggcccaggtccctgcagaatcaggtgatgggtccccaaaacacaaatggtggcacaatgagaaatctggtggtgggcttggacgaaatggtgtggatgctgggtggtctcttgctttcacctctgtggcaggcactgctgaggtgctgggtccctgggccttttcttggctctgagccatctggtcagggaatgggtaggaagctggcttacataaaacagtcatgtccctgagaaggctgtgtgggccccagcaggcaggtgggttgacctgggagcagcgcctgcaaggctggcacttgcacaccacaccatcccgttacacagagccttcctgcggttcctgagtgtggtggggatcctcccgccacagctggcagccccatgtctcctctggctgcacacaggatcactagggaactttaaaaaggcactgatgccagggctccacttcggccaatacaatcagtctctcagggcagcactgggaggaggtgtttgtggtgtttcatggacacacacactgccagcatcagggagtagtgacagggtactgagaacagcagaatatctagawgtgagttcttcataactgtggaacacagaagtcttccctcacagtgtggcccttgcccactgctgctggaggagagcgctaaggccctggaacactcrtccttacacagccagagtctagtgaaggccacagagccacagcccactgcctttatgcactgatccactccattttctcatttttagattgttttaacctttgaaagcacagatcccaatgcagacgagctcccaattcttggagttcacagacatttgatcmgtgtttgaaaataccccagtccttgtgcagagttcccagaattccaagttttcctttcccaggctcgttcttgragctggcccatgatactagctggactcttgaacattcctgacccatcacggccacccttcgaggcttccgattatgcagacacaccatgcccctgcacagtgctcaaagtcaggctgccgcatgcttctatactagacagtcaaagtcggagcccagggctcagcaaagcacctggcacagtggcggctgcagaatgagatctgcttgcctggwtgccaaggctggagggcagtaagcttcrgtatcctcagaggcagggggctgccacctttgcactaagaaggaattactgatttctaccatttgagaaaaggagtgttgaccacatggaactccgaataggttcatgcacatggaacaaagccctttaggagaaaagcccgttttttgctgtctgcctgatactggatggttgagaaacaatcgtggtgggcagtcacgccacacttgtgcgggcctaggacacaggaaggtttagccctggcctacagggagggtgggcaagcacagcaatcttgtcccccaaaagaacatcagtggccgctggtgccaagacccacgggaaggttagagctctgggttacatttgtggagagagacacagacagcggcagagacagagacgtagtaatccaggctgtgtggcataagaagataaagcggccccccagcccggggcccctcccatggacctcatggtaccgagcctccattttctcatctgttcagtgaggatgaagcctcayctcccagggyttttgcaaagacagggagactggccgggcgccgtggcttacgcctataatcccagcaccttgggaggccgaggcaggcggatcacaaggtcaggagtttgagaccagcctaaccaacatggtgaaaccccgtctctactaaaaatacaaaaattaggcaggcgtggtggcacgcgcctgtaatcccagctactcaggaggctgaggcaggagaatcacttgaacccaggaggcagaggttgcagtgagccgagattgcgccactgcactccagcctgggtgacagagcaagactctcaaaaaaaaaaaaaaaaagrtagggaaactgtgcccaatgcaccagaaggtggttcctcggtgcctgtgagtgcccttgccctctgccaagggtactgagctacgtgccctgtgcccttgatgtacactgagaattcactgcttgccaccttccgtccaattctaatttcagcatttcacagctcacttttgaaatagcatctttcatccccaaatgtctgtgcacattgcagaaatgaaaacagcccctctctgaaggcagaagtgtgagatccgggttctctgttttcctgggaaaacaagagatccagaaggagagatgggggagggggtgggaaggtttgggcctcaatcaggctcaagttcaatgagcatgtgttaagctcctgctgtgttccctgggcttttgcacacagggtgttattcaccttccccgtggtcctctgggggagggtcaaggtcccactggcagctgaggaaacggaggctcagcgatgtggaaatcccagcccatgttcacgaggcagcagagctaggaatcaaacccagcaatccttccctctgccacacagcctcctcatcgagctggtgctatttctacttccacccgasagaaatggacgcacactttctctgtgtggctcctgtgggcccttccgcactgycctgcttcgtgctcagttgatctgtgtgattctgcacctgccgtgtattttcagtaccccagagaaatggccagagctcatcccaggcaactcttgccagtgatgcaaaattacaacccatgagcgatcatggggagggtatagagcgggcaaaattcagaygtgacttcccaccttgggcgcrgcggctgcctggccagctcccccaaggtggagcagagccaggctgaatagaggctgagtcagaagggagagtccttgggcatgcaggcttaaggacgcaggcttgggagacgaacctggctgatgttcagtttgggcatcactctccttaatgtactgtaaactgtcactgygsaagagccgggtgtggatgccacttgtgctcacagcccttgttttccctccccggctaggtccttgctgcgaaagtgctcaaccttgtgctgccaaacttgtccctcgggcccatcgactccagcgtgctctctcggaataagacagaggtgagaggctttccgaaaccccaggggtagcttgggtggctgcccccatggggaatcagagttttggctccagccttggcattctctgctgccctttcaccgaggccctgtgcaaagtgacaaggacacagtggtgcattagacatggttggcttcaggtttgggtgaaaagggtgggttggctatgatgcctgagctgtgttctaaacatgaaaggagccaacagtggaagttgagtgtgtgccagtcaagtctcttggttgcaagagacagaaacctacatcaaagtgatttaagcaaaagcagggattttgtggtgaatggaactgaaggcttcagacatggctggatccagggcgttgaaagtcttattctccatcggtctcttcccagctttcatctcccctggtttggcttcattcccagacaggctttcccccagtgaaggccaagagggccaccagcaggtttacctgagcaaccccagtggaaaaacagcacctctttccagcaaaagtctcagggctgattcttactgactgattatccaggcctggattatttgtccaggaaaggggggtagtatcatccccacccactgagagtagaggaaggggatccctgggggtaactcagaatagtggtagcaaaggaaggacagacccatattgcagatgagcaaactgagccccataacgtgggatgacttgcytggggtcagccagtggtgaggctagcctgggaacgtgggtaggtgtggtctccagctgtgctctgtctgggtatgggagtgggcttgcagttaatgggtaggaagcatccagaagacaccagcattatcttcatgattaagcaaataagtttgccactcttctgcctcagttgccctcttgctttaggagtttgaaatcattgaatcactggctccctaaatcactgaatcactggctccctaaagggccctgggaagtggagtgcagtgctctagcattctggggatgttcccagacttccttgggctgttggactctagcttcattataaactgtggccttctggccctctgagtcacttagagagtgggcaactcaagaggaatagcccgtggtgtgtaggaaagagactttctagatcaggggttgaaaactcctaggcctctgagggccagctgcttaaaaatcagactggtgagagattctagcaagccatgaggcctgtgtggagccagagggcatctgatccatccaacccatccacattaatttaaaattctaatataatttggtttttaaagcccacagtgcctcccaaacctacatcttggggccaggttggacccattagggaccagtgtgtggcccctggtctttctgaaagaatatctgaataaaggaaaaaaactttaattccaaaaagcagattcatacagtgaaagagcacaactttaggacccagaaagaccaaagccaaatatacactgtttgatttaatcctgacatgaatgagatygacattaaccccatttcacagatgaagaaactgaggcttggagaggttaaataacctgttcaagattgcacaactagtcaggggcagagatgggattttagcccattttattcaaaagtccatgctttggtgcctccctctagctagtaattatggtcattaagctctgtttcctgttttacaattgattgctggtccacgcagcccatggccatggccattgctctctgtaygggacccactttgacagggaaactcagtgtggggcaggggctcctgcacctgcctgcatccctcataatggctctagcttgaagktgtggtgtctggtaaaaccagtgatctttgtagcggcagtgccaggacaacagtaggtttgagaaagatgggtcagggagggaggggcctccctttaagacaaagcacccaggtgcaaatccasgttgtttatctgawcacctgaaaatacacgggcaaagaggaagaaaaaaacaggtactaaaaagagattccaaaccctctctatttaaaagcatccaatttcagatcttttctctcctttttgcaataatgagaaattcttcggtcttactcaggatggaagcacctggtggggctccyctcctctgttcctgccccacccacagcccccatccgagccctcctgcctcgggtttctggctgcccaggtcatcagttatttagaaacactaataaatgtccctgctgagaagacatgaggaagggaggtggccggtcagccccaaggctggactgcagttggaaaaatcaagagcacgcctttccctccctcgcctgccgcagctctgcgtctccctctgaacgttctgctgagctttaaaaatagcaacgctgaggggaaaatgtgttgggaaaggcatctaacatcrgggtgtcttgaggcacatctttagctaagacatttcccatggaaccctgcagctataaaagcctcaaacyaaaaagaaatgtttgcctaagaagctgagtgagcaggactatgggggatgggccactggccgggaatcgagggtgcaggggcctgggactcragagtgcacaggccccagggaagatctggaattctgtctgaagggaagcgggttagctctgttgccagaatgtcagaagcagaatgtttggtgtttgctgtgacaagcattctcacaacccacccaggactgctagtgggctctcttcacttgcgtcgccccaaagctgccaccctatagagccacattctcgccgcatgtgtgaagccttcaggaaaaaaggcataagaggactttttattgtctcaacactacccaatgcacaatgatggcatcattcttctgtgccagacactagagcccttctggtctcaccatgaccccaggaagtcagtcttattaccagcatttgtagttgtagaagtgtgggcccagaaagggcaagtcacttgcccaagaacacagctactccgggccaagtgcccttggcactcaaacccagggaacaaagaagttgctacacagacatttattatgtttgtcaatatatttagggtccctgatcagaacatcagaatactgacatggtaatcattccaccccaaaaaggctttatcagaatgtgatgaatcccttcctactctgagaagccttgaacgtgattctaaagagttctatggccaaggacgctgtgggaggaggtgaggaggagaggttgttcagcatctgcccatgccctcagccatccacatactcaggcggaatgcactgcttcctctcccaggctgtggaaggggtggaggcgggaggcagaggccatgattctgagcacaccttgtgctaggaacctcagctgcttatctcctgaggccacttgtcttctagagcccagtctctgttctttataagtaccctgggaggcccttcctgcgcatctgctagtttatattccctcaggcaggccatatgctgagttctgagcacccgggagccatgaggagtggccactcagcttccttttttgtctcctctgcccggtgtttcggatgtgcccaatgtcgaggagttggctccaggtccccctgttgcctgcctgtcctgcacccatgctgcccagaggccctcggaaggctcctgccgggtcttggaaagctcggccgtgctgaggccttcgacttaagcgtaaccacagctaaagatgggcttcagcctcccacactgtccccaggacacagccttccacgggagttccctccgagaacgagctaagaaccttccagcaaactcggtttggctagcagattttattctgtggctctctatcgttcatcacttacattccccacagcatatacttgtctatttgagacagtcttattaccagtatttgcagctaaaaatttcccaatgccctaaaaaaacaacaggcactagaaagtctcttgggcatatggctccatgtggggtggtggcgagggagcgtgtgaattgctctacgttgcttttgcgccctgcaccaccctctgtagatgttccagctctggacccgctcccagtcccactcctgccggccaccaaggctgggagaaacggctgtgagctcatgacaggcagatcctggaagtatgatgctttaatggcagcagaaaaccagggactgcagagactgtcagggaagccacagctgccagcaaaatacaggacacactgaggagttctctgtgtccagcaggcccaactgagcttctttctcagtacctttgtgggtacgtgggacatgcacatagtagggccttggcagtggaggaaagaaagatgtgggctcagttgggcttccgtgggaacatagcctgggcaaagctctctcaaagacacctctcagctgttgtgaataacgctgctgtgcccgtggcrgtgcagatatctactccagaccctgcttccattcttttgggtatgtatgtacccagaagtgggattgctgggtcatattctgctggtaattttggaggaaccatgctgccattttccayggtggctgtgccatttcacattctcaccaacagtgctcaagggttccagtgtccctacatcctcgccaacactagttaggttgtgttttttgatagtagccatcctaatgggtatggagtggcatctcagtgtggctttgatttctatttccctaatggttagtgatgctgagtgtcttttcatgtgatttttggatatttgtatgttgtcttcttcttcttcttcttctttttttttttttttgagatggagtttctctctcgtcgcccaggctggagtgcagtggcgcgatcttggcttaccacaacctccacctcccagattcaagcgattctcctgcctcagcctcctgagtagctgggattacaggcgcgtgccaccacaccaggctaatttcatatttttagtagagacggggtttctccatggtggtcaggctagtctcgaactcctgacctcaggtgatcagcccgcctcagcctcccaaagtgctgggattacaggtgtgagccactgcactgggaccttgtatgtcttctttagagaaatgtttgttcagatcctttgcccatttcttttctttttcctatttcttgtctattgtttttctttttcttttttttttagtttaatttaattttaagttccaggatacatacgcaggatgtgcaggtttgttacataggtaaacatgtgccatggtggtttactgcacccagcaacccatcacctaggtattaagccccacatgcattagctatttatcctgatgctctccctccccccgtgcccctcctcctgacaggccccagtgtgtattgttcccctccctgtgtccatatgttctcattgttcagctcccatttataagtgagaacatgtggtgtttggttttcagttcctgcgttagtttgctgaggataatggcttccagcttcacccacgtccctgcaaaggacatgatcttgttcctttttatggctgcatagtattccatgatgtatatgtaccacattttctttatccagtctatcattgatgggtatttgggttgattccatgtctttgctattgtgagtagtgctacaataaacatacgtgtgcatgtatctttataatagaatgatttatattcctttgggtgtatacccagtaatacccaaagggattgctgggtcaaatggggtttctgttgtcttccacgatggttgaactaatttacattctcaccaacaatgtaaaagtgttcctatttctccacagcctcaccagcaactgttgtttcttgactttttaatgatcaccattctgactggcgtgagatggtatctcattgtggttttgatttgcatttctctgatgatcggtgatgttgagctttttttcatgtgtttcttggccacataaatgtcttcttttgaaaagtgtctattcatatcctttgcccrttattgatggggttgtttttttcttgcaaatttgtttaaattccttgtagattctggatattagacctttgtcaggtggatagattgtaaaaattttctcctattctgtaggttgtctgttcactctaatgatagtttcttttgctgtgcagaagccctttctgtgcagaagctctttagtttaattagataccatttgttaatttttgtttttgttgcacttggtgttgacattttcatcatgaaatctttgcccgtgcctaagtcctgaatggtattgcctagattttcttctagggattttatagttttgggttttacatttaagtctttaatccaccttgagttaatttttgtatatggtgtaaggaaggggtccagtttaaattttctgcatatggctagccagttttcccagcactgtttattaaatagggagtccttcccccattgcttgttttcatcaggtttgttaaagatcagatggttgtagatatgcagtcttatttctgagatctccattctgttccattggttatatgtctgtttgtgtaccagtgccatgctgttttggttactgtagtcttggaatgtagtttgaagttaggtagcatgattcctccagctttrttctttttgcctaggattgtctggcccatcgtttgctttgctcatttcctaattgggttgtttgttatttgttgttaagttgcaggagttctgtatatgttctggatattaaccccttatgtggatattaaccacatatacaaatataattcgcaagtattttctcctattctgtgggctgccttttccctctgctgataatgtactctgaagcataagggtttttttctttctgatgtagtccagtttatctgtttttcttttgttgcctgtgcttttggtgtcatatccaagaagttgttgccaaatccaatgtcatgaagtggataccttgttttggctgaaccatgtgaaagtaaactgcagacaccacgatcctgaatgcgcctgaatacttccgcctgggttgcccaagaggaaggactcaaaacagaggctttcacacaggaccccatgccattatcacatttaggaaaagtaacagtcattcccccttgttgtcctcgatctaatccatgctccagtttccacagttgtcaccatttaagacttgagactgcatgattttgctgttctgtgatcagcagttatgaaagtggtcctgcaagacctgggaattctttcttgtttctcttattattcctcaaatccctgagcctgtgagaaggcagagaatgtggtggctgctttttcctttcccttggtggtcacctaggagcacttctgtgttcagagccacattccagggccctccattccaaaggacagaaagaggttgactttttgcatcacttctggttgtgaagactctgaagccctgcagaaggaatcctgggggaggagacagtggtggggcggggctatgcaaacagctctccccatttgccggggctgcgacctgcagagccattcctacctcactgctcttaaaagtggatgctagggctggatggacgcggtggctcatgcctgtaatcccagcaatttgggaggccgaggtgggcagatcacctgaggtcaggagttcgagaccagcctggccaacatggtgaaaccccgtctttattaaaaatacaaaaattagcagggcatggtggcgtgtgcctgtaatcccagctactcgggaggctgaggcaggagaatcatttgaacctgggaggcagaggttgcagtgagccaagatcgcaccactgcactccagcctgggcgacaagagcgagactccatctcaaaaacaaacaaacaaacagatgccaggatgtccaggagttcaaaccttcatactaaaaagtaatttggcggaaagaatgctcattaatttgcatacccttgattaagtggcaactcagaattgtaggctgatccttgattatcctctttctgtccaaaatggcactgcagcttccaggagaggagaatgtggagcaacatcttctttccaaatggccctgatctggttcaggaatttcagccactgaggctgggcgccagctggggctggcccaaggcagggtaaggtcactgtggggactcaggcctcctggtaggcagggcttgcttgggtctatcgagccggggaagctttctgctgagtcaggcagggcctatctcccctctgccaccctgcaggcagctcaccacaccaacaaactttctcagggttcccactccagccaggctagagctggaggctgtgacaccccatgagttgccctgttgtccctgccagccaggcccatcaactgcagtggcccagaggggaaagaggcggtaggctcagtgggaagagcacaggcttccaaaaggacctgagtctggaccccgctccatctcctcagtgtgaccttggaagccacactcagtcttgcccttcctcagatccctccagatgactgcacagccacctagcacagtgtggaccctagcaggtragagctgttgctatcacagctctgagagaggcccactgaaggaggtgctggtgaagatacaggagcctggggagagaagcatggatgttggcgagggtgtctgggcacctgtccacaggaggaaatgcttaacctgggctttgaagagaaggaacagggttgctggcagataagagaaaggccgtggaaggggatggtggaaacggagatatcggggccagtctgtagtgcagacgacaagcacatgaggaaaggggtctggggatgacacacacgggaccggggaaggctgcctgcaggaagggcagctgagccgagggttgatagggagggagaaactccacaggcagccaaggaaggggtctgaaggctgaggggacatgctgtgcaagggccctggggtcaaggggagtggggagtgttaagggagggcagggatggaggtgtcccaggccataccaagaagttaggactttgccctgcagcccccatgggaagcaccacagggttcttcacagagggagacaggtacagatctgtgagtctgaaatgggacttatctctgcrtgacagggacccaatgccrtgagccctctgggggctgacagcagtggccagggtgctacaggcttgggagggaatgtgtgggagaggaagcacgccatggccacgccaagcacagctgtttccagccttcagcatgttccaaattcaggccaacttccacaggacattgacgttgttttttttgttgttgctattgttgttggtggtggcttttttttttttttttttggaggcagggtctcgctctcttgcccaggctggagtgcagtggcgtgatctcagctcactgcagcctccaccttttgggcccaagcaatcctcccacctcagcccccgcagtagctgggactacaggtgtgcaccactataccaggctaatttttgtattttttgtagagatggggttttaccatgttgcccaggctggttctgaattcctgggcccaagtgatctgcccaccttgtcctcccaaagtgctgggattacaggcatgcaccaccgtgcccaggctacggtacattcttatttgcgtttaggatattccataggcctggggttcagcacaatgcactgaaggaaagcaatgccaagcggctccaaaagcaagctatcggggctttccacgtgtgcacgcagaaaggccattcactgaatgaaatgacaagggcctcccctttcgagggtcctaagtctcattcccattgtggacactgtcttggccagcaggtggccagcggttgccagctgccgtgaggtctgtgctggcctctcagtacccaaaggtgctacttcttgggctggattagggaatggtttgcttattcatccattgcaccagagtttaccaaaggcttcccctgtgccagccaccgtgcaggccatgcagaggacaggacagacagagccctgaccctcacgtggggcagacatgtgggaagagatgtgctgattgcagaccaggccaagtgaggcatgggagaagggttttggggcagcagagtctgtgggggtctgggaaggctgagctgaggcctgaaagcggagtagacaatgttaattargctaagagcaaggggctgaaaagctgtttgtgatgggagacagaagccatcacaggaggattctctcatccagctctttccaccacaaattatgtctccggccattcaagacaaaggtgggaaatgaggacatcgtctctgcaaagacttgccagtttttgttagggttcctgcaggtttctaaatttcacagagatcactcaggtagagtgtcatgcactctttctctattatgccagagaaggctatccgagttccctgtattggaaatggawggattaagagagatctaaacaatggaggaagaaggtgggaattccaggatgggctctaaagcccaggtggaagggtgacgcttccgtaggaaaagggaggagattgcagggaaggaggggcaggaagagccagctgtggacagatctacagggatgaagcctgctgggttgtatttctctgtgattaggggtgcatccaggagggcacatgcctgtctgtgcccagaagggctcccctatcccctctggctggctgtgaagggcggtaacccctgggccccaccagatcacttcaccatctgtcaggcccatctgcttatggtcctcatcagggaccattcctgccttttctgagagcactwgtgcccctgccacctgcatagctcctggctgtctatgccccagcactgaccttcaccttctcctctcgagacaggcagcagagcatggtaagtggctaagaatgctgatggcagtggcagagtgcctaggttcttaccttggctctgcctcttgctgtgtaaccttgggtgagtcatctaacctctctgagcttgtctcctcatatgtaaaaaggtaataataatagttcctacatcacagggttcctgtgaagattaaatgagcaagtgcgagtgaagcacttactacagcacctagtaaagagtcaagggctccacgcattagttatttttcatagtattctaattaaactctgatattgcatttcatcatggaacaatttaaaaaaaaaatgggtcaagagatttgactgcaggggttgtgtctagattttgctcaaacgtaagtgtaagaaaactcccagctgaggattgcagctgtatttactgtacttcagtgcaaagtttcttcccacagagagacagtgctggaaattcagaagacccagctggtatattcctggctgtcaagctcaacaggaggccagcttgtgaaacttaaaacccaagaggagsctttggggtcccctgatggggaaactgaggcccaggaaggcgtagagccttaccatactcccaacccccaccccggggaaaaaaagacttcaactctcagccagtgggggctccccaggaaatcagttatctagagccatggtgggggtggtcacttggacctgggtccccagcttgggctcctgcttccagctgccatgtccccagcagaccctggtctcagctggtgggagccatggtgagccaaacaggaaggtggcggtgtgagagactgtgccaaagcctgggcctttgttacttgttcttagttaaatttttcatttaagatcactgtaactcacaagcagctataagaaataatacagagcgattccatgtacccattacccagtttcccccagcagtgacattttgcaaaacgacaggacaatatcacaaccaggatactgaccttgacacagtcaagtcacagatggctccatccccacaaggacccctcatgttgcccttttgcagctgcatcccctccccactcgccccacaccctcctcagccctgagagccgtgagtctggtctctgtttctctagttttgtcacgtgaagaacattacatcagtggaatcatgcagtgtggaatatttggggactgactctggtccctattgaatgaatgggctcatgttctgggcttgggcctggtttgggaggaaggggcctggctatctccttcctgggagccacaagccacattcctaggacttttggtggaytgagatcttaagctgtcaaaaaatcaaggccattgtgcttgtgccagaactgccacttgaggggagggtttggcccctctgtgcctcagtctccccatgtggtacagccctccccaacctcctggtcccagtttccctctgcccctcacctccrgtccaggctgtggttcacatcaggggcctgctctttctctgacacatctggtggctgggccccaggcccagaataggccattgtgtaaacagggcctacgtgatcaagacatggaaaacgaagccaagagcaggaagccgcttgggccgtcagtgcaattaaactcagaagcagagtccccgagcgcctgctgtgcccaggacacttggggtcagcggggcaaagcagcaggccygctgcaggaagaaggtggttgtargacatcgctagcaacaggggcgagggtgtggcccccaccccacaggtcccatgggagccctggagacagcatgggatggggtggtggcccagcccagggcaccgccagcctgctggaacccatacccccaacaacagcagcttaaccaagagagggggtgacttcttggcatcaggacacccatcttgttgctctagcttccaggggcgaaccttgtccacacggccctgactctttctgtggggcaaggagaaaataagccgtcaacccagaatgtgcacacagcccctgcctgctttctattggccagaacgtrgtcatgtgaccacacctagctgcaagggagactgggaaatgtagtctctattctgagcagttgtgtaccgaaggaaacatcaaggttctgtagggcagaacaagaattggggcaactaacagcaggcaggttgacaagcctctctgtgccttagtttcctcctctgtgtagtggagagaatgagagcaattcctcatacaggggagttatggaggcccagtgagttactgcatgcaaaaacacttagtgccgggcagacagccagagctcagatgtagctattattacttttattactcaatgagaccctgcatgtcgcagccctgcacargctggtagatggcgctgctgttggtgactccaagccccaggctcttttgcgggccctacagccctccttccctcagggctcctggctgaccctggggaagcaccccctgtggttgggcctggccatgggcccccatgaactgccctgccagtcccgtgtcctctcaggctccgagcagatggcccggcccagcaggactcatgccagctcagctgcaggaagtggctaatctgtctygtgtggatttacacaaatggtctggtttttggtgctcagtccccagcatgggaaggaatccagggatggcaggggtgactgcaggacagcctctcccacttggtgtggtccagaattctggccgaggccttgtaggggtggcagcagaaggggtgtagctcagttcttggaaatgctgagtcctagcacagtgggcaccctggttgcccggggagcagctggcagcatgttccttcctcgtccccacatgctctctgaccctcacccagtcctcaccacgtggcccctccccaacccaccaagaacccactggcaaggatgacaaacatgaatgaagaagcatcatggggccgggcgcggtagctcatgcctataatcccagcactttgggaggccgaggcgggtggatcacctgaggtcaggagtttgagaccagcctgaccaacatggcaaaaccccgtctgtactaaaaatacaaaaattagctgggtgtgatggccggcgcctataatcccagctacctgggaagctgaggtagcagaatcacttgaaccctggaggcagaggctgcagcgagccaagatcgtatcactgcactccagcctgggtgacagagggagactccgtctcaaaaaaaaaaaaaaaaaaaaaaaaaaaaaaaaaaagaagcatcaggggctcactcctgccctctatgggcctgagagattcctagaaacttctccccgatcctgtagggcagatgctagagagatcagggcagtggagcctgagctgtctttatggaggcaggaagagtgaagccagaaacccagacaggccagggagagcaaggacaggggagagagcagccccttraaaggcaagatccacagggtggtggttgaggagagaggacccacatcccgtagagggggagagttggccttgggcacagcctgtcagggcgtctgaccaccctgtgtagccctgaggggcacggaggccgagcccaccccagccagacccacccttgggcgtccctcaccccaaagcccattgtcagtgcctggccgaagcccctccaggggctcctagcatgggccctcgctttccagcacagaacccagtaaactgttcctgcagtttactgtttgcccctcatccacttccaccaggtggacaccaaatcagcagagacagagaacaaaaatcaagtgctaaaactgctgcagagctactttttaataaaataattgatgtgaacaatatgctgctgcttatattttttaaaatacaaattaatacttgaaactttcgttttttttaatttttttttgagacggagtcttgctctgtcgcctaggctagagtgcagtggcgccatcttggctcactgcaaagtccgcctcccaggttcaagggattctcccacctcagcctcccaagtagctgggattacaggtgcccaccaccacgcccagctagtttttgtatttttacaaaaatacaaaaaatcccatacagacgtggtttcaccatgttggtcaggctggtcttgaactcctgacctcaggtgatccgcccgcctcagcttcccaaagttctgggattacaggcatgagccaccacacctggccaatacttgacattttctacaggcacccatgtgtatgtgaaaccctcaagcctgaaaggagaggcactgccagtggtgcagatgaggtttgtggatgaacacggctggccttcagagccatgcccaagcccagctgacctgaatggaatcaacccttcaggccagagcagaaggaaaagctaccaggaaataggcctggcttatggaagtgagccctgcccatgctgatggaaccctctccttcttcctccaggtcgacatttataactcagaccccctgatctgccrggcagggctgaaggtgtgcttcggcatccaactgctgaatgccgtctcacgggtggagcgcgccctccccaagctgactgtgcccttcctgctgctccagggctctgccgatcgcctrtgtgacagcaaaggggcctacctgctcatggagttagccaagagccaggacaagactctcaaggtgagcggctgccacttgcccacttccccccaaggtggaggggggacaggaaggcagcaccccttggggcacatctgcccagaccctcgagggccacctcccaggtctcaggatagggaccagcctgcttgaccgagaaataaataaataaaaggaatcccaggagcctatgaatttcaagagaacacgagtcatttgctgattgttttgcatgaataagcctcaaagggaagamgaacaatcaaaagatgttataggcaagaaaggaatctgcaactgggcactgagcaaataaaatctcctgagagagagacatgtccaagctccaaggacacgtgtgatgcccaagcctccctctgcaccagtggtagctgcagtagctcgggagccatggccaccagagggctcagggcacacaggtgctggcaggacttggcagagcctgatccgtgaagggagctgccagagctagctctgcagacaggggccctgaggacaggccctgcggcttggttatgtggaatattagacagcaagactatatatatatacacacacacatatatatacacacatacatatatatacacatatatatacacatacatatatatacacatatatatatacacacatacatatatatatatatatatattttttttttttttttttttttcagacagagtatccctctgtcacccaggctggagtgcagcggcgccatctcggctcacagcaacctctgcctcccaggttcaagtgattctgctgcctcagccccctgagtagctgggattacaggcgcctgccaccctgcccggctaatttttgtatttttagtacagatggggtttcatcatgttgaccaggttggtctcactcctgacctcaggtgatccacctgccttggcctcccaaagtgctgggattgcaggcgtgagccacctcacccagcaaaatatattttttaaaagccacagtggaacactgcattcatccatgagagcatcactgagaccgcccttacaccaatgtgaacccttgccaagtccctgcgaaaggagtccgctaagattgtttattcattcatttacccagctatccattcattgcttctttaattcaagtatttatggggccctaagtttctgtcaggcccagagaacaagacaggcaaaggctctgccctgcccccccggaacctgtatcctggtgrgatgagcaaataaatgaaacggatgatgatggagaggagtcggtgcccctaaggaaactcagcagagtgtagtgtaggcatagagggggacagggggaaagcagcactttagatgggacagccaggcctgcagtctgttggtgagaagagccagtggaagaaccttccagactgaggcaagagagagattgaggacctgaggctggcataggcacgcagccataagaagagcagccagtgaggatgcaccagtcagggaygctggtggcggggggcaggggagccccaccacctgtgaagtctaaacttcttctcttggttagatgagaagccacatgagcatttcaagccaaggagtgacgtgctgtgattttcattttaaaagcatccccccgtggccttgggaagacaggagctggggtaaggaggaggtaggagacagtgacaaccaaggcaggtcaagccaggcagggtggcagagagtgagatcactgtcatgaaggacgamccctgggtttgggcttgcagtaatgaggaggctgtaatgagaccggaaacgccaggcagagagactgacgtgagcaacggctggagtccacctggagatgcccattagcgtcgcactgaagtctggaggtccctgccagaaattcggatggagatggcaggtcggcagtctagaggcagaagggaagtctggctggagatgtaaattccggagtcatcagcccaggatggattttaaaaccactggactggacaaggtgaccagggagagtgaaggagggcacagccaagcccgtagtccagccgcctgcagaggccagtgggtggggtgagcctggactgagaaggatctgccggctaggttgaaagaaaatcaaaagttaaagccatggaaccacaagaggaaagtgtttctagaaggtgacagtgagcagcttatgaatgaccagcacagtgtcccctgccacagcaatggaggtccctggagacctcgccaggctagccaccgtgggttggcgggagtggaagtcggcttgggatgagctgaggaccccgtggaggtcaggatgtgaggccgggagtggaaccccctcttttgagaaggttgcctgactcagagacacagaaacrggtccagggatggggagagatgtggagtgagggaaggtttgcatttgagaaaggaagttcgagaacacactgggacattgtaacacatttgaaccatcttctgatagaaaggtgttggcctcctaataatgggaggtcagggccaggtcctcgggcatagggagagggtccggagaatgctgcagacccctgcccactgcccacggtctccgctccctgcacctgcctctgatggtgcagctctgattccgtgtctctcctcattgcagatttatgaaggtgcctaccatgttctccacaaggagcttcctgaagtcaccaactccgtcttccatgaaataaacatgtgggtctctcaaaggacagccacggcaggaactgcgtccccaccctgaatgcattggccggtgcccggctcatggtctgggggatgcaggcaggggaagggcagagatggcttctcagatatggcttgcmaaaaaaaaaaaaaaaaaaaaaatcagaaattggagaaatccttarcacaattttctaaaaaataacagacatttttgttatacattagactatcagacactggacctaccttaatggttagacactttatgcaaaaaaagagaaaggtcccaggtgattttccacaaagaatgtgctaaaatgtccactgaaaacaaagccaagcctctgccctgcctctcccagctcccacaagggttccaggaattcctggtgttcccaggacaccagactgcaataactggaggcgcctccttcctgcccacccttcgctcacgccccagcgccctctctgaccagcctccgcttggtggccttcctctggccgtgtgatgaggtggttgctgtctccataggggccagctccccagggcagactcacgtgcccctctgaggctcagaaaatgcccagcccttcctcaaaatgagcagccacccatgactttgtgggctccttgttagcctgagaccaggctttgcagaggggcggggggtgaggcttakcccagaaggagaactgagcaggaaaccaaggctcttctctgtcccctgcccttcccctcctgccagggggaggctcaggttggtccccgagtgccgcctgtactcacaaaggctgcctttcctctagagtcactaattttacctgatgctatgagagaatcatattgaagatgaaatgtctaatatataatgtatattttaaagcagagactattttggtggataggtgggagggagcaaggggagtttgagggaatcagagcttgatgctactgtacagaactggacaggttgggccggcagtggtggggccagagggctctgtgctctaggagctaagccagcagcccccgagaggggacttggctgggcctttcctatgggcaaggcccagtgctcttcctgcccaccagggaccatggagcagtggcaccctatggggctatgatccctaggcctgggcctgggcctgcctrtggcccagagctaccctgggagtgtcagtgctagcagcacagctacctctggtggcaggagaagagaggcccagcacagcagcaggccaggccttcctgtccaggtctgcatggagcactcggtgacccagagcagggactggaggcacccccagccctgccccaggccacagcaggacaggccgggacaggcctcacccaaggccaaggctggcatcagccaatcattcagagctgaggccctgggcctagcctgcccttctcaggtgccaataccaccccagccctgcccttggcctcactttttcccagcaataagtggggttcaccacccgcctcgggaatactttccccttctaaatgggacttgctgttacctcaggaggctccttagtgcaaatatgaccctggtcagggctttgccaccgttgaagccctgcagaaggtgcaatgtaggggttctggggccacagaggagaggccacttcccaccaggacccccaacatgaagtctaggcctcaggggctcccgcccttcttcctccagcagcgggaactgccactgctctcccaggccctgttctggaggctaaccttggttcctggagagtgtgcccctccaccctccctccagcagccctgatcacaccatgagagccaggaacgggtcaccctgctgaagatcactctgtgccctgggggaggagccaagccctcaccccacaaggggcaggtgggggcttggttgctgacccggcccaagtccccacagagcaccttctgtagctccagcttgtctccctggcttctctttgaaggagaaaaatgtaaaatatgcactgagaaagccagccccgcctgcttagtcagccccggcagcagggcagccatgggaactcaggaaaagcaggaaccctttccaaaagcccagagatgccctgggctcagatctgtaattctcccaggagctgtgatagagcaggccacacaaagtccctacgcctccctgctgcctcccccagatgcatgtgrtggcatcaccattccccaaattgaatatcagcatgcggcctgaccagggactctttagatgcatgaatttatttatatgaaggctctcacagagacacacacagcacttcagtagcatttgcattcctggttaaagaatcaccaatatttaaaataaaaactttcctgaaattgggactgtcatgttatccagaagggctggtacatccgcccaccatgtccccctgctgggtcaggagccaacacaggaccctgcgtgtgagcgtgcctgacatctcacgcacggccactccagagccggtccctgtccttggaaagctgtgaagccttgcgttgagttccttctcgatactgacggctccgtgctgacattctgagctctggagtcacaccagcgcaggggcgtggaggaactgaggtttggaaggaatgccaggtctcgcacagcttggcctcgagaaggtgagaggaaggcaaaggccagggaggggacccagagaggcctggcacacaaggcccaagcaccaccgtcaacacagcccagtccatacagaaatgggtttcatgcctgaaaagctttttacagaaagatgccgcctgtagccagtgacagccgcaaccctacaggcctcagttccttgcagaggtgaggggtagagagtcagcctcyctcccttccagcagcgacccagcttccctccacttccaggtggtgctgggctcaccragggagcactggtgggtgctctgaaaacccacaggatcccacctccaggcccacctgggtcccatctcactctcttcttctttcaccaattgctaacatagaccttgttgggatcacgatggcttcacaagccagctgttgggtttgctatgtcactgtggctcagtcacatccctgcgtgtatactgtctgcggggcacatatgtatccatttagagctaaaggaatcagtgtacactacagctaatcctaataaatccgatgttttcggaatggcgtctgtctgtccatcacagtagcctctgaccctggatggcaatcttccttgctgagagcacagcaggcccttttttagacaggctgatccctgcctgagccatgcctgtcacctgataccaactccagcagtgcttcccagcctccatcagcgtgtgtggagtttatcttctcccatccacgcttggagcagatttctaaacacacacatcctctcgcagaccctgccccgccactggggaggacggagcccaggccaccctccccgtgccagcttcaggtggcttgtgctttctccagggccccatatagatgccaaacccatccccacacaagctgggctctgtccggactcagccctccctcctcagcatagggaacccggcctcctgctgctgggcatcctccagcccctctccattctatacccacacgtggcccagccactctcctcctaagtgtggccaggattatatggcttccttccagctgcacagctgtcaccagcgtctgagggatggcagcagcagcctccttggcaggccccgctttctctcctgcacccagtctgtttccacacggaggcgagagggctgttaaagtatgagtcagactgtggcccttctctgcttaacatcctccggtgactaccatctcacctaaataaaggccacggttcttgctgaggcctataggtgctgggcctttggcctccttgcctcccctctccccatcctccacatccactcagtcctcaccatgccagcctcctcacgggctgtcttctcagtgaggccctcccccaggtgctgccctgccttctcctcctccagcacacttgttgacatctgacatgacagatcttctgcttgtctgcttggtagcactctgtcccctcccatgtgagctgcaaaagggcatatccctgcactacacctctgcctgcttcccagagggtccctggaaaggcctgcctgatagggcagggagggaaggagtgggtgagtgagtgaatgaatgagtgagtgatggaatgatgtgttctctttatcctctctctcaggaggagccaaacccccatcccatgcagggcaggtgaaggctcaggtgctgagcccaggtccccacagagagcgcctaccatagccccatattatctctctggtttctctttgaaggagaaaaatgtaaaaagtgcactgacatgagtgagtgagggactgtgcaagtgagtgaatgaatgagtgagaaaatgaatgcatgatggattgaatgagtgaggaaatgagtgagtgaatgaatgagcaagggaatgaatgaataagtgagtgaatgaatgagggaataagtgagtgagggaatgagggagtgaatgaatgagcaagggaatgaatgaggaaattagtgaatgaatgactgaggaaatgagtgagtgagaagaatgagtaagtgaatggggatgaatgaatgaaggaataagtggtgagggaatgagaatggatgaatgacgaaaggagtgaatgaatgagggaaatgaatgagggaaggaattaatgaatgaaggaatgagtgagaatgagtggggatgaatgaaggaatgagtgatgagggagtgagtgagaatggatgagtgtgggtatgaatgagtgagatcatgagtgaatgaggggatgaatgaatgaaggaacaagagtgagggaatgagtgagaaaatgaatgagtgagggaatgagtgagagaatggatgaatgagggaatgagtgatgagtgaatgaatgagggaatgagtgagtgaggaaatgagtgaatgaatgaaagcgaatgaggggatgaattgagggaatgagtgggtgaggaaatgactgatgaatgactgagagaatgaatgagtgagggaatgaataagtgaagaaatagaataaataagtgaatgagtgaggggatgaataaatgagggaatgggtgagtgagggaatgtgtgatgagggaatggatggatgaggaaatcagtgagagaatgaaggaatgagtgaacgagtgagtgagagaatggatgagtaaggaaatgagtgagagaatgaatgaatgaacgagtgagagaatggatgagtgaggaaatgagtgaatgaatggatgagtgaagggatgaatgaatgagggaatgagtgggtgaatgaatggatgagtgaatgagtgggggatgaataaatgagagaatgagtgagtgaatgagggaatgagtgaggggatgaatgaatgaaggaatgagtggtgagggaatcagaatggataagttagggaatgaatgaggaaaggagtgagaaaatgaatgaatgaatgagggagggaattaataaatgaaggaatgactgaggaaatgagagaatgaatgaaggaatgagtgatgagggaatgagtgagaatggatgagggaatgaatgagtgagagcatgagtgaacaaggggatgaatgaatgaaggaacaagaatgagggaatgagagaaaatgaatgagtgagggaatgagagacaagtgaatgaatgagggatgagtgagtgaggaaatgggtgaatgaatgaaaatgaatgaggggatgaactgaggaaatgagtgggtgaggaaatgagtgatgaatgagataatggatgagtaagggaatgaatgagcaagtgaagacatgagagaataaatgggtgaatgagtgaggggatgaataaatgagggaatgagtgagggaatgtgtgatgagggaatggatgggtgaggaagtgagtgagagaatgaatgaatgggtgaatgagtgagagaatggatgagtgaggaaatgagtgaaagaatgagtgaatgagtgaggcgatgaataaatgagggaatgagtgagagaatgaatggatgagtgaatgagtgaggggatgaataaataagtgagaattgagagaatgaatgaatgagaatgaatgaggggatgaatgaatgagggaatgagtgagcgtgggaatgtgtgatgagggaatgaatgagaggaaataagagaatgatgaattagtgaatgagtgagaggatgaataaatgagagaatgagtgagagagaatgaatgagggaatgagtgaggggatgaaagaatcagagaatggatgagtccatgagtgaggggatgaataaatgaggaaatgagtgagcgagagaatggttgagtgagggagtgatgaaggaatgaatgagtggccaagggagggagagagggatggaaagagggaggaaggaggcaggaaggctttatctgagccaggcactgagctgggaactgggtgtggaagcagggttggcctcgcagcctggccacccatgcagaggcccagaccccaccctagaaggtccgtgcgtttgggtgagtgctctactgttgctctctggaaattcttaatgctctttgagcaaggtccccacgtgctgttttgcactggaccctgcaaaccactcaggccctgggtgggtggcacctggcctctgtgcagaaggtcccccaaaggtgtgcagacctgaaggacagcccgttctctccacgtcctcatgctctacttatggccaaccaaattctgcctggaacttcactgtatcaaacctagagccaacaatgtttgcatttgttggcttttccagcctcctccatgaacactcaggctcatcacaagccccttactgggcacctgtgatgctccaggcacggtgtccagcgctgggaggaacccagcgctgcacggtgaccagggcagaacaaggtgggccgccctcacagaacaaggaccccgggcgacatggactcccaccccagagcctaacagcgatgggcacccagtgtccgccagcacagcctggggccagcacagccctccagaagccaaaggtgagcaggagcgggccggggttgggggcacagcagaggggtctgcgggggagttttcgaggtgcagagagctcagggcggccccaaaactgagagactctcaggatggctggagcacaggtgtgaagggcatgttcattcggggccctgcaggaaacagctgcacctaaccaagggtggtgtcactaaaggggtcagcagcagatgatgcagcgtccaagaccagccacagcagggagcagaccctcagagcagcagttgctgcgggagaggaccacctgtcggttgggggctttaggtagagggttgcccagccccaccttcactcttcttcctcttctggtgggtcaacaagccatccctatactacctttcctgtgcaaaatggagtttatttcctttccatcattgctcattttgtcattgtccagttgatttttctttttttttttctgagacagcgtctcactctgttgcccaggctggagtgcagtggtgcagtcacagctcactgcagcctcaacctcctgggttcaagctaccttcccacctcagcctctagagtagctgggactacaggctcgcgccaccacacccggctaattttttattttttggaaagacagagtctcagtgtgctgcccaggctggtctcaaactcctgcgctcagaccatcctcctgcctcagcctcccaaagtgctgggattacaggcgtgaaccaccagtctatttttctgtctgttaaaaatttgtgggtatcttgagttgggagagaatacatataatttttccaataacacatgatgaaaatatttttcattcaacaataaaatttttttttcacctgggagtgggaatgaattaaagagataaacatgttttgttttatttttaattttaaaggtagcacagctacattacagaaactaaacagaaatcagaccaaatatccccagctctcacacagcaactcttcctctggtttagggatgatggaggagtctcaaacccagggcctctgtgtcaaaatgtgtcttctattagtctattttaacatttgtcagagtagagcacacttctgaatttaaatcaacccaattttagaaccaagtattagacactaaatttcaaattccatggttgtagttcactactcctgtgtggctgtctgtgctacaggtttctcacataagcctggggagcaccccctagtgcctgaatgtcctccaccttttccttgtggacacagaagcttcactgaccaccctcgtagttacaggaagctctgcgcatccatgctctctgttccttccccacttgctgctcgctgcggctgctggcaatgcttcctgttgatttgcaataccgcattggacaccttcctacataagtgtttccccatcgcgctgtcttctctgcctgaggctaaagtgaggaatggggccgggtgcagtggctcatgcctgtaatcccagcactttgggaggctgaggcgggcggatcacttgaggtcaggagttcgagaccaccctggccagcatggtgaaacaatgtctctactaaaaatatgaaaattagctgggcatggtggtgggcgcctgtagccccagctactctggaggctgaggcacgagaatcatttgaacctgggagataaaggttgcagtgagccgagatcacaccactgtattccagcctgggtaaaagggctagactccgtctcaaaaaaataaaataaaataaaataaataaaataataaaataaaataaagtgagaaatggtgtggtgtggctggggaatgctgccccaacaaccacacagcctagttcctgaggggtggcagttctcagactgcagctctccctgaacaggtgccatagctggtacacctggctgtatgtatctgctgtatcagtgaaccactaaaataccaactccagataatttttccttaaactgccctcttactagggttttatttaaaatttgttcaagattggaaactttatgatttcaaataataacatctgtaaaaaaaggtttcatgtagtagctcattttctcccctaatgcatatgaaaagaaat

SEQ ID NO: 96018 - DNA, 16567 bp, Homo sapiens
ggactttctggggtttgcctgttacgccagactcggacttctaagctttaagtgtggcccaggaggtttcttctccctgggagggcttggctcccaagaagtcccagggcagccgaggccagccctgcctgggttggagaaactgactttgtgccttaagtctactcagtgcctggtgaagccaccctcagcccttcacaggcctgaaccagtaggggccagtgggccaggtaagccctagagccttgaaccaggaatatccaggaagaggaaattccctttgagcccccagatggtattgcagcttcactgcctgcgttcctgggagcgtctggagctcacagtgatcagtgaccacatcattctctctgagcagaggagcaggaatccctcaagcagcagcctggtcttggctggtgggcagatgcaaatagcttttgctgttattaatgaagtaattactaaatgcacttaaaccagggcaggaaggaatggaaggatggagctagaaagctcagagtgggccagagcaggggtgtgacacttgcaaagacagggctctgactctgatccctcccagggagcctccgacacccatcccactcccaaccaccaagaccctgggttagggaagaagttgtatcttaagtgccaccttcaagtttcttagtggtgcctggtgcattccgaggctacatccaggctcatggaaggagtgtagtattcatttagccatgtctgccatgggtccagaaatgggaaagggaattgctgtccttgccctgtggtatgctgccacctctttgggaagcaggccttgcccctgtcccaccactcattctcagctttgaatgggaggcctttctatagtggaggcctttccttgaagcctatgaactgcaggcccccttttgccattgatctcaaagcacttgtcctcaggatagggaagagcasggggatgcaggaatagcagggatagcttgctcccagccccctccccaatttggttccgttgacataggaattttacgattcccaaaccatgcaggggctgagccttccttatgatgactttgttctccctcccactgggggaatcctccctatgccttaaaactgccgagccccactccatgtaataggattcctgggcttcctcaatgggggttcatgttcttggactgcgggccctcagtccttaactggaaagtgaccgtccactgccccatggagcccatctggacacagcacagccccaaaaccgttagcagctggctctgtttccaagcctggggaggggttcctcagtgcaggagttggggacaggctggggatccaagctgcttgagggggtcaaccttggaccaaagttgccttaagcctgtggtaaamrggcttcasggaargtaagtgggccacctgctggaagctgccagctgcccggctggcaatggtgtgagtgtcttggccctgtccctgccctggggtccagcaggtcatcccwcccttcwtctctctcctttggcgtttgttcctgtagtcactgsgctaatctccccctagcttcaagctgtacatagggcctcccagtgcaaatcctcctgcccataccgtgcacccttagaagcctgcgtgtgcatagagcgccccctacttcccagttaactcccagttcttctccctgagcttggtatttgtcatgtgccaactctgactctgaggtgggcagtgagggaagcagccccgggcctgcttgcttcctgtccccgaaatgttcgtttcttctgaagtaaatatacatatataaataaatgtataaatactgctttgtatctgagcttgcctccttgtctcttcttgggattggtctggtgggagaggagtcacctataaggctagggccaattggaattcaaagttcttcctgagaagcctggaatctctgagcgcctgaaccagagggccaaatggatgcttcataccccttatcctcttagcttcatattggggctaggagtggactcatcagcctctcccatggccacaccttcccctcctgcgcacccgctgctgcccacctgcattaaaagtagccactgaggagaaaagccttcttagggggagaagctgagcctggtgaggatgccccagcacagagaatggtggctatgtttatggcagggactggcctagggcagaatggaccgatgtgggttcccagagaagtttgtcctagaaacaatagaaaagggtaggcccagaccctatccacaggtaagccttaaattccaatgacaaaacaccggtgctacacaaatctcatcccccttaagtagatcagcagcaggaactgtgaaaggcagatgagaaatgggaaagggaagagattggggaagcaatgtaggtcccagcacccaccacccctgcagaatgggccccagacaggactgctatacatctgcatttattatgagcagcaggtgggacacttccagcaacagtaaaaaaaagtaatttacaaaagcaggtttcagtgaagccatctggttgttacctaaaagaggagaggggtatcaaaataagaccaatggcccttctttcctccttctctccctgcacccctgtgctcctggggcaagggctattgagcacacacctctgaggatgagccaccagagctgattcctagtggcctgtttggtggattgtctgcagcaagttttaagccctggatcttgaccccctttcagccagctgacttcccagcagcctctccaagtcactggggtctgacttctaagaatgtaaatgtacagccatgggatgcctgcgtccacacttctaggtggtacatcccaaaggcagatcgaggccttgggccatgtgagctcagaactgagagtcacatttggctcaaatccgtatgaggggcagggaaagaggcacaaatgtctagtgtccctacccattccactgagtctgtctccatcaaccaaggggtcatgctggtaagagctttaaggaccctgctgacctgactctggggaggcttccctgggctgtgccttggaggctcacgcatccatcccattgcagctcttacccttgggtgctcacacgtagatgccaacccagagcagcaggaagaggactccaaagcccatgaagagtgaggccactaaggagatgaggagctctttatagatatcacgagtgtacttggtagaggtgacctcgtaactgggcacagcagttaaggcaaagcgaaggggtggactgtggagtgcagagagcccagcccacggcaatctgaggagaaaagcattggctcaatgccttctgggaggcctatctggctcagarcagccaggcagargggcctaagagatgccttggactctggtgctccactgccatgaagaaaatgagacccagaggagttaggtcacttgccccaggtcacacagctcatgagggccggagctgggactagccctcagacctcctgacacctgagtgcacccttccttataccacctttccaactgtagcacccctattccccacctccactccagccaggtcccctgctcactgtcctggaaatccaaagaacaaactgagctcacctgaacttgggaaataaggctataacctgcccctgggcatcactagccctcctctcctccttaccttctctcagccccaatccaatgtacaaaaccggcggggtccatgtacctagcgtggtttctccctgagcttcccacatcactaatgctggtcctctggctgctcagtgaaaggatacacgaagaaccaggcggtgaagaacatgccaatggccaaaagcaccacggtcagatgggggaagacagctgggttcactgggctggtatatctgctcatggcctcgagctcctagaggagggaaagagatcagagctatcaaagaatcccacgatttcagcctggagagaacatgcggttatcaaggagcctggtgctgccgtgaaacagaggctgattttagcccggaaatgtagctgcagatcaatggcccttattagcattttctgaggccaataatctgaccactatgaaaacgtgactaaaggtacgaactctctgcctgagaaaaaccacatacaagaaaaagtttgcctacaatttccggagctttgtggaccagtgtctatagacaccaagctgagaacccccgctataagtcactgactggtggtacccagatctcaatatcttttttttttgacggagtctcattttttggacggcgtctcactctgtcgcccgggctggagggcagtggcacgatctcggctcactgcaacctctgcctcccgggttctagagattctcatacctcagcctctcgagtagctgggactataggattacaggtgcgcaccaccacatctaatttttgtatttttagtagagatggggttttgccatgctggccaggatggtcttgaattcctgacctcaggtgatctgcctgcctcggcctcccaaagtactgagattacaggtgtgagttgccgcgcccaggctcaatttttttttttttccagacagtcttgctctatcgcccaggctggagtgcctggagtgcagtggtgccaactcggctcactgcaagctccgccttctgggttcaagtgattatcctgcctcagcctcccgagcagctgggattacaggcgtgaaccaccatgcccggctaattttttgtatttttaggagagacagggtttcaccttgctggccaggctggtcttgaacttctgacctcctgatccgctcgcctcagcctcccaaagtgctgggattacaggagtgaaccaccgcgcctggccctcaatttctaattcagtattttcctcactacctatgctattatggaatcttgtgagctatggtcaagacattcaagttctggttctgagtaatctgagtctgagtaaagcgactgtaatatctatttcacagaactgaaaaataagaaagatgatgaatcaaagcatctagtgcctagcagggagtattttgctcaacaggtatttgcttccttcctaaggctgtagggaagatgatgagataatgtcttttatgaaagagggctgtaaacgtaaagatctgtacaaatgttaacttcattgtcaccggtcagccaatgcttctaaaatccagaacataacaactctagagaagtaaactgcccccattgttctgagacactggaattcaattcagtaaacaatcacggcccccttcccccaaaatgataaagacaatcactgccatttattgagcttccaattacgggccctctgtttggcactgagaatacaaagatgaatagacatcatcccagagctagatgcgcgtcagacggtggtcactaggaggcgtggccgaaaacaaagaagtccatggaacgtggccagagatctgtacagaggctgtgggcgctcctaggaaagtctggccaagtgcctgagagttggaagtgcttcaccaataaacatttgcccagggcattgtaggatgggcacgggttcggcagaagaactttccaaataaagataacacaccaccgataacagagatatacaaactggaaggtattcaaaattcgccccacgcctctcgcccttagaaatcgcgagctgagaaacctaaggagttcatggcaaggggcttcccccttccccacccttcagcccaagccggaggttccaggagcgtctagccctctggatctccggcgtctgaggagataagcgcggtgtgggtcagaccccgaggggtcctcgcatctccgtctggaactcccctcaacgctctcaccattttgccccgcgaaggctaatccgccgctccgccaccggaagaacacgtcggcaggagcaggcgcctagcacaaccggaaaaggaagtgcctccggcgcaagtggcattgagggacttgtagtcctgcgatttcgggtgtagagggagcaggggcctgcggggacctggtgtgggtggagtggggacaagcggtggagaagggtacgccagggtcgctgagagactctgttytccctggagggactggttgccatgagagcagccgtctgaggggacgcagcctgcactacgcgccccaagaggctgtgcgtggcgagcaggtcacgtgacgggagcgcgggctttggaaggcggctgaacgtcaggccacccgccgctaagctgagaagggagagcgagcttaggaccgcctgcccggggcaaccccgaaccaagctttagccgccgaggccgcgtgtcccaaaggccaggtgagaccccatgggaagcgcctccgggagcgamsgggtccgcttggcgctgggggccgtggggagccggggtctggagtgcgcgggattcgcagtcaagaggtcccgccacttttccccctgtgagccttgggccagtcgcgtaagctccgagcctctctttcctccattgtagaaaagcggtaataagttccaccttatggggtcgtgttgtatttttcctaagaccttggacgagaaacatttctgacacttgagttgtttaggcccctttcctgcctacctgtctgtgggacgccgtgaggggatcaagggctacatggtctggtcctcagtccacactccagcagcgcggccggcttgaggcaagagccgaagggttgaacaggcctggagaggggacattagaggtttctgtctgttgtctcagttaaccctggcagcagccctgagagacaggcatggtaatcgttcttcttctgtagacgagaaaataaacctcagtggcttggtaatgtcacacggatggtaaatgccgcgcctagattcaaggccagagcttttgccgctgcagttcacaggggaattattcatattaatcaaatgaataattcattgtcaattaattattaattgattaataatccagggatggacctggaaggacgcgtgagaggatggcgagaggagggcacagctaaggaaaagtgggaaaaggcgggccttattccagctttctgttgagatcccagaatgtagggttaggttgggaaccagaacatgaaagrtcgtgatgccatgctgaagtgtttggactgaattagaaggaagaattgaacagtcattgatgctctagaaagaaccctgtgaagaaagagtgggaacaatgaaaaggcctgatggagtctttcgtttcttctttctcttttcttttgtcttcttttcttttcttgacagggtcttgctctgttgcccaggctggagtgtggtggcacaatcatagctcactgtagcctggaactcctgggctcatgtgatcctcccaccacggcctcccaaagtgctgggattactgcccagagcctctgtgcctggccccagtagaatatttcttggagtattggacacataccaacagtgggcacaagatgagttttttatttttttgagacggagtctcactctcttgctaggctggagtgcagcggcacaatctcggctcactgcattctctgcctcctgggttcaagcgattctcctgcctcagcctcccgagtagctgggattacaggtgcacaccaccacacccagctaattttttttttttttgtatttttagtagagacagggtttcaccgtgttggccaggatggcaagatgattttaaattgcaccccctaaaaatccttyttaatagttatacatttaatacatattaaaatataactaatagaacacaaatattattgcttatgagttttccagtttagttttttaaaaaaaattctaagtgaatgaaagtacgggttttagttggaagtagcaaaaatcgtgagggtgatttgggaaacactgctatctgggaaacactgaactctgaagtgcaatactcttttgagcccagtgactacagcatgccagacccctaaatcaggacctggggaggagccatggagttaacatttcagactgagtggtggcgagaaaacgcaaagggaaagacktgaaactctagcaacattataataaaagtagaaactcttatgtgctgaggcgatgatgaagagagtttagagaagcttgtgagaaagccacatcacctccattcagatatgtttgcaatcctttttcaaggctgccttattagtcagggttctccagagactcaaaacaaatcagatctgtttgtttagctggtgtatttgcctgtctttcaggtctgccattatggtccctggactcctcaagccaggccaagcatcctggccttctgtggtccttgatggagacctatgttgcaggttttttttgtgtaataaataatgctgctaccttagaatatcaacagtatcttatttctctaagcacgtggttcaatttctggtactcgttgagccttactattgagtaaattctcctgctagactgagttttttgagaatggggaccttgttcatctttttatctttagcagtgctgacatggtgtcctttttgttgtgtggaatttagttgaaggcatgaagttggtgagataacaccagttataacctttckcctttcctccgtctctgacttgcctttcytttttagtcatccctcctctgtgttgccatgggaattcaaggcctggccaaactaattgctgatgtggcccccagtgccatccgggagaatgacatcaagagctactttggccgtaaggtggccattgatgcctctatgagcatttatcagttcctgattgctgttcgccagggtggggatgtgctgcagaatgaggagggtgagaccaccagccacctgatgggcatgttctaccgcaccattcgcatgatggagaacggcatcaagcccgtgtatgtctttgatggcaagccgccacagctcaagtcaggcgagctggccaaacgcagtgagcggcgggctgaggcagagaagcagctgcagcaggctcaggctgctggggccgagcaggaggtggaaaaattcactaagcggctggtgaaggtcactaagcagcacaatgatgagtgcaaacatctgctgagcctcatgggcatcccttatcttgatgcacccagtgaggcagaggccagctgtgctgccctggtgaaggctggcaaagtctatgctgcggctaccgaggacatggactgcctcaccttcggcagccctgtgctaatgcracacctgactgccagtgaagccaaaaagctgccaatccaggaattccacctgagcyggattctgcaggagctgggccwgaaccaggaacagtttgtggatctgtgcatcctgctaggcagtgactactgtgagagtatccggggtattgggcccaagcgggctgtggacctcatccagaagcacaagagcatcgaggagatcgtgcggcgacttgaccccaacaagtaccctgtgccagaaaattggctccacaaggaggctcaccagctcttcttggaacctgaggtgctggacccagagtctgtggagctgaagtggagcgagccaaatgaagaagagctgatcaagttcatgtgtggtgaaaagcagttctctgaggagcgaatccgcagtggggtcaagaggctgagtaagagccgccaaggcagcacccagggccgcctggatgatttcttcaaggtgaccggctcactctcttcagctaagcgcaaggakccagaacccaagggatccactaagaagaaggcaaagactggggcagcagggaagtttaaaaggggaaaataaatgtgtttccccattatacctccttcaccscagaatatttgccgtcttgtacccttaagagctacagctagagaaaccttcabggggtggagagaggattctaaggyttttctagcgtgacccttttcagtagtgctagtcccttttttacttgatcttaatggcaagaaggccacagaggtacttttccttttttagctcaggaaaatatgtcaggctcaaaccacttctcaggcagtttaatggacactaagtccattgttacatgaaagtgatagatagcaacaagttttggagaagagagagggagataaaagggggakacaaaagatgtacagaaatgatttcctggctggccaactggtggccagtgggaggtgatggtggacctagactgtgcttttctgtcttgttcagccttgacccaccttgagagagagccaccaggaaggcgcatcttagcagatgggaggaactgctgagagaagatgggcagaaagctggagcccctggagttggctgtgtctgtgtttgtgactgattactggctgtgtcttgggtgggcagaaactcgaacttgctatgtaatttgtgtctagttattcagaggagtaagatggtgatgttcacctggcaatcagctgagttgagactttggaataagacactggttttcatgcgctgtttttgtttyaaagttatgaagaaaaaagtcaataaaattctaaaagtaaccaaaatgtcatgttctttgagaacatttgaaaatatcccaagtgaccatggctccaaatagctttccttttcactcttaacatgctgtaattgcacttgattaacaatgggtggtttgagagtggccacaagatggcaccatgctccataaaatggccatagcagctagatggaacttcagccattaggaggaggatgttttgtttattttattttgctgggagaggagttttaatacgttgaatagatttctagtctctcactccatgagatcaaaggagtgcctttaagaaagcctcacaatttagatcaactacctcataacatccaagcatttactttgccactacttgtaaactgaaagctgccattcagaaaccattttcttgttccttttgtaacatcaaatccaagatactgtttcccatagagatggcatgtttttgagctttgaaagttttataatcctgataaagcttggcccatttgaatgtctgacgttttagcattcctgtcagggccatttgaagttaacagggacacttatgtaactgtccgaaatttaagctggcaatgtcttgacagattaaacaggtagggagcctgaagaccagtagttttcaagtcttttaatggagaaacctattcttcaagtgtaatcttatgtgaaactttaggatgtacaggttcctctggttgaagctggaatgggataaagtttacccagcaacggcctcataactagggtactttttgaaaactggtgttgacaaaaagttctatcccaagggcaggtaacttttgaaactgattttcccagattataccaagccacacaacttatttgagctctattttctgattcaggtagattgcttctaaatctgcagtaatggtgataggaactaaagacggtaagatttctttttttttttttttttttgagacagagtctcttgctctgtcacccaggctggagttcagtagtgcgatcttggctcactgcagcctcagcctcctgggctcaagtgattctcccacctcagcctcccaagcagctgggattacaggcacaggccaccatgcctggatgatttttcaattttttgtaaagatgggatctcactgttgcccaggctggtcttaaactcctgggctcaagcaatcctcccgccttggcctcctaaaggctaggattacgtgtgccattctctcccagtgctgggattacaggatgagccaccttgcctggcgaaatgttaagatttcttaggagttattgcctcagtgcagtagctcttaataattaagggcttataccctgtggtggtcaagaatgtagtggttttcttttgtcttttgaaggtaagtttgtctcctatagaattttgttaatctgactttctgtgtgcacactgcagggaagattaatgatgcctacaaatgtttttgctcagagctgttctagttggatggttaagaggcactgctctgcagtcaagctctgagggatcacacttgcagaggaagatttaggcagataggacttagggagactatttggaaactagaaatgagtttaaaagtaaagagaggccaggcgcagtggctcacgcctgtaatcccagcactttgggaggccaaggcgggtggatcacctgaggccaggagttcaagaccagcctggccaccatggtgaaaccctgtctctactaaaaataaaaaattagctgggcgcggtggtgtatgcttataatcctagctacccgggaggctgaagcaggagaattgcttggacccaggaggcggaggctgcaatcagctgagatcacgccactacactccagcctgagcagcaagagtgaaactctggtctcaaaaaaaaaaaaaaaaaaaaaaaaaattagcctgaggtgggaagatggcttgaggccgggaggcagagaatgcagtgaactaagatggcagcaccactgcactccagcctgggccatagagccagaccttgtctcaaaacaagtaagtgtaaaaataaagagaaaataattcaaaatggaaagctgaaggacaaaagggcaagggcattgcctcatgaataggaggaagtgatacgtgtgaaacttggtgagattattgacaatctcacatttgaacacgggagtcatcagaaggactttgccttgctcttccttgccatacttcacccttgccttggtgttttctggagggtcctgatgtttcttcctctgcccaatacaaaggggagtctagtgattcaagaacttaagagcacagagaggtgaacagtaactcgtagcagaggcactcaggaatcctgtgcacacacagatgaacatcatgggttacaaatgaagtcttttggtcaaaattaactttatttttcaacttcatagggatgtgataacaaaattggcacacacaaaaagaatactgatattgggcctgatttaaaaaatgcctctggccaggttgtaaaaaagtgaaagtaacaaagataaacatagaagttggagttgtaaaaaagtgagttggaattcatgctgccatgatctacttgaccagaggcagcttttcctctctaagcctattttatatctgtcagtggatttgagatcactcattttaccattgtaacattccgagccttttgtcactgtgtgtccctttgtggccatgtaagagaccacactgctgtaggctgagaaggccacagtggttcaggtgctttgaggacttggtcttggctcaatagagcctcactggtgtttgctcagattgggcagcctatgcccaaagctacttggctaaacaggctggtgacaccacacccaaaaggtggcaaagaataggaataggaaggatcagcacctattttggagtgaggaagccaatggaggtacaactcctcaattctaagtttttgttgttttttttttttttgagacagggtcttgttctatcaccccaggctggagtgcagtggtgtgatctcagctcgctgcaggcttgacctcctgggcccaagtgatcctcctgcctggacctcccaaaagtgttgggattacaggcatgagccactgcatccagcttgcttctaattttcctacccaggctgttttaaacctagttctccagctaagtaaaatgtgcccaaatggaaaacatctaaatcttctgcagcccattcttcctgtgtctttgtgttgacaaacctctaatcttccatgtctttgtgttgacaaacctaaccttccatgtctttttgttgacaaacctctaaccttccatgtctttgtgttgacaaacctctccatgggtggtgcatctgaccctatcccaacatgccttaggacgctcatctccttgactgtctgccatcccctcccaaaactaagtggaggctctgtcttttcctcctagtttgaggttctcttctcccagtgtctaaaatgatcaatatgcctagagtagatgctgctgaagaggcaaagtagtaatcctgccacctggaagcaaaggctgtgggttggagggggaagcgggtgtgagggctgatgataagccctaggaggctcctgagtcatattcctatgtttgctctctggagagatgggctaaactgtttatcttttaaaaaccagatgattaaaaagttacattttagtattatactgataggaatataggataatctcttctaaagcctatttggtttccagaagagttagatacttgaacaagagtggacagagtaagatacctagctacagcaatagaaatcacaaactgttctgtggttttaatcttcctatttctgatttagaagtatgaagtgatcatatttaatctttctgctcctgctcaaaaataattctataacatcatttaggttatagaaagtttctacttatagcccttacattctttatgaccgaaatctgtgtctttcctcatgactgataattatctcccaatttggtcacttctgctaattgctattttattaaacttgaaattttaggttgggaagcaaagggaaaccactgggcatcccctttgtttctagggagaaaagactaacttgtcccatctgctcacttgcttatggagctaaaagacccccagtcctagaagtgttctgttcctgaggagtggttaaagaggtgaaaagaagaggtgaattaaaagatgaaagagctttttaaatagccagcaactctctctaccatctgttttggtaagagctagcacctcttgttctctttagaccctggagggaataaaccaaaatcagtggttccaggatccttcagagccaaaagaccccaataccacagtcttgacctttgccctgcctgcttctgaaactggagaatggcatctcccagcagcctaaggcagacataggtcatacctatccctgggcagcgagctgagctcccacagactgagttgtgctggatctcagaattctaagcattaatgtttccttgctgttataattcttgctcatcaggttcaactgccttatccctctgaggtttgcaaatgaggatggagaagccactgagaaatggaccagtgagctgagctcaccttttatatgagtggattttttttttttttttgaaatggagtcttgctctgtcgcccaggctggagtacaatggcgtgatctcagctcactgcaacctccacctccccggttcaagcgattctcctgcctcagcctcctgggtagctgggattacaggcgcgtgccaccacgcccggcatgagtggaattttagtgttaaatctcttcctgactctgggttcagtaggtccctcctcttctgttaccctcctggttctctctgttcaccaactacctgcatgtgccaaactagaaaaaggaaataatttacacccctgccccaacagctccttccctcctagggacttctgtgtccaccccccactttgggtcttagaactgtggctagaagataaaagggaggagtttgagtcagaggctttatgtccccaaacccaaccccctctgagtattaaactatagtggcattgtccctcaagctcccctctgccttggctccagagtcttcctcctcttcttccagactgggcagggtggctgttgttattggtgaagataggcatctagccagagctgccctgactcctttagtgagctgcagggacaaaatgggggcagacagtgagggagacaagcagagttgaacccaccggagatggagcagtgaggttaaggccttcttccatctggaggttttcctcccctctactttagagaaagctagcttgggccatggtactgaggggaaccccaatgagggcaaaggcctgacctggccacaggtccaataaagaatcctgcctttgccatggtgaactccatcccacacgactgggaacaccttctgttcactccccaccctacatgtcatcatttccattgccctgccctcttccctccctactagccatcttcctggtctcagatactcactggatgatgtcggcgaaggctgacagcaggggcttggactggtactctatgccatgcttggcacacaaggactgcaccaggggagccactttgtggtaattgtgtcgaggcatcgtgggaaaaagactttagggagaacgggggagtcagtggttcctgcttctctgctcccacctgtacccaacacttacaccctccccaggaccctgcttccccaggctccctactcactggtgctcaatctggaagttgaggtgtccactgaaccagtcattgaaggcagacttgtggacattgcatgtggcctggagctggcggaaaaggtcaggggagagcatgttgaatatcagatggaaaggccagcccagcattctccaggtaaagctggctgaggaagggacatgagactgtcttggtcactcccttcacatggttgcagaacaagagcctcaggc

SEQ ID NO: 96019 - DNA, 31085 bp, Homo sapiens
agactaaaaatgttattacctgatccactaattacacatgtagaatttatcctaagaaaatgttcagaaatagaaaccaatatctatatacaaaaatatccatcgcaacatttatacaagcgaaacttctacacaaatgtccaacaatagggaaaaagttaagtatattgggagtatatatatgtgtgtttatagatatatgatgacttactatagtgaagtaaatattctcattataaaattttaagcttagcttttttgttttattttaaagagagatcatttgtactggaaagttacattaaaggcccagcaaaatgcttacaacaacgcctagaggactccagacccattccccgggcaatctgaagatctgggacctacctacccaggcctcccttctcccacttaatagaggcaggtctgagggcctgggaggaagaaggcaccgcagagaagcaaggacaacagccttctcctctttgaaccagggtggccttataccaaaacatttattgaactcactgctaaggaactcatgtagagaggaactaaaagttataaataagttctggggtaaattctagccccaaatatactaaatttcatgtgtggcttcagctctttggatctgtcaccttgtctataaaacagtgggtttaatatatctgtccctaaggcatctatattctatacaatgataagaagactgggccgggcgcggtggctcacgcctgtaatcccagcactttgggagtctgaggcgggtggatcaccaagtcaggagatggagaccatcctggctaacatggtgaaactttgtctctactgaaaatacaaaaaattagccaggcgtggtggcagacgcctgtagtcccagctactcaggaggctgaggcaggagaatggcgtgagccctggaggcggaggttgcagtgagccaagacagcaccactgcactccagcctgggtgacagagcgagactctgtctcaaaaaaaaaaaaaagactgcattaaggaaatcccgtgaattcctccatgagcctgcctctgccccatcccaatctcccacactcttagaatgcagcaaaatgagagtcctgtttctagctctcgctctgcctctaatagaggtatgattgggattctccctttagtttaagcactatatgtcataaattatttttaatattacttaacattaatctgcagaattattacagatgacttttcttaaaacaaagactgattctgtcaactttattagtgcctactgtgttgtagtcactgcacccccataagttatccaatttcacagaaatccagatttttcaaaaatggttttggtctttaatggcctgaagggctgctactgaggggaggctgcagcagaggctgagcacaaccggtattgcttctcctatatgtgttgactttgtaaaggatccaggctattggccaactattatgtttaggatcttttgttaaaatggatcaaaatttgaactcacaattcaggttattccaacagccactggcagttaggttattcaattatggcttcattacaatcggcattaaggtctttttttttcttttctttagagagaaaatggtgggacagttaggaaggggtctcactatgttgtctaggctggtctccaactcctgagctcaagtaatcctcccacctcagcctcccaaagcactgggattataggcacgagtcactgtgcctggcctggcattagggtcttaagctcatttcgttctgttccttgaggattaatttggccagaacagttagtattcacaagtggcaacctaaaattaagtatgtgattcatatccaggatgaggcaagttcccttaggatcaacagggcctgcaaggcaaaggtttcctttagttgacctggatatgggtttattgcagtctgtgtgaccacctgtgtaggtgggtaaggagatgagagggcaacacgacatttgcctagtggcctataggcttactcacctgtattttttcaggttgaaatcatcagttgattcagcaaattttttatttatttatttatttagagacagagtctggctctgtcacccaggctggagtgcagtggtgcaatctcggctcactgcaacctytgcctcctgggttcaagcgattctcctgcctcacccccacaaagtagctgggattacaggcaccccccaccacacccggctaatttttgtattttagtagagacagggtttcaccgtgttggccaagtgggtctggagctcctgacctcaggtgatccgccctcctcaccctcccaaagtgcagggattacaggcatgagctgccacgcccggccaattcagcaaatttatgtgggattccacctagaactccaaaccaaggtgctctgaatatgtattggtagtataaacagaatccacagccctatcctggattataagctcgttagggaggtagcaaaatacatgacactgacctaagaacacatgaaaagcaaagaaacatgaatgcaaagtcatgtcatataagctgtttaaatcctgagtaagatgaatttaatttgcatctatcctactgacctataatccgtgactcacttgtctctctcctccagtagacatgactaggcatgacccatatagtactgaactttgtattcccagcaccttaccaaagtaggtgctgggaatacaaagaggagacaccccacaaatgttaaataaaacacttaatgaatggttctaggtaggtggggttgatcaaggaattatcttacaagtggtatgggttttttggttttttctgaggtgcagtctcaccatgttgcccaggtgattctcctgactcagcctcccaagtagctgggattacaggcactaatttttgtattttagtagagacagagtttcaccatgttggccaggtgggtctcgagctcctggcctcaggtggtccacctgcctctgcctcccaaagtgctgggattacaggtgtgagccaccgcgcccaacctagtctttttatagaacagttatctctgtagccaaacttacatcatattatttaattttccttgattcgggggaggggggagggatagcattaggagatatacctaatgctaaatgacgagttaatgggtgcagcacaccaacatggcacatgtatacatatgtaacaaacctccatgttgtgcatatgtaccttaaaacttaaagtataataaaataaaagatttacataaaacatttttccttgattctgtattaaaggaaagatgacattattttcaatgtctgcaaaatatttcactgatgggcatttagagtgtttccatttcccgctatcatagatactgctttaatgaatattttttgtttataaatagttttctttttttgtgtgtggatatagaatcttgctttgttgcccaggctggagtgcagtggcacaatctcggctcactgcaacctctgcctcccggattcaagcaattctcctgcctcagcctcccgagtagctgggactacaggcgcacgccgccacgcccagccgatttcttttgttcaggctggtcttgaactcctgagctcaggcaatccgcctgcctcgacctcccaaagtgctaggattataggcgtgaggcaccccgcctgacctataaatatttttctaagaacatttccttaggctatattcctaaacatggaattattgggaacatttttatttttctattttttttcatctcttcagtattcaaaacattcctaaattctggccgggtgcggtggctcacgcctgtaatcccagcactttgggaggccgaggcgggcagatcacgaggtcaggagatcaaagccatcctggctaacatggtgaaaccccaactctactaaaaatacaaaaacaaaattagctgggcgtggtggcgggcacctgtagtcccagctacttgggaggctaaggcaggagaatgccatgaacctgggaggtggagcttgcagcaagctgagatcaggccactgcactccagcctgggcgacagagcgagactccatctcaaaaaaaaaaaaaatcttaaatttctatataagttgtcaaactattttttccagtttaatcaacttacacttctaccagcagtatgagagcttttatcccactgcacagtcacataggaaaaatggtttatgtaaaggacctctcttctgttatttaatacccatgaatttcttatatagttgtaatcagcgaacccatactactttgggttctgcttatttcacggggaaggattctatatctatcaatatagttcacattctagccatttaaaatcattctttaattcttcattgtgttaacagatcccaataagcttggcgattttcttattgtcaggactcgggtttatttccagtttttgctattaaattggctatttctgcatctttgcacagtctcccctactttaccaagagtgaaactgcttgatcaaagaatagaaaatgttttgtagctcgcattagacactgccaagttgttgggcaaggtttttaaaaaaggaatattggctgtacagaggtgcagctgtgtggaccatcattcctgagcagggtccaatagcctggcatcttacctggaagtcaggacatctaaacttccctatgggaacttggtaagccccttccccatttcgaacctcaattttcttatctataaaatgaagaatttggatggaatgaattaatccttttctaccagaaatctagccatatttcacctagtctattctgtatcaccctctcctgactcctacgtgctcagaatctagctcagtgcttgggacagttatgtttcctttccctttgaagtgcccaaataccagtgtaatgagaaatatggcagagcctgagagttcagagcacaggccagggtcaaatctcagccctccacttacaagctgtgtgacaaaataacctcccccgggctcagtttcttcactgtaaattaggttaattgttccaacctcatagggttgttaggagaattaaatgagttaaggtttgcaaaacgctaagaacagtgcctggcacacagtaagtgctttataaagtgtttgttgaataaataaaattttggacctaaactctgggtctcttcaggactgcaacagctttgtaactggcaaccccacttttaggtgcgttcccactcctctaaaacccagagatctaaatgccaaatctctctgcttaaaaagtctcccagggctcctaggcgcctccaggctagaacagaaatgcctcagcttgaagacccaggcttttcaggtgaaacacctaagggtcaggagacgctaggatcatcactcaaggatcccagtgaatttttccaaaatacaataaaaataaaaacaaaaagaggcaaacagggttataaaaattgtggggcattttaaatgtttcattgaacaaattaaagcattaacagccctcccccaaccaccaccaagcccaagagaccgtaaatatgctgttcacaagataactgcaactttcaagggctctcaggctgctacttcgggcagcacaattggcggcacgacgtggcaagcaggcagtagtttccaaccctggagggtcagcgtctggagaccccggccaaggcatccacagcctaaagatgatgtccgcgaccgcccgggcagcctcgtgcacggaaaaacctcaaccccggccccgcccacccttcctgcggccaccccgcagccctggcccctcagtccatccactcctgcagcgcggccccgcacccagggcctgcactagaaccgctgttcctaccgcggcgccccctgggagccaacgccgcgatgcccgcctgacgtcaggaagtcgaatccggcggcgacgcctttagggagcccgcgagggggcgcgtgttggcagcccagctgtgagttgcccaagacccaccgggggacgggatctcgctccccgcgccacgaggctcggccaatgggaacgcgcgctgcgaggcccgccggtctgccctgcggtgctgaaaacccggcgcgcaggcggctggctctgggcgcgcgccagcaaatccactcctggagcccgcggaccccgagcacgcgcctgacagcccctgctggcccggcgcgcggcgtcgccaggccagctatggcccccgacccggtggccgccgagaccgcggctcagggacctaccccgcgctacttcacctgggacgaggtggcccagcgctcagggtgcgaggagcggtggctagtgatcgaccgtaaggtgtacaacatcagcgagttcacccgccggcatccagggggctcccgggtcatcagccactacgccgggcaggatgccacggtgagcgcagccaggcgggggcacaggagagggcgggaccggaggctgagtgcaggggagacagagttacgcactccgagccaaacaccgactaattcggaggaaagcccggaggcgcctgatcatacctgttgcccggtgattgggtgtcctgcggatgcgggatgaaaaggcgggagagaggcctggagaagtggagtctggggagtggggatggaggccaacaacacgcacacacaaacaaagggtcccgcctccctgccgtgcattccatctgcagccccgagcctcaggtctctgggcggggacagaaccccgagctgggtaggctaggagggaggagagcaaggatgcaggccgcctggggagggagggggtcagtggccaggggagggagtcacatcctgtctcgatggctaggagaggcagcgcagccgcgtctggacctaggtgccggtctccactcgccagcaggagcggagagggagcaggaaaggagcccattctcgaggatggggctgaaacgggaagcttggggagaccgctgccttggggacccctgcgtcgtgtgaagactggaggacgcggaagggacagcgctggccggggagggcaagcggccgctggcgtacataagggattgggaatggcatacacttagcgaggacccccagagctgttctcgaatcgccggggaggccactgagccgcaggccagcgaggtcttcagctattccgcggagcggaccgctgtttacgctctggggcggtaggcccttcgcggggtcctgtcccttcttcccttggtctcactgcggggtcggcgcgcgccccagccccaggcctgctgcttccctttctagaccacagccctcagagctaaggccccggcgcctctctgctgggttggagtcctggggactcagtcctagggactcgaaagtcggggcgttcccttcaccgcgtttcccccttggcggccagaatggcgtcccctccccttgcatccccctctgatcccgtgccctgcagcgtgatgccctccactgtccctatccactaccctggcgtcccagagtgtgccgcgggtcaccaggttcccataacgtcgcagcagagcttagacgctgcggggcgaagacccgccccaccctctgacgcgaccagcctagtgggcgaggccagagcttgcgcgggtcaaccagagtgaccactcgggagccctgactgcggccaagggcgcaggcgtgtcccggcgcatgcgcagacgaaacaggcaccaacgctggagcttcccgcagtgtgatttggggccgggratgccgcggcggggacggcgattggtccgtatgtgtggtgccaccggccgccggctccgccccggcccccgccccacacgccgcatcacttacagggcccggggctgccggacctgccaacgtgaatcttatcgccatggaccttaccttgcacaacccaaagtagctgccttggggcagggggtggccagagtgcttagggaaatgtggagccctacccagaacaacggtggagggaaagggaagaaacgcagaagtgccccagttcggacgtagggaagtcttcctcttcgtggtttttggagaaccctagctaagagaggaaagggacttattgaaagacccgcaagaagggacggaagtctcatagccctgagaggtgaagccagctggagttgatgggtcgaatggggacctagagaacttttctgtatctagaggtttgtaaaatgcaccaatcagtgctctgtaaaaacgcaccaattggcgctctgtagctagctagaggtttgtaaaatgagccaatcagcaggacgtgggcagggacaactaagacaataaaagctggccaccccagccagctgctgcaacccgctccagttcccttacaggctgtggaagcattgttcttttgctcgtcacactaaaccttgctgctgctcattctttgggtctgcaaagagtgttattcctttaagagctataacagcgggaaggtccacggctccattcttgaagtcagtgagaccatacccgccggaaggaaccaacgcccgacacagccccacccatctctcctgtttctcacctatactgaaattcttgggcaaaagctgtctgtggacacacccaggggaaaggccagcccaggcaggtgtttcttagtggttcccctcagccaatgcttcccattccttgatgcatccttctaactagagcagatrctcggtgatcttaaactgtggacacctgggagcaccctcaaaaggcagctgggcctagggagatggcctgtgcttctgtgtcaggagttggttccttcaggtgggctygtggtctcgctgacgtcaagaatgaagccatgaaccttcgcggtgagtgttacagctcttacaggtggcgtggacccaaagagtgagcagcagcaagatttattgtgaagagcaaagaacaaagcttccacagcgtggaagggtacccgagcaggttgccgctgctggacgttggggggtgtgagggggagcagcctttttttttytttttttttttgagacggagtctccctgtcgcccaggctggagtgcagtggcgcgatctcggctcactgcaggctccgcccycccccggggttcacgccattctcctgcctcagcctcccgagtagctgggactacaggcgcccgctacctcgcccggctaattttttgtatttttagtagagacggggtttcactgtgttagccaggatggtctcgatctcctgacctcgtgatccacccgccttggcctcccaaagtgctgggattacaggcgtgagccaccgcgcccggccgggagcagcttttattcccttatttgtccctgcccatgtcctgctgatttgtccattttatagagcactgattggtccattttacagggtgctgattggtccattttacctctagctagctaaagagcacggattggtgcattttacaaacctctagctacagaaaagttctccaagtctgcactcgacccaggaagtccatctggcttcacctctcacttcaacttgggtacagccttctggcgggcaggaggatggcctttggtgcgaacactgccggagtccagggggctggctccctcacctttcatcttctcccggcacttgcaggatccctttgtggccttccacatcaacaagggccttgtgaagaagtatatgaactctctcctgattggagaactgtctccagagcagcccagctttgagcccaccaagaatgtaagaccctgtgtttgctatgtcgcaactattggttgttgagggggacagagagggggtggaaggagagtctagatggratcacagtcatagtaatcacagtcagtagtagctctggggagtcttgaggtccctgcttctcttgcatagtcatgaggtcacaggcccaagggagcatggctttgcaacctatggctcccccaaggctgccactaccatggctgccatcattgttatcatcattgttatcatatgagcacttactatgcaccaagcataaactcataactcttacacatttacagatgagataacaggctcagggaggttaagcaacacagccaaggatcacacagttagtaaatggcagagcaaggacttagtcccctgaactcttaggcactatcccatggcacctcctcctgtcatcctcattgtcgtggtatctttgcctaggactgtggacttcccacagctacctcagtgggaggtccttgagcctgagagggcccttgtctccagtagcattggggtgcagatgagaagaataacagctcctcttcctcttctgcagaaagagctgacagatgagttccgggagctgcgggccacagtggagcggatggggctcatgaaggccaaccatgtcttcttcctgctgtacctgctgcacatcttgctgctggatggtgcagcctggctcaccctttgggtctttgggacgtcctttttgcccttcctcctctgtgcggtgctgctcagtgcagttcaggtgagagcctttggcttgtcaagtgcacagcaatgctcagcatccctggggaaagctccttgggtgtttgaggaaggccaagagtgcctgccctccaagcagggcagatctgaaggtatgcaggagtgagtgcaggaacatgcattctgctgtcttgacctgtctgctctttagccacatggrcatcttcatttctctcactgcctttttagctgcttctccaagggttctcttcttcctatgcggtttgttctctgccacagcccacctgtgccaggagccaagtttctggtttcttagcaaagcttggctccctccccaccactgacattgcccaatatgttaataatgattgagcgctaattcttgactgtcaggacccatttggcaagccttctgctcatgtttcagtcctttctgtattctagatgtcagtccatcataagtcatgagcttcaggccaggtgtggtgactcatgyctgtaatcctagcactttgggaggccaaggtggccggatcacttgatctcagttcaagaccagcctggccaacgtggtgaaacctctactaaaaatacaaaaaggccaggcacagtggctcacgcctgtaataccagtaccttgggaggccaagatgggcagatcatttgaggtgaggagttcaagaccacctggccaacatggtgaaaccccgtctctattaaaatacaacagttagctgggagtggtggtgggtgcctgtaatcccagctacatgggaggctgaggcaggagaattgcttgaacctgggaagcgaaggttgcagtgagccgagttggcaccattgcactccagcctgggcaacagagcgacactctcaaaacaggccaggtatggtggctcacgcctgttatcccagcagtttgggaggccaaggtgggcagatcacctgaggtcaggagttcgagaccagcctggctaacatggtgaaacctcgactcttactaaaaatacaaaaaaatcagccaggcttggtggcgggcacctgtaatcccagctacttgggaggctgaggcaggagaattacttgaacccaggaggcggaggttgcagtgatctgaaaccgcaccattgcactccagcctgggcaacaagaacaaaactgtctcaaaaaaaaaaagtcatgagcttcggagctggcgaaacagaagaacagagaagggatggtgatttgccccaactcacgtgtgagtcagtggcagaggcagaactaggacccatgtttcctgactcctgaggtgcatcacaggccttggcagatgaaggaagtgggagaggctgaaggaggcatcgaggtcagtgaaggcgacactggggctggtgggctgctctcagtgttgactcttctcacctaggcccaggctggctggctgcagcatgactttgggcacctgtcggtcttcagcacctcaaagtggaaccatctgctacatcattttgtgattggccacctgaaggtcagtgggatggggaggagctctctaaaactccaggcaatgaagggctgccttgggggaagcttttcatactcgtgtccctgcttttctgtagggggcccccgccagttggtggaaccacatgcacttccagcaccatgccaagcccaactgcttccgcaaagacccagacatcaacatgcatcccttcttctttgccttggggaagatcctctctgtggaggtgcgtggaggtatcagtggaaaggtcttggggaataggaggcagccaacataggggagttggggaagatgcccacgatgttgtcagtgtgggcaagacactggggctgggctggctggggcttttgccattttggaagttctggaaggcaacaggcaatagatgggggctgcccaggagggagtcaccatcctccctagagagttcagtcagcaaaccgttactgcataaaaggcacctcattttgcaaaggatccagcggatgaccagaaggatccaaatgatgagatagcctatccttgaaggtgctgatggcacctcctggaggtgcttttttgacactcttgccccaggcaagtattccccttgcactttgtatttctctcccacacttaggtatccttcttgtcacagtcttctctgtccagggctggactgtcttactcttctttcatgtccaatatctggaacattcattcactgagtacttcttcccaccctgctgatccccagcctgatttcctgggtggtcagcgttgggtttgagatgtcgtctgaagttgtaagcagaaataatgtagctgctgaaggaataatgcctgggggtggagatctggtgagcttttagtgagcattaggcaatggaaggttctaaaaggccagcagaattctttgaaaagttcatttaaagccctttgtcccaaggctgtaggctgcagagttcttccaggtccacctcctccactttgtgacatttcagcttgcgaggaattaaattgtcgttaaaacacatttcagttctaggcatgagttcaaggtagcctggcgttcctctcgcccctggccatgagaactttgaaagggctttggcagcactggttggcctggcatgaggagctcatagcttgaggctcatgccccacctgtccataatgttcttattttcccatcatgagcatggacttgggtttgttacatgtccgataccattatggtcagtactatgcagatgacgaagcagccctgtcccccgtctgactcccatggctgcttcaagggcagtgtggttatttgctgggcagtggcatggggcttgtgcatttctactgtcactacagagggtttaaaaaaaagacatgggcaggttaagtggaagggaacagtctcacaccactacctttattgcttcttggtacttgggttttcaggaaattcctatcagcagacatcaaaaacagagaatgaagggacgcagttggcatgtgcctgtggtcccagctacttgggaggctgaggtgggagcatcgcttgagcccaggaggtgaaggctgcagtgagtatgatcacgccactgcactccagcctgggtaacagcgcaaccctgtgtgtaaaaataataattttttaaaaagattaaaaccaaaaaaaaattgtaaacagagttcaacgtaacttacagattaaaaacagtaaaatatgacagaaactgagaggtagtcatgatcagatatggcctccttcgggtgccgacatctgaactgagacctgaatgatgaaaagggccaacactgcaaaaattcagggaaggaacatttggaacagagagaacagtcaagtacagaggctcccggatgttcagggacagtaagcaatgagagaatgagaagaccagaaaactagggaggggccagatcatgtagggccttagaaagccatggtaagggtgtggtaagaagtttgggttttattccaatagcaatggggagtcacaggagggtttctggtgggtacagcaatctgctttgcactttaaaaggcttgctctggctggaggtggagaggatgaattatagagggtaggtataatcacagatataacctcagtgaggcggctggagcgagtccagaccagaccacggaggagcaggtgaagccaatggatttgggatatgttttggaggcagtgtaagcaacgcttgctgaggacctggatgtggtggtgagaatcaccccatctcgagcaacattaactgaggaaaaaattgaaaaaggggcgcccttgcttgggggcttcctattgtggaactgttatggaaaggagccccatccattgcttcctccttgaatggcaaatgcctttatgatccctataacttgtcccattatgtttagacccttggtggtcagaagggttctatttagggcagtgtcccctgcccctccttgtcctccaaaaattttgggaggcactgacgtggatgtcatggggtcagcacaggcatcaacatccccagagggatggaaccaagcagcctattgcccaggcattcactaacaggcagcccatcctcagcctcatagctggccggggagaagaaaggctattttgggtcccagatctttttttttttttttgagacagagtctcgctctgtcacccaggctgaagtgcaatggtgcggtctcagctcactacaacctccgcctcccgagttcaagagattctcctgcctcagcctcctgagtagctgggactacaggtgcgtaccaccaagcctggctaatttttgtgcttttagtagggacgtggtttcaccatgttgcccaggttggtctcaaactcctgggctcatgcagtccgcctacctcagcctcccaaagtgctgggattacaggcatgagccactgcacccggtctctgtttacaaatttatcaccagcttcatcccctaaggttataagctccatgagggtgggaagtctgtattgttcacctctgtatcctaagcatctagaacatagcccggcacacagtaggtgctgaagaacttgaatctgttaatgtagaaaggatgtttcatctagctgaagtgtcttgtacagaataaactctcaataaatgaactgtggacacatggaagggtgagctagagctctgctcaggggttgagtgctcctcttgtgcccttgtggttgtctggttacctgaactaattggagtgcgatgcagacatagtcatggagtgagacagcagaactttgctgtcttgtttgtgagcccacahcaggggttctagactggctggttgacatggtggccccagcctgtctcttcagcagctcggcttataaaaaataaccaccacctactggggaaaactgctggaaccttcagattgccaaattgttcttggtgtcttttccagaaatatttgccaaactcraattagccttcaggagatttgataaagctcatgtttaagtcaagagaccaaaagattttgatggggagaattaggggctggatatagagggaatacttaacctgtataggggcagatatggttgtccatggagattctggtgtgaaaaagtacgatggcggccgggcgcactgcctcacacctgtaatcccagcactctgggaggctgaggtgggtggatcacctgaggttgggagttcaagaccagcctgaacaacatggagaaaccccatctctactaaaaatacaaaattagctgggcgtggaggcacatgcctgtaatcctagctacttgggaggctgaggcaggagaatcgcttgaacccagggaggcagaagttgtggtaagccaagatcgtgccattgcactccagcctgggcaacaagagcgagactccgtctaaaaaataaacaaaaaagtacgatgggagaaaggggagagggcagtggggcctggaaacctcatgacaaagagaatgaacacaagagggcctgtggtcctgtagactctgtgctgtgcacatccctcatgtgagcatgggccatccagctgcaggccatggtgtgacacactctgcagattacagtctagggcttcatgttccatgtgctggaggtaaggctgggcctcttggagctttccaatagcaccaacaagctgtcagccctggaggaggcctaaacctccaagcaaggaaaggtcaagtcacagagggaggaatcactggtctccgaatgctcatgtgtttgcttttcttcacagcttgggaaacagaagaaaaaatatatgccgtacaaccaccagcacaaatacttcttcctaagtgagtgtccccatccaacacaggggagctgcctcaggagggaatgctgagggaatgaggaggatgtggctgtccaagggattatggtattttaaggaaaggggctagaggaagtaccccactcccacccccagttactccctgcatgacagcagtttgccatctcagctgagcgaagtgaagttaggctgatgattggttgaaggcaaactagttcttcccatccaaccccagtttccactgggaagctgggtgtttggggtgtagaggggcctcttgctttatcctcaaccttatctttttttttttttttttgagacggagtcttgctctgtcgcccaggccggactgcggactgcagtggcgcaatctcggctcactgcaagctctccgcttcccgggttcacgccattctcctgcctcagcctcccgagtagctgggattacaggcrcccgccaccgcgcccggctaattttttgtatttttagtagagacggggtttcaccttgttagccaggatggtctcgatctcctgacctcatgatccacccgcctcggcctcccaaagtgctgggattacaggcgtgagccaccrcgcccrgcccctcaaccttatcttaaactttgtcaagatgggccaaggtaacctggtagagcccagtccaacccccagaggaacaaaggtacagatagttctggaaggatgggtcctgaggagagaatggaagagctgttagaacgaagaagatctttctgatgactgccacatattcccagctttaaaagtctgtcccagctactaaggaaactgaggtgggaccatcctttgagcccaggaatttggggctgcagtaagctccgattgtgccactgcactccagcctgggcaacagagtgagatcttgtttcttaaaacaacaacaactctgctccataatgcctaaaatgagctttaaacgcctttaaattttcaaattttttaaagaaggaagggaaggagtccactgatcttattttagtttgaaggaattcatcctaactgcctatcaccaactatcacgaatagagaaaggcgatggggcagaagggtagagcagagacctctggaagaaatagttttagaatccatggcacatcaagatggaggagccatgggtgagcattgtcatgctaggagttatgggtagcatcaggtgccacagagaagggctacagaaaaggaaatgaggaagcatgtagaatgcaacacttcttcaactcccagttttctttcaagagaggcccctctgttccgtcccacagctgacctccagggcttcagattggggtggcacaagcccatctccctagtttaaggaagtgagcttcacagcctgtgaaggatccacagggtccctcccaacacacacacactttcctgctcctgccccttcacctgcatggtggagctgccaggaacaaagggcagatgactgtagggacagggctgtggccaaggtaagtaagagagtattagcacccttttaaaagtgtgggatccttggagtgtgtatgtagaaaagagaagaaaaatgaaaaataataaaggtgtgggagcagagcaagtcccatgcgtggggcctgagttcccaagcacctgtcactgaagagtgccactcgcacccctcaccttccctggcatcctcttgggagtttttgccttccccagacttggatttatgcccaccttcagtgcctgctggttccagtggattgcagagcactcaagcacctggaggggagacagaagggatggttggaagaggcagccccctgctagaggccatctctcccaacatcaactggccctttcatgaccttcctgtgctcatgcctcctctttgtctcggtttcctccccagttgggcccccagccttgctgcctctctacttccagtggtatattttctattttgttatccagcgaaagaagtgggtggtgagtatccatggcccaagaagcccacatccttgtctccagcacccagagtgggggataggggttccccaggggaaacttgagactgactctaggcctaatttagaacaaaataatagaaccagacacagatcctccttatctctaagtgggacgaaatgatttgagcttagcaggcagcctgattcccaatgtgtaatttcatgcggtcagtgtctccagaggttcttgtactgggcataatgccagggggctgagttgggaatggggaagatgaatgagagacaatacctactttcaaggaaacttctgatgaagcagaatgtggttattaatcagaaaagaggtacaggcaataggttctggggactccaaaaggggcctgactgcacctggctttgtgaagtcacttttctagctggccttgaggctgggcagggtttctgacaggcagaggtggagcaggggggatgaactctgagcagagaagctggaaatgaggggtaagtttgaccaccagacatattgtggaggactagtgtcaggggaagagtatggtgcttggttcagtgatgagagatttgatcagggcactggcatggactgagccatggtcctggcrgattcatttggcggcatgctgaaggatttagattggctaggaagagctagaggcaargagaccttgtaggccttggtacttttgaaggggacatgcaagaagggctggggggtgccaatgggaatggaagaaaggagcagtggcactagataytgcaggattggacccctgagaagctgaagatgastgagtctggataaccaggagaatggctgcaccatgcaaacaaagagctgctgagaggaagaggaagagttgttcgtgactgttatgctcgctgcttttctcactataggacttggcctggatgattaccttctacgtccgcttcttcctcacttatgtgccactattggggctgaaagccttcctgggccttttcttcatagtcaggtagtattcggtgggggcggatagggactggtgaaggaaatgttggggagtgaccagtctggtctaggggccgtgctggggctttgggtaacagtgggtgtttcaggagttggcttgggaaagtagacaggctggagcagttatctgaggggggaatcagaattctgggctctgtgtgtactgtttttgtctgtgtaatacatctaacaggttcctggaaagcaactggtttgtgtgggtgacacagatgaaccatattcccatgcacattgatcatgaccggaacatggactgggtttccacccaggtaagggacagtcactcagaagactggagcataacacaactattgaaaaggrtgcgtaggtgaaaacagcaaaaacaaaaagtcccccaaacagcattttctcattagcctgaggctcttgttctgcaaccatgtgaagggagtgaccaagacagtctcatgtcccttcctcagccagctttacctggagaatgctgggctggcctttccatctgatattcaacatgctctcccctgaccttttccgccagctccaggccacatgcaatgtccacaagtctgccttcaatgactggttcagtggacacctcaacttccagattgagcaccagtgagtagggagcctggggaagcagggtcctggggagggtgtaagtgttgggtacaggtgggagcagagaagcaggaaccactgactcccccgttctccctaaagtctttttcccacgatgcctcgacacaattaccacaaagtggctcccctggtgcagtccttgtgtgccaagcatggcatagagtaccagtccaagcccctgctgtcagccttcgccgacatcatccagtgagtatctgagaccaggaagatggctagtagggagggaagagggcagggcaatggaaatgatgacatgtagggtggggagtgaacagaaggtgttcccagtcgtgtgggatggagttcaccatggcaaaggcaggattctttattggacctgtggccaggtcaggcctttgccctcattggggttcccctcagtaccatggcccaagctagctttctctaaagtagaggggaggaaaacctccagatggaagaaggccttaacctcactgctccatctccggtgggttcaactctgcttgtctccctcactgtctgcccccattttgtccctgcagctcactaaaggagtcagggcagctctggctagatgcctatcttcaccaataacaacagccaccctgcccagtctggaagaagaggaggaagactctggagccaargcagaggggagcttgagggacaatgccactatagtttaatactcagagggggttgggtttggggacataaagcctctgactcaaactcctcccttttatcttctagccacagttctaagacccaaagtggggggtggacacagaagtccctaggagggaaggagctgttggggcaggggtgtaaattatttcctttttctagtttggcacatgcaggtagttggtgaacagagagaaccaggagggtaacagaagaggagggacctactgaacccagagtcaggaagagatttaacactaaaattccactcatgccgggcgtggtggcacgcgcctgtaatcccagctacccaggaggctgaggcaggagaatcgcttgaaccggggaggtggaggttgcagtgagctgagatcacgccattgtactccagcctgggcgacagagcaagactccatttcaaaaaaaaaaaaaaaatccactcatataaaaggtgagctcagctcactggtccatttctcagtgscttctccatcmtcatttgcaaacctcagagggataaggcagttgaacctgatgagcaagaattataacagcaaggaaacattaatgcttagaattctgagatccagcacaactcagtctgtgggagctcagctcgctgcccagggataggtatgacctatgtctgccttaggctgctgggagatgccattctccagtttcagaagcaggcagggcaaaggtcaagactgtggtattggggtcttttggctctgaaggatcctggaaccactgattttggtttattccctccagggtctaaagagaacaagaggtgctagctcttaccaaaacagatggtagagagagttgctggctatttaaaaagctctttcatcttttaattcacctcttcttttcacctctttaaccactcctcaggaacagaacacttctargactgggggtcttttagctccataagcaagtgagcagatgggacaagttagtcttttctccctagaaacaaaggggatgcccagtggtttccctttgcttyccaacctaaaatttcaagtttaataaaatagcaattagcagaagtgaccaaattgggagataattatcagtcatgaggaaagacacagatttcggtcataaagaatgtaagggctataagtagaaactttctataacctaaatgatgttatagaattatttttgagcaggagcagaaagattaaatatgatcacttcatacttctaaatcagaaataggaagattaaaaccacagaacagtttgtgatttctattgctgtagctaggtatcttactctgtccactcttgttcaagtatctaactcttctggaaaccaaataggctttagaagagattatcctatattcctatcagtataatactaaaatgtaactttttaatcatctggtttttaaaagataaacagtttagcccatctctccagagagcaaacataggaatatgactcaggagcctcctagggcttatcatcagccctcacacccgcttccccctccaacccacagcctttgcttccaggtggcaggattactactttgcctcttcagcagcatctactctaggcatattgatcattttagacactgggagaagagaacctcaaactaggaggaaaagacagagcctccacttagttttgggaggggatggcagacagtcaaggagatgagcgtcctaaggcatgttgggatagggtcagatgcaccacccatggagaggtttgtcaacacaaagacatggaaggttagaggtttgtcaacaaaaagacatggaaggttaggtttgtcaacacaaagacatggaagattagaggtttgtcaacacaaagayacaggaagaatgggctgcagaagatttagatgttttccatttgggcacattttacttagctggagaactaggtttaaaacagcctgggtaggaaaattagaagcaagctggatgcagtggctcatgcctgtaatcccaacacttttgggaggtccaggcaggaggatcacttgggcccaggagktcaagcctgcagcgagctgagatcacrccactgcactccagcctggggtgatrgarcaagacyctgtctcmaaaaaaaaaaaaacaacaaaaacttagaattgaggagttgtacctccattggcttcctcactccaaaataggtgctgatccttcctattcctattctttgccaccttttgggtgtggtgtcaccagcctgtttagccaagtagctttgggcataggctgcccaatctgagcaaacaccagtgaggctctattgagccaagaccaagtcctcaaagcacctgaaccactgtggccttctcagcctacagcagtgtggtctcttacatggccacaaagggacacacagtgacaaaaggctcggaatgttacaatggtaaaatgagtgatctcaaatccactgacagatataaaataggcttagagaggaaaagctgcctctggtcaagtagatcatggcagcatgaattccaactcacttttttacaactccaacttctatgtttatctttgttactttcacttttttacaacctggccagaggcattttttaaatcaggcccaatatcagtattctttttgtgtgtgccaattttgttatcacatcccyatgaagttgaaaaataaagttaattttgaccaaaagacttcatttgtaacccatgatgttcatctgtgtgtgcacaggattcctgagtgcctctgctacgagttactgttcacctctmtgkgctcttaagwtcttgaatcactagactcccctttgtattgggcagaggaagaaacatcasgaccctccagaaaacaccaaggcaagggtgaagtatggcaaggaagagcaaggcaaagtccttctgatgactcccgtgttcaaatgtgagattgtcaataatctcaccaagtttcacacgtatcacttcctcctattcatgaggcaatgcccttgcccttttgtccttcagctttccattttgaattattttctctttatttttacacttacttgttttgagacaaggtctggctctatggcccaggctggagtgcagtggtgctgccatcttagttcactgcattctctgcctcccggcctcaagccatcttcccacctcaggctaattttttttttttttttttttttttttgagaccagagtttcactcttgctgctcaggctggagtgtagtggcgtgatctcagctgattgcagcctccgcctcctgggtccaagcaattctcctgcttcagcctcccgggtagctaggattataagcatacaccaccgcgcccagctaattttttatttttagtagagacagggtttcaccatggtggccaggctggtcttgaactcctggcctcaggtgatccacccgccttggcctcccaaagtgctgggattacaggcgtgagccactgcgcctggcctctctttacttttaaactcatttctagtttccaaatagtctccctaagtcctatctgcctaaatcttcctctgcaagtgtgatccctcagagcttgactgcagagcagtgcctcttaaccatccaactagaacagctctgagcaaaaacatttgtaggcatcattaatcttccctgcagtgtgcacacagaaagtcagattaacaaaattctataggagacaaacttaccttcaaaagacaaaagaaaaccactacattcttgaccaccacagggtataagcccttaattattaagagctactgcactgaggcaataactcctaagaaatcttaacatttcgccaggcaaggtggctcatcctgtaatcccagcactgggagagaatggcacacgtratcctagcctttaggaggccaaggcgggaggattgcttgagcccaggagtttaagaccagcctgggcaacagtgagatcccatctttacaaaaaattgaaaaatcatccaggcatggtggcctgtgcctgtaatcccagctgcttgggaggctgaggtgggagaatcacttgagcccaggaggctgaggctgcagtgagccaagatcgcactactgaactccagcctgggtgacagagcaagagactctgtctcaaaaaaaaaaaaaaaaaaagaaatcttaccgtctttagttcctatcaccattactgcagatttagaagcaatctacctgaatcagaaaatagagctcaaataagttgtgtggctkggtataatctgggaaaatcagtttcaaaagttacctgccctkgggatagaactttttgtcaacaccagttttcaaaaagtaccctagttatgaggccgttgctgggtraactttatcccattccagcttcaaccagaggaacctgtacatcctaaagtttcacataagattacacttgaagaataggtttctccattaaaagacttgaaaactactggtcttcaggctccctacctgtttaatctgtcaagacattgccagcttaaatttcggacagttacataagtgtccctgttaacttcaaatggccctgacaggaatgctaaaacgtcagacattcaaatgggccaagctttatcaggattataaaactttcaaagctcaaaaacatgccatctctatgggaaacagtatcttggatttgatgttacaaaaggaacaagaaaatggtttctgaatggcagctttcagtttacaagtagtggcaaagtaaatgcttggatgttatgaggtagttgatctaaattgtgaggctttcttaaaggcactcctttgatctcatggagtgagagactagaaatctattcaacgtattaaaactcctctcccagcaaaataaaataaacaaaacatcctcctcctaatggctgaagttccatctagctgctatggccattttatggagcatggtgccatcttgtggccactctcaaaccacccattgttaatcaagtgcaattacagcatgttaagagtgaaaaggaaagctatttggagccatggtcacttgggatattttcaaatgttctcaaagaacatgacattttggttacttttagaattttattgacttttttcttcataactttaaaacaaaaacagcgcatgaaaaccagtgtcttattccaaagtctcaactcagctgattgccaggtgaacatcaccatcttactcctctgaataactagacacaaattacatagcaagttcgagtttctgcccacccaagacacagccagtaatcagtcacaaacacagacacagccaactccaggggctccagctttctgcccatcttctctcagcagttcctcccatctgctaagatgcgccttcctggtggctctctctcaaggtgggtcaaggctgaacaagacagaaaagcacagtctaggtccaccatcacctcccactggccaccagttggccagccaggaaatcatttctgtacatcttttgtatcccccttttatctccctctctcttctccaaaacttgttgctatctatcactttcatgtaacaatggacttagtgtccattaaactgcctgagaagtggtttgagcctgacatattttcctgagctaaaaaaggaaaagtacctctgtggccttcttgccattaagatcaagtaaaaaagggactagcactactgaaaagggtcacgctagaaaarccttagaatcctctctccaccccgtgaaggtttctctagctgtagctcttaagggtacaagacggcaaatattctggggtgaaggaggtataatggggaaacacatttattttccccttttaaacttccctgctgccccagtctttgccttcttcttagtggatcccttgggttctggmtccttgcgcttagctgaagagagtgagccggtcaccttgaagaaatcatccaggcggccctgggtgctgccttggcggctcttactcagcctcttgaccccactgcggattcgctcctcagagaactgcttttcaccacacatgaacttgatcagctcttcttcatttggctcgctccacttcagctccacagactctgggtccagcacctcaggttccaagaagagctggtgagcctccttgtggagccaattttctggcacagggtacttgttggggtcaagtcgccgcacgatctcctcgatgctcttgtgcttctggatgaggtccacagcccgcttgggcccaataccccggatactctcacagtagtcactgcctagcaggatgcacagatccacaaactgttcctggttcwggcccagctcctgcagaatccrgctcaggtggaattcctggattggcagctttttggcttcactggcagtcaggtgtygcattagcacagggctgccgaaggtgaggcagtccatgtcctcggtagccgcagcatagactttgccagccttcaccagggcagcacagctggcctctgcctcactgggtgcatcaagataagggatgcccatgaggctcagcagatgtttgcactcatcattgtgctgcttagtgaccttcaccagccgcttagtgaatttttccacctcctgctcggccccagcagcctgagcctgctgcagctgcttctctgcctcagcccgccgctcactgcgtttggccagctcgcctgacttgagctgtggcggcttgccatcaaagacatacacgggcttgatgccgttctccatcatgcgaatggtgcggtagaacatgcccatcaggtggctggtggtctcaccctcctcattctgcagcacatccccaccctggcgaacagcaatcaggaactgataaatgctcatagaggcatcaatggccaccttacggccaaagtagctcttgatgtcattctcccggatggcactgggggccacatcagcaattagtttggccaggccttgaattcccatggcaacacagaggagggatgactaaaaaagaaaggcaagtcagagacggaggaaaggagaaaggttataactggtgttatctcaccaacttcatgccttcaactaaattccacacaacaaaaaggacaccatgtcagcactgctaaagataaaaagatgaacaaggtccccattctcaaaaaactcagtctagcaggagaatttactcaatagtaaggctcaacgagtaccagaaattgaaccacgtgcttagagaaataagatactgttgatattctaaggtagcagcattatttattacacaaaaaaaacctgcaacataggtctccatcaaggaccacagaaggccaggatgcttggcctggcttgaggagtccagggaccataatggcagacctgaaagacaggcaaatacaccagctaaacaaacagatctgatttgttttgagtctctggagaaccctgactaataaggcagccttgaaaaaggattgcaaacatatctgaatggaggtgatgtggctttctcacaagcttctctaaactctcttcatcatcgcctcagcacataagagtttctacttttattataatgttgctagagtttcaagtctttccctttgcgttttctcgccaccactcagtctgaaatgttaactccatggctcctccccaggtcctgatttaggggtctggcatgctgtagtcactgggctcaaaagagtattgcacttcagagttcagtgtttcccagatagcagtgtttcccaaatcaccctcacgatttttgctacttccaactaaaacccgtactttcattcacttagaattttttttaaaaaactaaactggaaaactcataagcaataatatttgtgttctattagttatattttaatatgtattaaatgtataactattaaaaaggatttttagggggtgcaatttaaaatcatcttgccatcctggccaacacggtgaaaccctgtctctactaaaaatacaaaaaaaaaaaaaattagctgggtgtggtggtgtgcacctgtaatcccagctactcgggaggctgaggcaggagaatcgcttgaacccaggaggcagagaatgcagtgagccgagattgtgccgctgcactccagcctagcaagagagtgagactccgtctcaaaaaaataaaaaactcatcttgtgcccactgttggtatgtgtccaatactccaagaaatattctactggggccaggcacagaggctctgggcagtaatcccagcactttgggaggccgtggtgggaggatcacatgagcccaggagttccaggctacagtgagctatgattgtgccaccacactccagcctgggcaacagagcaagaccctgtcaagaaaagaaaagaagacaaaagaaaagagaaagaagaaacgaaagactccatcaggccttttcattgttcccactctttcttcacagggttctttctagagcatcaatgactgttcaattcttccttctaattcagtccaaacacttcagcatggcatcacgatctttcatgttctggttcccaacctaaccctacattctgggatctcaacagaaagctggaataaggcccgccttttcccacttttccttagctgtgccctcctctcgccatcctctcacgcgtccttccaggtccatccctggattattaatcaattaataattaattgacaatgaattattcatttgattaatatgaataattcccctgtgaactgcagcggcaaaagctctggccttgaatctaggcgcggcatttaccatccgtgtgacattaccaagccactgaggtttattttctcgtctacagaagaagaacgattaccatgcctgtctctcagggctgctgccagggttaactgagacaacagacagaaacctctaatgtcccctctccaggcctgttcaacccttcggctcttgcctcaagccggccgcgctgctggagtgtggactgaggaccagaccatgtagcccttgatcccctcacggcgtcccacagacaggtaggcaggaaaggggcctaaacaactcaagtgtcagaaatgtttctcgtccaaggtcttaggaaaaatacaacacgaccccataaggtggaacttattaccgcttttctacaatggaggaaagagaggctcggagcttacgcgactggcccaaggctcacagggggaaaagtggcgggacctcttgactgcgaatcccgcgcactccagaccccggctccccacggcccccagcgccaagcggaccccgtcgctcccggaggcgcttcccatggggtctcacctggcctttgggacacgcggcctcggcggctaaagcttggttcggggttgccccgggcaggcggtcctaagctcgctctcccttctcagcttagcggcgggtggcctgacgttcagccgccttccaaagcccgcgctcccgtcacgtgacctgctcgccacgcacagcctcttggggcgcgtagtgcaggctgcgtcccctcagacggctgctctcatggcaaccagtccctccagggagaacagagtctctcagcgaccctggcgtacccttctccaccgcttgtccccactccacccacaccaggtccccgcaggcccctgctccctctacacccgaaatcgcaggactacaagtccctcaatgccacttgcgccggaggcacttccttttccggttgtgctaggcgcctgctcctgycgacgtgttcttccggtggcggagcggcggattagccttcgcgggrcaaaatggtgagagcgttgaggggagttccagacggagatgcgaggacccctcggggtctgacccacaccgcgcttatctcctcagacgccggagatccagagggctagacgctcctggaacctccggcttgggctgaagggtggggaagggggaagccccttgccatgaactccttaggtttctcagctcgcgatttctaagggcgagaggcgtggggcgaattttgaataccttccagtttgtatatctctgttatcggtggtgtgttatctttatttggaaagttcttctgccgaacccgtgcccatcctacaatgccctgggcaaatgtttattggtgaagcacttccaactctcaggcacttggccagactttcctaggagcgcccacagcctctgtacagatctctggccacgttccatggacttctttgttttcggccacgcctcctagtgaccaccgtctgacgcgcatctagctctgggatgatgtctattcatctttgtattctcagtgccaaacagagggcccgtaattggaagctcaataaatggcagtgattgtctttatcattttgggggaagggggccgtgattgtttactgaattgaattccagtgtctcagaacaatgggggcagtttacttctctagagttgttatgttctggattttr

SEQ ID NO: 96020 - DNA, 30662 bp, Homo sapiens
  misc_feature (1)...(30662): n = A,T,C or G
agccagccctgagccagaggcagaatggatggacagacaggccatggaggcagcactgagccagcaccacacgtccatcctgggacagacgggcctggacttcacggcaagacccccctctcttccccactgggttctgccaccaccaggaggatttcaagaaagcaccaaagaccagggagctcggatccatactcggggggcctcagcccttgggaggggacacctgaggcagccagcgccccctccccagtccccagaactgcctgcaggtgccttgttgctggcttgtcttcagaaagggactgttctgggtggctggatctccagggtaccctccaccccagctgccaagccctgggccagcagcacccccttgtggccatcctgtgccttgttcccggtggcctccctattggactactaggaggggctggcagggcctccatagcacagaattgccccaaagccttgttaagatgagtcaagacccctcccccgcttcctcccttcctttcccccttcctccctcccccttcacaaaggcctcccttgtcaccttccctcccaccccgtctcagccctgtgctcctggaggccctgctcccaaaaccgctggaaggactggggcactttctgccacagtagaacacagacagggcttcagatcrcccacgcctgttttcagctgtgggtggccatgcagacacgcgccctggcatgtggggcctgggtgggcaggcaggacctgggccctcccacccatcagagcccactcaggaccagcgttcggagctcccacctggacgcatccctcaccacgtccggatttccttctttggatggaatgtaacgcgatctctatttaataaaggcaggctttgttggtacaggctgggtggccacgcgccctcactcctgcaccctggggctctggccaaggcttgggcatctgaaggaatgaaaccaaatcctttccctgcccgccctcgtgcttgggattaaacccaaatcctgaagccaccccacctccgccatcaccacttacttgctgtggggaggactatttgagtcctcccttagtattcagagggctgtgggttactgggggatgagccaggcctccctctccccgtggctggtggcctgctgttgggaagaacggcaccaaggctggctctcccactgcctcactgtggcaccttggccaggtcctcccctgggtctccttgcatccagcaatggttacctccagtctcacagaagcctgcagctcagaggcaaagcatcgaggctgcctgttgctcagtgggacagtggcaggattgattggtgatgtctgctggaagcacaggcggggaccatggaagcccaggtcttagacgagctctcagcaaggggcagcagtcacagttggaagaggtgggggtggccaggacctctgaggacccagagtggggctgggaaggtgtcttgtggtggctgagcccctccccacctgtagggatgtgggcccaggccaatagatgccttcttggggtggtggagagcatagcagcttctgagtcgggtcagtatctactgggctggtgacaccttgtggggacttccgtattggcctgaggccttggtgccactcagctggtaggtcaggctagctgtggactggccaggaccacaggaagccctccacccatgctggggacacctgtgcttgagctgagaatgtccagggggaagactggcaatcaaaaacataccaggaacacgcacagggcatcagatggaagagaggaaagcaggcaggcaaaggaggatgtcagaaaagggcgcaagaggctgtgttcactgctgtgatccccacagcctctcttgcgtggcagtcgctttctctcctctctgtcagtcctgggtcagctggggggccaaaggaagttggaggtctgggccctggagctgtccaccctacccccagcttctgtgctcctggcccagcaacactgaagacctaggagacaccagaccacactccaggggccaggcagagggtcccataccccagacccgcgctgcctgcccctgcaatggcatagcctgctgtcagaccccaagtggggtcataaacagagaactgaaatgcctggaggatggacatacactctcagtatctcccaacgagagataatagctgagcactgactgtgccaggcatgattctaaaccctttaaatgatctaattcatttcatcctcacagcaaccttatagagtactattctcccattttgcagatgagtagaatgaggcacacagaagtgccacagaggaaatgatggccccgggataggaatcatgaggccagccctggagcccacagtatgaaccagcatcctggattccctttcctagacacctgcaatgtgcttaaaggtggctggggagggttagccgacatcagccacgagggagttgttcctcttaaatggattttctagataacccacttgggcctctctgagtacccctggcacatgtgaacattttaaccctctttggccccctcttcaaacctagcaacgactctggcctctgagggtggaggcgctgagccgagaccagctgcgcactggcgtgcttcactcctgcaggatgctttccagtctgccaagactgtcctgatggaactcctgccggggctgtgcacctgggcaaagtcgctcctctctgggcttcagtttcctcatctgtgagttggaaatataggactaaatggctttcgcagcctccttgcctttttcattttattacggtaaaaaacccataacttgtactaccttaactctttttttttaattgttgtttttgttttgttttgttttgagatggagtctcactctgtcacccaggctggagtgcggtggcgcaatctaggcttactgcaatctccgcctcccgggttgaagcaattctcctgccccagcctctcaagtagctgggtctacmggcatgagcccctatgcccagctaattttttgtgtgtgaatttttttttttttttcagtagagacggggttttaccatgttggccaggctggtcttgaactcctgacctcaagtgatccgcccgcctcagcctcccacagtgctgggattacaggtgtgagccactgtgcctggccctcccttaaccatttttaagtgtatagttcagtagtgctaagtccatttacagtgttccgaaacatctccagaacattttcatttcacaaaactgagactctgtacccattaatcaaccctctatttccacctcctcccagccccaggcaacccccattctactttctatgaatttcactgcacgagggccctcatttaagtggatgatgcagtatttgtcctctcattactggcttctttcacttcatgtcctcagtgtccatctgttgtagcatgtgacaggatttccttcctttttaagactgaataatattccattgtatgcatagaccacgttttattttttatttttaattttattatattataattaattattactccaggctggagtgcaatggtgcgatctcggctcaccgcaacctccacctcctgggttcaagcctttctcctgcctcagcctcctgagtagctgggattacaggcatgcgccaccatgcctggctaatttttgtatttttagtagagacagggtttctccatgttggccatgatggtctcaaactcctgatctcaggtgatccgcccgcctcagcctcccaaagtgctgggattacaggtgtgagccaccgcgcctggcctgaccacgttttgtttatccagtgtctgtggatggacagttgtgctgcctcacaatgacctcttggccattgtgaataatgctgctaagaaaatagatgtacaaatatctcctcaagactctgctttcggttcttttgggtatatgcccagaaatggaattgctgaatcataggcattttaaagccattttcatactcttttctatagttggctatagcacttcacattcttacccacaatgcacaagggttctgcatcattgccaacacgtgtgatttgattttttgagaccaggtctccctctgtagcccaggctggagtacaatggcatgatcttggggcactacaacctctgcttcccaggctcaagcgatcctcctacctcagcctcctaagtagctgggactacaggcgcacgcaccaccacgccctgctagttttttttttttttttttttgtagaaatagggttttgtcatgttgcccaggctggtctcgaacccctaggctcaagagatcctcccaaagtgctgggattacaggcgtgaaccaccatgcctggcatgattttttcatttatgtatttatttattaaagacggggttcctgctatgttgccgaggctggtcttgaactccagggctcaagcaatcctcctgcctcggcctcccaaagtggtgggattccaggcctttttcttttttataggagccctcctaacaagtgtgaggcagtatttcattgtggtttcatttgcagctctctgatgattagcaatgctgagcaccttttcgtgtgtgtgttgcccatttgtgtgcagcccctctttcctgaggagcattctgaggagctccgcctggcctccacagtgatcccttcgaggaggacttggccaatagggctgtgatccctgccctcactcacggctcttgcatgattctgtggcccccccttcatcttccccatctcttctgggggcagctggggaaagtggaggttctaacctatcacaacccccaaccacctcacacacaggggctgagaccaggccagggctggctccaaggaagaagcccctaggatggccacatctgaccactcagggctgctgaaggtggggccagggccaggtccatgccttcagtggattttggtgcaggggatgcattccttcaagaatctgccttctccattcctgtgctgtgtgaacatggtacggggtaggggtgcctgcagcccccttgggccagggccaccagccatgctcttgcacccccacacacatgtgccaggttggggttccaggatatggtcagtgggtgcctcagtggagagggcccaggcagccccggtgcctgatgacatcatgggccttgctggatgtcctgacaagcaaaggcaggagctcctggtaccagggagaactcgccccctctgcccttctggggatactggtcctctttagaccaagacaaaatattagcatatcagagaaatatacttagggttttctaagtgcatttccccaaccagccggtcagcatcacctgtgaactggccatgtaagtctctgcctccacaccagacccaccgaataaccctcctgggtggttctgatggaagcctttcaggtggttctgatggaagattgacgaccagcgctctggaagtaactttagcctgatttgaattccttgctgctgtgaacgcttaacttttaggaacaggtatatttatcacaaagaaatccgaagcaattaggggagctacctacactttcaaaaggacttgaatgtatttaaattaaaaaaagcggatggggcccgggtgcagtggctcatgcctgtaatcccagcattttgggaggcgggagggtcacttgagtccaggagttcaagaccagcctgggcaacatggcaagacccatttctacaaaaataaaataacaccaaaaattagccgggtatgatggggcgcgcctgtagtcccagctggggactcccgagactgaggtgggggtatctcctgagcttaggatgttgaggctgcagtgagccgacatcatgccactacactgcagcctgggcgacagagtgagactcctgtctcaaaacaaaaaagaggggcggggaagcagtaacaagcacaggtgtcctcagcccatggatggcagcgcccgcctccacgcgccagtgccctcctgctcccctacctcccccttggccacccctgggcatccccagccctgcagcgccgagggcggaggggaggccacccgcccccagcagagggctccgagagagctgcagcggcggtgggggccccgcagagattggggcccatggtttgaaggctgttcacaggcaccccgagacagcgtcccccctctgggcgcactggatttgacgttgcaggacgcgcggctggaagccccccaggccccgctgctcacagaccgggactccgcctccggttcccgagggcgtggcgaggcgctgcgggacgcccaacaggtgcgtgttgtgtccccaggccccgcgctccgggyggagtcaagagcctggaagccggcagcccgggaaaagggggcgggacggtgccccggggcagggctgggtggcggccgctgtcctcccgggaggggcgggccgcctcgacgccgccctccctggcggccaatggagaccgaggccccgcgcctggattggagcggacgcgggggtcagccagccttgggggccggggcctggccgggggcgggggggcaggcgaggcgaggcgggcgccgtccgcgcggttataaggcggggagttccctgcgccgcgagccgggaggcgcacgctcgctcgtacggcggccgcggcggcagggcggggccggagcagcgggcggcggcggaggcggcgcccgggagcgctcttcgcttccctcggggtcttgctcggacctcggccaccgcctgggatccccaggactcgtgcgtgcagcatgggcggcgtcggggagccgggaccgcgggagggacccgcgcagccgggggcrccgctgcccaccttctgctgggagcagatccgcgcgcacgamcagcccggcgacaagtggctggtcatcgagcgccgcgtctacgacatcagccgctgggcacagcggcacccagggggcagccgcctcatcggccaccacggcgctgaggacgccacggtaaggaagccntaaggaagccacccaccggcgggtggagcctggagctcggtcgtgggcgtgatgtcccgctccacctgtggggccttagcatcctccctcccctcgctgacctttgacctccacgccgggacccagagttggggtggactagccagggccagatgtggggtagggagggcagttccctgcgtggaggacccgcagctgtccacggagcaggtctgcgggggaggagggggcctcagaggtgggtgtgtcatgctgcagagcctgccctgggtgaggggctgccctgttgctcccaggtccctgtttcagttctgggtccccatgctgggtgcttgctgagtgctaggggtagggcagggcagggtccccaggggccggtaaggacatgccattagaggctgggggctgggccggcctgaggtctgtggctttcccaagagcttctgtaaagggctcagggacagtgactcacctctccgggctagcagctgcacgtgggagggctttgccagccaggctgggtgggcctctcctggaagcacagtcaccccaggaacaggctggcccctggggaccccaacttcccaatcccagcccctgtctagacaggcagggatgtagcctggccccagggtactgtctggctggagtccagtggtggagcagcccgaccagccccttttccttagttacccacctgcayaataggggttggggccacgatgccctgtccttgaccctccaaatttctaggttggccacactgggtatcaggaaggtcttcaagaccygaggacatgaatcctgaatgctggctttttgggcagcagcggaggttctgtccagtcccaggactgtcggcgtccctcttgccagggccacctgctctctgccgattgccatctccagcatgttggacaatcttcactggactctttgaggaagaaagcccctcttttcccyttccaccccatgaagctgaggagtgagaataagaatcctcctgaaattctaaaaaaagaaaaaaaaaaaaaaagaacgccttgtccgtggctgttcaggcgccagacgctggcccgaggggacagcacagccgtgggatgaagcagcctgggggcagtatttgagcgtgcaggtgtttgcatgtctgggtgagtgtggtgtgtgtgcctgcctttctgccagggcgtggcgaggtgaggggcacggcttctccccaaaggcctkgctgagccctggcctcccttcaaggagtcttgtggatgcctgctctggtctttttttaaaaaagtatctattttatttattattatttgtttaaaaatagagacagggtctcactatgttgctcgggctggtctcaaagtcctgggttcaagcattcctcctgcctcagcctccgaaagttctgggattacaggcatgagccaccactcccggcctgctctagtcttttgtaacctagaggacagtatggatacagaaaactttactccccaccaaccgccggagacagartcttgctctgccacccagactggagtgcaatggcgccatcttggctcactgcaacctccrcctcccaggttcaagcgattctcctgcctcagcctcccgagtagctgggattacrggcacgcgccaccacgcccrgcatattgtatttttagtagagacggggtttcaccatgttggccaagctggtctcgaactcctgacctcgtgatccacccacctcggcctcccaaagtgctgggattacaggcgtgagccaccacgcccggctgggatacagaaagcttttatttcatcactgtttcctgcctggtgccaggcccatgctggggttcctcccaagtggaattactgacttaacatttagcttgggatcctgagacttccatcacacagttttctcattgattcgcagccaataatatctgttttaaaaacatctcaggccgagcgckgtggctcacacctgtaatcccagcactttgggaggctgaggtgggcagatcacctgaggtcgggagtttgagrccagcctgaccaacatggagaaaccctgtctcttctaaaaaaaatacaaaattagccaggcgtggtggcgcatgcctgtaatcccagcactttgggaggctgaggcaggagaatcgcttgaacccaggagacggaggttccggtgagccgagatcgcgccattgcactccagcctgggcaacaagagcaaaactccgtctcaaacaaacaaacaaaaaacatctctctgctccttggggccggstgccagctctgctattggaggcactgagcgaccttgaagcaggcatgtcactcctctgtgccccagtttactcatctgtaaagtggggagagctggggcagacagtgagctggctgagggcaggactgtgtctcctcaagcccatggcccagggctgccakgtagtagtttgtattcggtaaatgctgctggcccctaagtgtgagcgtgccctgcaaactgcagygtatggtgggacagccctgcacggctacccctttcctgggtgaccttatttggttacggtcctatctgaagtaggaaagggacactttaggctgtctcttagctccctcaaggccccacagcctggactagagttgccagaaatacttggtccattcaggccaaagggactgtgaggttgctgggatggtgcaatcagtctttgtccatgatgaacccacagggtagaccaggggttgggccagcccagtgccctgtgtagttgagcccaggccccaggcatcccatcccgggcggtggcctcaggtggaggtggggcagccagttgccagggatgtgttccagcggtcacctctcaccagccccggctgcccatcagctgttctcaagtccaggcaatgaagccttcctgccaggaaattcccagagtttctgtgccatgaagtcagcctgtggccatcttgggacacaaggccgggtgccctggggagagtactctgggcccttggccaggtttgtctgagagtcataggcagcctgatactagtggagccagccagggagggatgaggcccagccgctgctggccataagtatataagggccatgtgctgagtgcctactatgtgccaggttttgaaatcagtacttgatttattgaaaccctctcttttaatcctcaaggtgcccctatgaggcacgtaccatttattgttattgccacttgacagatgagaaaacagaggctcagagaggcaaagtggcttgaaattcagtgattggtctgggatttgaatccacagccatgttctyaagggcatgctatgctgccacctatcctgtttatttccggcactcattgattcttcaatgtttgactcattaaatccatcagtgagcatcttctctgtgtcatgcatggttctcacctctgaagatgtagctgtgagcaaaacttctacagggaatgagttcacagcagagggatcagctagagcaaaggctcagaggtgggaccgtgcgtcctgtgttccaggaatacagtatggctgcagcagagagcagtggagagagggcctggcagtgaggtctagaggcggccgggctggctcatgctggatgtttgtgtcctcggaaggactttggctttattttaaagaggatggggagccccagagagcacagcagggaagcctggggagtctgatggacatttaaaaggatccttaatggagagagtgaaggcagagccttccagaagggtaagagaagggaggatggagacctgccctcccccaagggaggccactcagaagaggtagagtgtggccagggcagagagcaagagaggctgtggacacaggcacactggtccagtgagagccattagacacattagatttagcttcatgttgtctttagagagggagccagcctggcctcgctctatgatcttggacacatcctttcacttctgggtctcagtttccccattagtgtgatgaggatgagaatgcttttgtcctgggcacactatgagggtggtgctgggcacctgggtgcctggttaccatgggcaacaaagctctattcatgggtgtggtgaatgcattgcccacagcaactcagggcggatgaggagtttcccagcagcccctggtgccctttcggctgaagccctaacaactgtgggaaaatccaagttccagcagaccccctgagccctctgccttaggaccctccttctaggtggttctctgagcctggcctgagctggaggagggagtggccagtgctgcagcagaggctgcttcatagtaattgcagccaacagttattgactaggcactgttctgaggggtttagatgtggtaactgattgaattcgcctaacaactttatgaggtaagtcctattgttagcccattttgtagatgaggagactgagtttgaaactggggggtgtaatggaaccttctcaggacccttgaagggtagggcctttgtactcgggccacgagggtggggtttgtgtctgggtgggagctggggagggacaggactaggattaggcagatctgaggccacaggagttggttggggggtggctccagagccactccactccctcctaccacattgactgccttgaaagtcccctaatggccactcccatgaagtgtgactgctctgggctccccgcaggcgttttctgcaaggccaccgcccacccaggccccttccccagaggggctgcagtgccttgctccttccttgtgggaagagttgggattgtctggcgtcagcaggatactgcccctgggcatccctcccggtctcttcctgcgggtttctgatgaaacagccaggctccagtagtggagccagaggtcagtggtggagagaggaccaggagccagagggtatagctgctttggggctactgtggggtcagggacacttgtgaggccaagcgtcctggctgcaggagccctcacatatatgcccacccttcaccaggacattgaggggtgctgggggacaggggtagctttttgggggtgtctgccttcgacttgggctccgctacacaggccaaatttggatgtcccatgtttagagctgtgtttctttgggacctcttggggcctcagtttcctcatctgtaaaatgggatactgatagtgcttccccactggcctcctctgacgggcgccagggagaggatgggacggagcatggtgtgctgggcacgctcctgctgtacccacccacctgggagaggggagaggcaggaatgtcctgggggtgtcctttgaggcatagccctgtcaccccaacatcctacaaaggcatgagaaggcagcgaggacagaccccgaccacctgagccctcagcagccctgccacactccctgcttcacccccttcctgactgatctggcacattcttgattctcctagggagtgacccaaaatccctccctgccctgctgtgtctctggggtggaaggaggctgccagcccctcctctctcccagcctcaggcttggccaggacttaacaggcaggcagagaagcagcttctccactctcttccctgacacctgtaggcccctcctgcaggcacttacctctaagtggactctcaggaggaggctcatcagggctgcagggctcagaaagagctgggctgtggagctcttgccaaccgccaggccccttctaagtgctttagcgccaccgactgcatcctcccagcagccttgtgagatggggatttgtggttcccagtttactgatgagaaatactgatgagagatgggtgtggtcttgtctggggctccctggctcctggatagcagctcaggttccatcctgggcaggctggctctgggacacccccccgaccagctgctgtgtgggattcacggtggggcttgggcagggcgtgggatcttggggccaactgagccactctaggcttccagggaccaaggccaggctgagctgtctctgtatcctgagagagcatgaacatcacagaagatgggcccgggttcgaatcccagctctgccactactaactgggacctgggcaggggtcccttcccgctgagccttcatttcctcaccagcaaaatggttcgtgcccctgctttgggggctgtggagggttggctcttgtctacttgttcatacctgctgttgagcagctgctctgtgccggcctctgaggatgccactgtgaacagagcctgtcgctacctccaggagcttgtgtttaggggtgccgttttgattccagcactttcacccagctctgctccggtacccgatgagagacgtcgagtgccgctttccactcgcttgggtgcgtgtgggggttggggggacagggctttgtgcacgtagccctgggtggatgttcctgggtgcacttagggtgtgtgagggtgggacctcccacagttccctgaggctccactgatgaggtccaagaaccgccttcctgccccccagcccaggctcccagcagctgggcccttggcttcttgagatagtgactggcctcacggcaaggacccccgcacaccacctaggagaactgctgcttcccctctgttccaggagtggcgacaagcacagtttttcgcttttgtttttgttttcttcactttaagttccgggaaacgtgcagaatgtgcaggtttgttacataggtatacatgtgccatggtggtttgctgcacccgtcaacccctcatctaggttttaagctccatatacattaggcatttgtcctaatgctctccctccccttgcccctcacccgcccagtaagccccggtgtgtgatgttcccttccctgtgtccatgtgttctcattgttcaactctcacttatgagtgagaagagacctggactctgatctaacctcggtcaaatggaactgtgtgaccttgaagaagtagcttaacctctctgagtcttagcttctgcctggcacccccatccttaaggagaggcccacagaggaccaggtcacatgacctcagccagttccagagaaggctgtttgcttccaggtttcggcctgagtccaggcccctgccctactcgcactccctgatagcatgagaagcacagccccagggtgcccacccagctctgagagcccagcctgcttcccagggaactgtcacagccccacctgtcccttccccagctggagccctgtcaatggctttggggttctctgacacagccctgagggggctcacacttccccttatcattgcaaggggtagatctggcttgaaggccctggggcaggcttggttctgtcctcccctgtcagtgcctcgacagggctggcctgggtgaatcaggaccaacgggaaaggaggcgaggagaccaatctggacccaagatcctcagctcaataaggtggccccagaactgacatggggtgatagagggaagggctgggagggaggagattctggggccgcagccacagcttgcacgttgcgccgggtgtgtctgtgcgtgccagctgcatctttgcgtaccatgtgtgcaaggctgtgtttggctgagtgttcatgtgggccgtgattgtgggcatgtttctgagtgtmtgagtgakgcctgctggtgtgggctggtgggtgtgtctgcatgtgcgtgtgtgtctggggagtttcaaaggagaaagagggactcaccatcacgctggctcagccttaaaaaggtaggacatcctgacacgtgctgcaacatggatggaccttaaggacattgtgctgagtgaaacaagccagaggcaaaggaacaaacatgtgatttctcccagatgaggtttcyggaggaggcagatctgtatggacagaaggtagcatggtggttgccggggcagggggaggagagaatggagaattagtgtttaatggggacagagtttcagttggggaaggtgaaaaggttctggagctggatgatggtgatggttggacaacactgtgcatgcacttaataccactgagctggacacctaaaaatgcttacaatggtaaatttcatgtatattttaytacaatttttaaaaaattggctgggcgtggtggcttatgcctgtaatcccaacactttgggaggccaaggcgggaggattgcttgagctcaggagttcaacaccagcctgggcaatatggtgaaaccccgactctacgaaatatacaaaaattagcctggtgtggtggcttgcacctctaatcccacctactcagtaggctaaggcacaagaatctcttgaacctgggaggtggaggttgcagtaagccgagatcatgccactgcaacccagtctgggcgacagagcaagactctgtctcaaaaaataaaagataaataaaaaaattagaggccaggtgtggctcacacctgtactctcaacactttgggaggctgaggtgggaggatcgcttgaagtcaggcatttaagacatgcctaggcaacatagtgagaccttgactctacaaaaaaattcaaaagttaatgagacatggtggcatgtgcctgtagtcctagctgctggggaggctgaggtgggaggatcacttacgaccaggatttcaaggctgcagtgagctgtgattgcatcactgcactccagcctggtgacagagtgaggccctgtctcaaaaaaatttttcagtgtttttctgggctgggcgtggtggctcattcctgtaattccagcactttgggaggctgaggtgggtggattgcttgagcccaggagtttaagaccagctgggcaacatggcaaacctcatctctacaaaaaataaaaataaaaaattagctgggcatggtggtgcacacctgtactaacagctacgagagaggctaaggtgggaggatcacctgagcccgggaggttgaggctgcagtgagccatgattgcaccactgcactctagcctgggcgatacagcaagaccctatctcaaaaaaaaaaaaaaaaaaaaaaaaaaaacacccagtggggtcagtagaaccccaagagtcttcttccctcccagctcccctgtacaccagccccagctctgcaggtagctgggggcccagacagcttcctggggacccccagccttccctctgcccttttttctaccagttttgctgcccctccttcaagactcatgtccagagggggtgagatctgcacttatacagccccctcctctgtaatgagtgagccaagtcagcccaggttattccagaaggggcaccctaccagccccccagtccccaagctgccctgggcctataaaagcaggcaaggggacccctagtagatcatgtaggtgttacctcttagtgggtgctggaggggcctgaagtgctttcttcccccagggtggtaggagaatgtcctggcagtgacttcagggcccgctgtcacttccgttttaagactcaccagctggtaggctcattagcaagaggacaataggaggcccctgtcctcagtcagctttcttcaaaggtgtttcctttagcaactgggaggcctcccttctccagacccatggggacaacaccacccagctactggttctataagctgctgtatggctctggctagcccattcagagaaagcctctgaaagtacaaggaaaaaaatcagtccaagagctgtgaacaattagtgagccgattacaataccaagaccacaggcagacctggaaggctaagtgagcccaggtgtgaagttcaagcttactttacttctgggccacttcctggctggtctctttccctggcccttatctttctcctggtctgtcttctcttctcaccccctttctttactctttcttccttctcctgcatcgtactccacccccactccagctattacacagaatcgcgagaatgttggattattcattttatttatgatgttttcttttttgtaaaaatagagacaaggtctcactatgtggcccaggctggtcttgaactcctggcctcaagcaatcctcgtgccttggcctcttacagtgctgggattacagatgtgagccaccatgcctggcccattttatttactttaaaaaaaaaattaggctgggcgcggtggctcacacctataattccagcactttgggaggccaaggtgggcagatcaactgaggtcaggagttaaagaccagcttggccacctggggtcaggagtttgagaccagctactccggaggctgagaccggagaattgcttgaacccaggaggtagaggttgcaatgaactgagatcatgccattgcatgccagcctgggcaacagagcaagactgtctcaaaaaaaaaaaaattatgttttgtgctcctgcttcctgctttgtaagtcaaatcagtttaactgttcaagtgtcttccttgcaaacccccaaggactcaatgtgtgtcgcccttgactgatccccccgccccgtgacccagtggtcctcagttccaggttttcccacctacccttcacccactgcttatgtttataaaaacggggtaaatcaaatgttcgtgacccagatcttattctacatgcagtggaaacttgtatgacttaagctttttggaaaagcagaaccttttttcgtggttcaagaaatcaaagtcttcccgggaggtctttctgtaaatccagagctgcagatgtttgaccgtgttcagagaggggcccttgtgctgggtgaagtggatggggcacagcaggcaatgggtgaaaagcaggacaacctggggccctgggaggaccagggagggcccatgtctttgactgttcatcagccggctgacttcctgtccgcctgtcgtctgctctgcccatccatccgtagtccttccgcctgtctctgctggttgccgctgtgctactcagctgtgtctgtctgtccgcctgactgtctgctctccttcaggatgccttccrtgccttccatcaagatctcaattttgtgcgcaagttcctacagcccctgttgattggagagctggctccggaagaacccagccaggatggacccctgaatgtgagccagagccctaggagaggctcagcccctgagggagggggatggctggagggctgggagacattgccacatggccaggagcmgctccctcggcattcgcccaaggggatgcagagccagggstgagcctgccctcccctcccagggggcaggcagttgaaagtgaagctgtagggatgccctgagaagtccagggctccagatctggtttagccaggcactcgtttggatcccgaggcaagctccctccctgttgtcgcccagtgtccccatcaaaaggaggattttgatgaactgatttctctcctggctgtagcgtcttacccaccccataccttttgggagggagaggaggcttcaccaccagccagtgctccagctcacaccccgggctgggtactcttgtcacttcattcctctttgcccacaccccttgggcctggcgatgggaggagcggctggggctccaggagaatgggggtggggaggaatttcttccttggctgatcgrcccctctgctatggcaggcgcagctggtcgaggacttccgagccctgcaccaggcagccgaggacatgaagctgtttgatgccagtcccaccttctttgctttcctactgggccacatcctggccatggaggtgctggcctggctccttatctacctcctgggtcctggctgggtgcccagtgccctggccgccttcatcctggccatctctcaggtgaccccagttctgtgttgcagccaccttaactgcccaacagacgtgggcccccatgcatctgggcattgtgaacatatttgctaaatgaatgaatggacctatgaaaggatgaatggatgaataaacagatgaatgagtgaacagtctgaaggcccatcaggcatgtctgtgggtcaagctgcattccagatgagccaagaagttccttcttgaacagattccgatcaagcacagggccactgagccagaggctgctgccctgcagcttcatgacacttacgagcccctccacctmcctgggactcagttctcatctgtaaaaagaggacactggcccacaagggtcttgaaatggagcattagcacgrgggtaccctgcaagctgaaaggattcactggggccccaggccctggcgggctccgtccttcccaacagcttctgaccctgcctctctccccaggctcagtcctggtgtctgcagcatgacctgggccatgcctccatcttcaagaaktcctggtggaaccacgtggcccagaagttcgtgatggggcagctaaaggtgagggtggggtgggtggtcagccaggtgctgggtggcgctgggtctgcccaagtgtgtgggcacagtcgggggcacagcctgccctgagagccccctcctcctccacagggcttctccgcccactggtggaasttccgccacttccagcaccacgccaagcccaacatcttccacaaagacccagacgtgacggtggcgcccgtcttcctcctgggggagtcatccgtcgaggtgggtggggagggacstggacaacctctggctgggcctgcagctgagggggagctaatgcactgggtccccactctgcccctgacctagcncctgatctggcctccactctggctgggccaagctctgcccccgtgtctttccttcccacctcccaacctgctggggacgaccagcccgcttgctagaatctagagttgcctttgacccttggccccagccagccccgtgaccttgcccgggagaaggaggtggcctggagagctgctgtctccagccgccgcctgtctccacagtatggcaagaagaaacgcagatacctaccctacaaccagcagcacctgtacttcttcctgagtgagtgtccatctgtccttctggggtgggggagtgcctgggcctgcactgtcctccctgctgtcctggaccactcccagccacttcctggggcggggcacgtctgtcaggtctccctggtcatggcatcctcccagcctctgcagtctgtacacactctcccagcagcatgcctttgccccagctgtctcccgtgcctgggacaccttgcagccacgggccatcacagccctgctgggagcttccccaagccccacgtagaatttcttcttgccctcactagagtggtccggagccctagagtctttgggcagttgttggggcggacagagtgaggactcaagtctggccctgacttgcggtgaagggtggtgggaggtggtggggtaagggcagcctggggaggcttggacacagaattgggggtgatatggggtcattcagctggatgtgaccagcaccaacgtcccaggggcattcctggagtaacagagcccctcactctggcgcccactcaccttggcagcccagccccactcctgaacactctcatgccccttcttgcagtcggcccgccgctgctcaccctggtgaactttgaagtggaaaatctggcgtacatgctggtgtgcatgcagtgggcggtgagtggggttgcccaggaccccgggcatacggctgccgtggcaggaggtggtgcctcgggggacagtacctgcccatgaaggcaaacagggtgcacatgtgcgtgcaacagtgtggctcacatgtatgcgtgcaacagtgtggctcacatgtgtgcgcgcagcaggagagcgagtgtgcccgtgactgtacgtgtggtgggggggggttgaggaacagggggggtgtgggtctctctcggtgagggtgtcttcccaggaggagttgctgggccgactctgccaggcatctgtgtccctggcagggtcttccccaacacaccctgcatgacaccttcgtcactaaaatcagcctcgtgagctggcagggcaaggaccctgttcctttactcagctgagaaaaccagagagggtggtggcctgtcctgggctctgaggcaaatcaggcagaagggttggatgcctgaggtcctcctcccacccaccaggcctccagacctccgggcacctggagacctctcggtatcgcctctgccctcctctgcaggatttgctctgggccgccagcttctatgcccgcttcttcttatcctacctccccttctacggcgtccctggggtgctgctcttctttgttgctgtcaggtatggcagggagtggcgaggtcacacacaggcgacaggtgacccccactgcagccccccaccagagcttcccttttcccgtctgcagaatggggccagtggtrctgcctccctggcttgctggtggaatcacataaacacaagcgtggcaggagcccagggtcggtgggtttagggagcgtggcctggcttgtaagtggcccggtgggtgtcggagctgctctggactcagcctcacagtggacactgctccattcagattctttaaacactggcaagggggcgatggccacaatcctattgtacagataaggaagtcaaggccacttggggacagctgctctccagcctccactcagggtgcctaagtggtgagctggacctagggcagtgcccgagcctccccacagggtcctggaaagccactggttcgtgtggatcacacagatgaaccacatccccaaggagatcggccacgagaagcaccgggactgggtcagctctcaggtgggcagcaggggtggggcccatcctgggtggggtggggggtcccagctaggagccagatggcaaagcagggatgaggccctgacggggctgccaggtgggggatggtgccgtggggtcagggatctgcaacggcctcctcacatgtgccccgccggcttccggcagctggcagccacctgcaacgtggagccctcacttttcaccaactggttcagcgggcacctcaacttccagatcgagcaccagtgagtgtgggtgctgggggccagtgggaggtggggagggggtcctgggaggggatcctgggaggggacccgtgggtggggcctctctctggaatctcccacttcaggtgccagcatacgctccccacccccagcctcttccccaggatgccgagacacaactacagccgggtggccccgctggtcaagtcgctgtgtgccaagcacggcctcagctacgaagtgaagcccttcctcaccgcgctggtggacatcgtcaggtgaggctgcagcccggcccctctgttctggtggcttccccagggcctatgcctacccttgtccaggtcagcctcatgctgagcccccagggtccctgagcctttctgtccacgtcccatgcccttcctcccttccccagccttcacgcacacagtgagaatttctggagcacctactgcagactcacaaacagcagtgcctgcggtgagcaggtctatgcaaacctacccccaaaggctgagggaaaaaagctaacagatccagtttctcagaaggaaacacttaacagggactcataaacagaagccatgtctcagggccgggtgcggtggctcacgcctgtaattccagcacttggggaggctgaggtgggcggatcacttgaggtcaggagttcgagaccagcctggccaacatggtgaaaccccgtctctactaaaaaaaaaaaaaaaaaaaacaaaacaaaaattagctgggtgtggtggcaggtgcccataatcccagctacttgggaggctgagggaggagaatcacttgaactcgcaggggcrgaggttgcagtgagctgagattgtgcctttgcagtccagcctgggcaacagagcaagactctctcaaaaacaaacaaaaaaaccatgtctcaggcagccaagagttgggacatcccctcacacgccctctagaaagaaccctctatatagcaagcttttagggtgaaccccatgcaggtggttcttaygaacctggtgaccactggaggttagataagcgtctacaagaggaggttatctatgccatgagcttggcattcagggtcaagcatcggtcatcagacagttttgcttgaagatggcattgcccttgtagcaatgcaggctctagagagcttcctgccctcttggagctgatgttccttccagcaaaggaaacagcaagcaattaaaataacaaataagtacattacagaagatgggcaaaagaacaatgaaaagcccctcagggtggggacaggggaggggaggggggcggccaggcaggggcggcagtttctaaataggtggtagggtgggcagtattgacaggctgacgtgtgagcagggacagggaggaggggagaggtctcgccacagggacatctggcaaagagcgttcaggcagagggcacttgaccctgaatgccaagctcatggcatagatagccgaggcaggcatgcaggcactcagagaagggacacgcccggcttgcatcttggaaagctgcccctactgggaatgactggcgggcaggagtcgaagtggaaaaggagagcagaggacactgcagccatccaggcgaggggtgatggggctcagcccttgtggtcaccttggaggtggggaacagaggccagattccaggtcttatacctctgcgcctttgtacacgctgttccccttacttggttgcccttccttcctgtgctggtgttcagatgcccacttctccttcatgatctctcccagcctgatgctctgagcccctgccatttggcacagccctttagagcgcctggcacagggcttcctagcagattgttgacatttctggctccactgmccaatatcaggcccaagatcgggtgggcaggttccacgtcctctctgtccttgggttgcagcgcccagcaggaggcagcaatggagaactgggtgcaggagggacaggcccacccaggctcatgcctggacttggccttggctgccctccagctcccctacccgacacccgtcamcccggtctagattccattccagagaatgagcattcagctgttctcccaacccaccctccagcccgcatcgctgcctgcccccagggaagggaacccacagggaatggggatctccgctcacacttaccatgggggatacaggggtgttaggatcttgcaactgagctcctaacacccacccccactgccacccccacctcccaggtccctgaagaagtctggtgacatctggctggacgcctacctccatcagtgaaggcaacacccaggcgggcagagaagggctcagggcaccagcaaccaagccagcccccggcgggatcgatacccccacccctccactggccagcctgggggtgccctgcctgccctcctggtactgttgtcttcccctcggccccctcacatgtgtattcagcagccctatggccttggctctgggcctgatgggacaggggtagagggaaggtgagcatagcacattttcctagagcgagaattgggggaaagctgttatttttatattaaaatacattcagatgtattatggagtggagtggtgaatttgcatgagttttgaagctggggtctgcccagactccccaacagcattcaggccctcggccatcaatgtgtgtgttggggccggcggcggggttgagggggagcgctaaggagctccctttagctctagatgccctgggcctgggagcccagggatgcctggactcggacctgcccgagggcctattcacttcctattcatgctgggcttcaagtcacttgacgcttctgcatggtgggatgagcgggcccagcagatgaggacccagggctgggggccatgtctgcggacgcttctggacatggactgggaaagacggttgtgcctcttgacctgcactggcctcccacagccctccatgatggggggcctgaaagggccccgcgcagcgggccacctgctgatcttagcgccacatctggcatcacaccagtggtggtggtgcagcctgtgcctggtggcccaaggaggcaacgtcgatctccctcaagcccacctgggaccaggtgcttgtctgtagttactgcagtgaataggctggacccccgaggcatggccattcctgtccctgagtccctggagtcaggtcttaggctctttgtctggcagtgggctggactgtgcctgtgggtttcggacagttctggggagggctttgagttgcctcttggggcacccagaattgggaagaagatctggctggaccaatcagtccccagcatccacacagcctgacagctccaagctgagctgagggtttcatctgaagtgtcggcagtttgaaaaagaaagctgagtgaggatttctatgaggcctttctggagtgggagctggggtcgccctaccagctgcaggggttgccccctactttttgggcttccattggcctggactgggttctctttgggaggtggaaaaggcgcaaattctgccaatttttgttcagcccctccaaggcccatcctccgtgggacggagctggaggggaagccccactgccccatcaacccgccccctactccacacacatacaaggtggcgctgagtgttgctgcccatgaacttctcttccgagacagccagaaagctcctcagtgctaaagctgatcaccgtagtctcacacctgcttcctctctgtgaggaggggccgtctgcacattcccatggactcttgcggctcttcccaggggctccccttctagaaagttctctctgacccgcagggctcctccccttccctgcccagcctgtgactagggtctctgtgacagcacctggaatactgacatcatttgctgctggaggctggtggcagcccagagcctggcccgggagaccctggggtgtgttttctgagaggatgacagacagggtgtttgggtcctgcttccctcaccctgatttctggggcaggagagcactgggggaggtcctgttcggctcacataatctcccagacccaggagcagacagcccaaagctccctrtggcctcccggcccagggcagtgccagcagaggcctcctggtagggccagggaagcagagggtggcagccccttcagcttggttgtgagtgagatgcctgccctcctccgggtgccacccagccccaccagatccactcaagtcagacagacttgggggtggggtggggtgggggcaagtcctgtttctgccaggacgcaggctgtgtgaccttgggggagttccttgaccccgagcagcagtacctagggtgatggaagaaaggctcttagcaaagggcacagcagcaggctcagtttattcacaaattttgtgcacacaacccaattccccaggatgaccatttgctctgtcacctagggcaagttcttttttgccttccctgagcctcagttttcagccgagggtaagattggatgctccttgaaaggtacttcctgcctcagacacacgcttctcatggccagggcgtgccttgcattcagggtctctgcacaggctggtccctctgcagggactcccccttcctgtcaccgcctgtttaaatcctgttggctcctagtgccacgcgggcgccctgagccagcgcaggctccgaatggcattccctccgtccacaccctggtagagatcgctgtgcgctggctccgaggcgctcgccagggagatgctaacaccgaggatccacgacagctgagcctgcagcgccacccaggggcgcccggagcatctgcgccagtgtggggcgggccgtgctccctactgtccctggtaacttgctttgcggacccctgggaggccccgccttcagcagccactcctagatttctccagaccacctgggacccatcactggcaggggaatctttgctcttgtcccactgtcccccatgctagatcccctgggaacaggtcaccctcagtcctgagctgagctcccccttctccatctgtaggtctcctagtctcagaacaaaggcttagggcacaggggccaggtttgtaaaaggaaagaggctttggtggaacctctgaacctctgagaaaccgtgttccttttttattgtctgtacaagaggcgtgggcccggaggaaaaacagctcccgagggaaaccataaccgcagtgttggtttgttcctttgatcatcaacatttgctacgggtctcccagcccaggcagatgttggaaatgatgatgcccaagagccagcccctgcctggtgtgttgggagtagctggaggggagcagggggtcaacaaactcttttgtgacgggacaggccatgggtttctcaaggttcctccccccaccacactatgtcctcaggcaatgagccaccacaactactgggagcttggcctattccaagctcttggctgctgtcactctttctcttggacacttgctcttgaatgggacgatttagaagaaagacctgaatgcctttaaaatccaaagcaaagtgtttgtgatggtggaggacgatggggacgtgatcctgaaatctcagcacgctggggggctgcttgttccgtgtatgcactggccacatgaagccagtctgctgagaaaaggaaaaccagtcccgagggcagtggcgtttcagcctggggcaagccatccccacggcgccccatttccctctcagatgttggaacagggactctttgagaggcagcttctttggccagaggggcacacctctcgggggagggtgcagcctggctcgctgaggagtcccgatgggcccaaggcactgtgtcacataagcaatggccagccactcctgatggcagcccaagcccagccccagtggctgccagctctgccctggtccagcttggtaaaggcttcctctcccctccgagtaggcacgagggcttcggagtgtccagccagacaccccgaggatccgcctgtggtgccacagcaccctcccccgccccacacacacacagcttagacttggggcgctgcagatgtccccgctacccacaaagctgatacccttttatctgcgtagctacactgcccttatctcctcctcagagactaactgccctccactgcccccactcctccagccagccgctgggcctcctgggagctgtctgacatttgacgtgatgggggcaaggtctgggaaccagccctttctgtgcaggagaggtggccaggagcctgcgggttaggagcagggtcctgctgctgtgtggcctgcgcagtcctgtcctctctctgggctcagcctcttcgcccatgatggtggtgttggggtttgattgctcagggccttgaatattggggcaccatgactttggcaggggatagggattagaaactcacaattctgggtgtgttggcaagggggtcagctgagtacagggacaggagggggcggttaagcagagagcagatatgaatgtcctcagcttcttgacccagggaagtattcaagggcaaggcggggctgggtggggctggggaagtcagagaagctccaagtgcccggtgaggctaggccaagatttatctggtgccctcatagccccagcgtccatctggcctccagtatccccaattccaagccccctggttgttatgggtgatggacccatggatttccaactggtagggttgggaggcctgggctggtcgccatcctggaggcgggtcacaggcacagggcagagggtgggagccgtgcctgccagggtcttgtaaccttgaaggccactgccagcgggtccaccaggagggcaaggcctagggtaagcgggtgttgagataatggcatccttggggcccctctagcctgcccctgtggactatggcccacagggccagggagggcaaaggactccccagagccacttggtgaatctggggtgagtcggccacctcgctcagggcttctgtaatgccaggccctactcaggacaccctgtggccactggggagccatacgtaccccagccagtctgctggctgtccctacctggctggatttcggccaggcaaagcgggggtcaggggaagcaggcgggggctgaggtctactcaggagccctccccagccctgctgggagcagctacaaagccaaggggaggccccaaggtgttaactagccagtgcctcttggcccttccttggcactttcccaggatcagccctgccaggaaagccagcccagagacgatgacggagcagcatgggggtccatgggagacggactgtacaagtgcccctggcatgttgctttagactcttcccagcctctggggtcagacagacctaggatccaatctctgtgcctatgaactggtgaccctgggctaggatgatatcagcccccccgacagcctgtgggttctgaatgagccattgcatatatgggcacgggagccacaaaaagaatcatcagcctccagagccttcttcagcccccttttaatttaatttaattwattwatttatttatttatttgagatggagtctcactctgtcgctaggctggagtgagcgatcttggctcactgcaacctctgcctcccaggttcaagcgattctcccgtctcagcctcctgagtagctgggactgcaggcacgcaccaccatgcccagctaattttttttttttttttttttgagacggagtctcgctgtcgcccaggctggagtacagtggtgtgatctcagctctctgcaggctctgccccgccggggttcacgccattctcttgcctcagcctcccacgtagctgggactacaggcacccgccacctcgcccagctaattttttgtatttttagtagagacggggtttcaccgtgttagccaggatggtcttgatctcctgacctcgtgatctgcccgcctcggcctcccaaagtgctgggattacaggcgtgagccaccgcacccggcctaatttttgtatttttagtagagacggggtttcaccatgttggccaggatggtctcaatctcttgactttgtgatctgcccgcctcagcctcccaaagtgctgggattacaggcatgagccactgctcccggccttctccagccccttccaaggaggccaggaattctgtttggcctggcgctctgtggaagctggctggcccagggatgggagggcagattgcacttggggagacagctggggggggaggatgttaggaagagtctctgcaagcccctccatgccaccctccttgggtaggggtcagctgctgagaggtggctctcagccctgttttagaattgggctggggtcggctgctgagaggaggaagatgggccaatgtttttgggtcatttccaccaagttccgggccccagaatgaatttcagaggcagcagggagaggcgggtgggatggccacaggggagggaggggatacagagagatgcaagcatggggacccctcctggtgcccaggcccagctagaagggcctcatctatcacccaataccatggcct

SEQ ID NO: 96021 - DNA, 25661 bp, Homo sapiens
  misc_feature (1)...(25661): n = A,T,C or G
tgtaatcccagaactttggaaggctgaggtgggcagatcacctgaggtcaggaattcaagaccagcctagccaacacggcaaaaccccgtccctgctaaaaatacaaaaattagctggcatgggggcgcgtgcctacagtcccagctactcgggaggctgaggcaggagaatcacttgaacccaggaggcgaaggttgagctccagcctgggcgaccgagcaagactccatctcagaaaaaaaaaaaaaagagatacagtgtgtgtgcctgtgtgtgttccttagcctcgagaaacttacaaaacagctaagtgaaacacgcactgataagctacacctatgagattttttttaaattgatacaattcttaaaagcattctgatggaataatggtagagagaacacaattgattgctccgctaaagttgtcaaaactttcagtcctgccattgtcaacatcatcttcccctcctttttctgaattatgactcatgtcagtcctgggactgccaaggtcacctttaagatgctaaaaagcagggaccagaagaaagctacactcagccagtggaagacagcttcaacaaagaagttatggaaggaattcagcaatgtgtttcagggcagggatcacatcttagtcactgttacagctcctgaagcatgaatacctttcacatagcattaagtacctaaatatttgtcaaattgaatttctggcataaaacagaagatagtaatttttggctgatgaaaacattttcccatcaatgagtagggttatgacacaacttcgcaaaaagttcaagtgtggatttgggcctctgagacacacatgcagaaatgaagatctgatcacagctggcagccctgaagcttagaacaaccagccttgaataatcaacaacatcaaagttttaatgacctaatattacaaaactaaagaacatagagaaattctaagtttttattttaactcatactaagtaagatcaaacaaaatctcctggtttcaaccttattcaattgggtcttattccaatagcttcagaactacagtaacactaagaaatatacaaaaatatatcagcacctccaatatataacaaggctatcaaactgtttatgtgccaacacactctatgtggaactggactatcatttccttccatcacttattcagccacatgcaaatgaaatgatcttatgctgcatggccctttgttaaagggctgagattttaccaagatactggcatgttagtctggtgctctaccaccccacccccgcttaacagatctggaccagagaacagctgcccaggatcagctctgctacagttttaggcagactaaaatagaagttaagagccagcaagttgccgagcacggtggctcacgtctgaaatctcagcactttgggaggccgaggcaggcggatcatgaggtcatgagtttgagacgattctggccaacatggtgaaaccgcgtctctactaaaaatacaaaaattagctgggcgtggtggcatgcacctgtaattccagctactcaggaggctgaggcaggagaatcgcttgaaccaggaggcggaggttgcagtgagccaagatcaggccatcgcactccggcctgggcaacagagtgagactctgtctcaaaaaaaataataaaataaaattaaaataagccagcaagtcaccagtaagtgattactggacaaaatgtaaacctcttcttaaaaaacacatataaggcatcaccaagacaatttctctttgcttaatataaaggcaagatctagataatttcttgacaactaagttttaataatcccctagcactccagtaagagaatcaaagtataaactgggtcatcctatgaaatctcccaaggcccacaaccagagtgtaatctcaggattaaaacctgctacaagccccagagagcttgctgcctccacaataagtactactgcactcaagaagcaacgaaagtctgacccatattaattgtgttgttcaaaacatttcaggacaaacacattaaacacttctctctatcctaccaaacccagacatgccagttagcaaaaacaactcctatcacatcaacctcacagtttctcgctctctcttcctgatccagtacctggtagacaaagcaaatagtaggtgcttggcaaccatataggaacttgacatcaatgacatgcagctcctccaggcggatgttgaaggccttgagttctttattatcgcgatctagtggaataaccttgaaaaggccatcatagagacgcaggccaatcatccggcactcagggtcaatgatgccaataatgccggtctmtgaggggcggccaatgcggtcctgagaaacaaaatcgggattagggaagaacctcaacatccacagagcaacagaggacgctgggcaccacttgtgcagaaaaattttaggagaggtattaaaactaatggatctatttgataggccaaatagttggagccccaatgtcagtgcatgcctttttcatgaaacactgaatctcaatgaattattaccctgtcccttgggtcttgagtgaactacaggagtcctttctccaaaaagctcaaacccatagtgtcttctccttatttctctgatcgaatagagagctgcccccagcactttaattttttccatgaatcatgacagccctacttagaaaactttcattggcctaaagcagccacctcacctggacattgccatgggctcgcgtaatgatgtcaatgctctcgccactctgtttatactccaggatgcaggcattgtacttcgctgtcaagataaacagcaggtccttgctctccccctggaaaccaatattatgctatcaaaagaggttctttttaaaacaggaacaacctgtccagtctttaagcacaccaaattctttaagaattttccaaattcttctctccctaaagagaaaatacatggtgagcttgtaacccacactaggtacacatacaccctaagggcatgtacaaaaagccagaactgaagctggtaaacatctagttctcactttcatgattctccatctctctgttctacatacaaagtcttcatctatttcaatctcaagctaatctcaatcatcccattcaaattctgaaagatgaatgtaatgcctcctccactcctccccaagtatttgaagaaagagaaaaaaaatgtgggaataacaacggaagctaaaatggatcaacaaagtcctacttatttaacacagactccaaaaaattgctgttttgttcaaagggttataattaaaattttgaacccactgctttcttgccagattcagttaagacaacataaagcaatgtggtggtgatttggatgaaaacatttgcgctaaaataatgaaaatactgatggtaattgttttttttgtttggtgtttttttttttggagatggagtctcgctctgtcaccgggcaatgggcgccatctccactcactgcaacctccgcctcctgagttcaagcaattcttgtgcctcagcctgccaagtagctgggattacaggcacgtgccaccacacccggctaacttttgtatttttagtagagatggggtttcaccatgttggccaggctggtctcgaactcctgacctcacgtgatccacccacctcggcctcccaaagtgctggggttacaggcgtgagccaccatgcccggcctggtaattgttaacataactgtaaatgcttgctatatgataggccctatgttactgaatcatttcatcgtcacaacaacccaggggatttgatctgaaaggtgccttaagtggcacctaaagtcagaattaacaagaaatgaagccaggactgccccactctgtagcctatcctctgaaacaaactgctttaatttctcccttctaaagaagtcaacttcataaatgtttccctaatgaatctctccttttacttctagaaagcttggtcaagagtacatactgaaatttgctatccaaagagagaaaaaagagaagagtttttctcctaaagcatattccacccatcccaagaattcgcaaaacaacctaacacagcccaagcacggtggcatgcctacaataccccagctactctactccagaggctaaagtggagggattgcttgagctcaggagttcaagacatcctgggcaacactgtgagacccccgtctcaaagaaaataaataaacaaacaaaaataacataaaacaacctacgaccaacagttccccctccactgcttgtcccaactgcaacacttaccttgggcctgaaaagctccatgaccgcaatcttcccatacatgcccacctctttgacgggccgaagcccctcggcggtgaccacatagatctctaatctcgtgtttttggcaatcaacaggtttaagtcttcggccraagtaaagtgtcctgaaagaacagaccctctaacttttgaactcaggggaagggcctcccatcccttcaaaataatcctatcacttatgtctaaatacctccagaattctcatttacttcacatacttctccaactccctccagctactccccttcttgccaaatccggcacctcaaagagtctcagttcatgcattcaacaaagctacttccctaatcagactaagaaaactggactggacctaagagccgtgtgtcctccaaatgacaatgactgcgtaatcccttctcatgcctcttgcccctccaattttactctattacagttacagtggcaggctctaattgagaatgccggagaaagtgttcacttcttccagtcttcatctaaagtctcacaaaacttttatctgacagaccaagtcaaatgaagaaaagtcccagagctttatatgaaaacactgttttgtccacaccccctgccctcctggcagtctaccaatacctccatccacactcagctacctccaactctgaacaacagttttgttttggaatcatgattagggtgtatataaacatgcaagcttggggtctgcatattcagctgagaatgtgggttaagatgactcttcccgggttctgaacatcggtgtccttaacaatccaagcgcatcgtcaacaaggcaaacccagcactgggccaggcaaaccaaaccctcttctccagcagggccctcatgtaaacaacagccccaggcaaaggggttagcctgaagagggctcctctccctctgtgggataatgcgggcattcctcacatccctccacctcctgggccccccagacttccccacaggaaaatcttgaccccaaagtcgtcattaccacctccccttttcctggccacagaaagccaatctccaggcccaaacgacaccgcacaaccaactcacactcctctgtctcactgggcccgccctgttctcgaggccgaatgacctccccaggacgaaaggggaccctcgagagcggcttccaacccccaaaaagcgcgtacagggacgactctttcgaggtcgcggtgctgggggaggttcctcggccgccagcgccttccattcgccgggcccactcctgcccggccgcccccggggcgcgggcctccctaggccgcggctccccccaactccctcactcgccggggtctccggccccggcagcctcaccggtcacgcagccgttcacggcggtgggcttctgggccgttaccacgtagttgtacgacatgtcgaggcttggagcggcccgtcgggactcgagcgcgacactagaaagagggrcacaagcgaaaagacaggtggcccccaacagcgcgcagcgaactccactgccgctgcctccgccccagagacacgttgcaggccagagcggccggggcgcggggcatcacgggacggcctcacctggcctcttggaggactcccgaagcccgaggccgccaaccgaaggaggccccgcccccggaggcaccgcctcgcctctttccgccagcgcccgcaggacccggatgagagcgcacgcttcggrgtctccgggaagtcgcggcgccttcggatgtggcggatgcggccgtgagccggcgggggaggtgcgccagtgtcctccgagctcgcccgcagactccccaccccgttccgcgccctttgcccttccccgcatccagtcctccttccgttgctccaggagccctcgggctgttcctcctttgggaacgggaaggactgcggaggcatagagagggaagggagaccgcgattcgtgcatatcccagactagaaccttgcctgctttcctttcactgtctcagttcctccagatccagctggtgccctcgcctgacgtttgaacgaccacctgctcacctcctcccttttgcgcgttgattcttcagacttcaaagggcccaccggtctgcttgcccaacgttattagtgcccctattgctctacaaattcgaacctcaaacacaaaaccagtatttctccgtagggaaccttaatgagccaggagagccgtcagccctgcagcctccagggtaccccacatcaaacaggctccccgggaacaagaggaataccacgtggcttggcacactcgcagaatgccagagaggagccaacccccattttacagatgaggaagctgaggcttagggaggaattggtttacctaagaccctccccacaaccccaagtaggctgaggcagagctatgttgattcttcctattgtgcacccacacagaggccaacacgctgctgaaccaggctgaactgaggaaaagctagaaagtcatcgtggtttacatcttgcctttcccatagcagagactctgcctgactttggaggcactgaattatcagtagtaaaaacacactctgtagaaaaactagacattggtttagattctggctgttacctgtattaccttggacaagtccctagagctctctgagtctgtttcccagaagtaaaatgggtcacaaacctggctagctccccccattcccttcccttttggtgccaaggccagtgagggcaagcgtgtgacgagctttgttaactttttcgctgcatgtgatgcccgtgtaaaagatagttattctgaggatcactgtcctttagtgatgaagtgggtgctgttcctggacataaaggcagacctgtgcttgacatggattgatctgtcttctggcagtgaagtrcaggcatgaaccttggtcagccccacactcttctccatccgtagcccatgtactagagtttggacttggaccgaagtctggggcagctccctaattactagggtgctgaaggcgtgattgtgccagtcgactgcgagttccttccrcagcttgtatcgttacccactcctgcaggtgctgctgctgcctccactgtactcagacccaggtagcacaggattgtccatcctccagcagctcagtgcaacggtgtgaactcagcctgtttcagagcctccacaccatggtgagtcatacagggccgggacgggaatggcagcatggtctcaaagcaggatcccagccttgggcaagctaaagctccttacactttgactgagagatgctattgcctcctgaggctcacgggtgaagagagagggtcatcctctctcccagggtctgatccctgcttttctttgtttcctggaggctgctggtcccagccaggcctggggctgcagcctcttgagtcccttcagagccactctgccccttatctgggtcttgcattcagagtaaaacagtaacagttacctgctctgtaatagacattgtaccggtcacagaaggaatcgtgaagaatgaccatgtgaccgttcctaaccttggggcttatgtgggccggtctggagctgggatctacagtgtgggaggctggccaygtccctgggctttgctccaggcccactgatttgaaccaaaacaagccttgaacatatctggattcaaatttcagcctgccactgaccagctgcatgaccttttacagacctctctgcgcctctttttcttcatctgcattataaggcaaattaaggcctacctccagtggttgtgtggtgttgatcaagcagagtcctggaggcctcacttgacttcctttccttttccatcctttcaggccactgaaaccagggatagcactggtccctaaaccctcttctggctctgtaaaagacagattatcatgatggggagcaggccactttcttggagggtagtgctgctggaggctgggcttggagtgaggccaactcacaacttcattgtgtgttccagtccctggtaggctctgagagccacaaacccatgtcctttctagggcaacctctgtcaccctccacttccctccagcccctcgagaaagcagcatgatatggccaaaagggaaccagctttggagccaggcagacctggacacctgctggctgtgtgaccttgggcaaaatagtttaactgtgcctcagtttcctcactgggctcatctttcctccatagggctgttgggaagttttgttttgttttagtttgggtttttttttttgagacggagttttgctctttttgcccaggctggagtgcaatggcgcaatctcggctcaccacaacctccgcctcccaggttcaagcaattctcctgcctcagcctcccgagtagctggaattacaggcatgtgccaccacgcccagctaattttgtatttttagtagaaatggggtttctccatgttgatcaggctagtctcgaactcccaacctcaggtgatccacccgccttggcctcccaaagttctgggattataggcatgagctaccacacccggcctgttgggaagattaaatgagacatgctcaaaaacacttagaactgggcctggctcttagtcactgctcagcaaatggaaccartcttattgttcttcttgctccctacagacctaggctactctgaagcaggtggcttagccctggccctggctggatgcaggacaggttggcagggaggcagcagagccaaattttgtacaaaggagctggtgctagcaagctcaggaagaagccacagccggaagttcaccttgccaggacctggctcagctgcaggttcccaccgggccaccaggtggcggtgggagcccagccctctgagtccacgttgggccccagtctcactctgtcttcaggacaaagccaggggctgcagcccttgttcagcagmctctggcttttcacagcctgtttgaaaaagggagtagcttcatttgattgagtttccactatatcatgggcatatactctgttctagtaaatccctattttacagaggaagaattttagctcccgacaatgatgtatcttccctgagttcctgcagctaatgagaggcagaagtgggatttgaacccaagtccctgtaacagcagagctcaagccacactccattctggcccccacgctactcacttctgtctgcaccctgtatccactcagccaagcctggcggcactgctctgtaaccctccaccagcctgtccacaacccctcctgaggctgcctgtggccagtcctctcctccccaccccttcctgctggtcacccgtgcttcctggcaccaccacactattcactcatccaggccttggcttatgctccccctctggctggaagagcctcccttttccctcctcccatgtctcctgccccctttttccctaccccggtcctgcttatccttcccagagacctccaggcccctcgggaggctgcggcccctcctctatgctcccatggtgcacgtgcgctcctcgtgtagcagtgcccactacacatggctgtgacctctgctgtgtttccactgagggcaggaacagcattgttatctctttttttatttccgagatggagtctcactctgtcacctaggctggagtgcagtggcacgatgacagcttactgcagccatgacctcccaggttcaagtgatcctcccacctcagccttccgactagtgggactccaggcatgcaccaccatgcctggatcatttttcatattttttgtagagatggagtctcatcatgttgcccaggccggtctcaaagtcttggactcaggcgatctgcctgcctcagcctcccaaagtgctgggattacaggcatgagccactgcacctgagctgttatctctacacatagtgtctagtgctgggcctggcataccaagaggctggggaaatgtttgccccgcgttggagcaccagggagcagcggtggctgtggaacctgctcagctcctcccccagcataggagcctcagcctgaggcttttcttccttttgacagaagaaggtgttgggccccagttttattaaaatattttacactgcaggcaaccactcccccattttctttgtattgcagccattttttcagaataaattgaaggtatggtgcaagacacttcataaattaggtactgaatagaaagtcacacattactgaaaactcacagaaatacccacctaagatgtcgcccaactcaaggaagtcctgtgctcctggagttcctaggtggatgcgggagaggggtctacaccacagcagtgtggctgygcaggatgggggtatctgtactgascacattctgacctccttctcactcctcccttgcagacctccaagaagctggtgaactcggtggctggctgtgctgatgacgctcttgctggcctggtggcctgcaaccccaacctgcagctcctgcagggccaccgcgtggccctccgttctgacctggacagcctcaagggccgggtggcactgctgtcgggtgggggctctggccatgagcctgcccatgctggtgagtatcctggggtggggcagggggtactagtggagtggacagggcctcctgggggatccttagtgctgccatgaagtgcaggatggagctcagcccagaatcaggaactggggtacttcccactctcccactccctccggctgggatcaggggcccatcacggcctctctgaatctgtttctacatctacaaatctacgaagttgggccaaacaatctctcaagtccttctagctctgagagtcggtgattccatgaatcttctggaccctccaagcccagcagacccaccccgattccatgaaggcttcctgactcttccagcctacagcagcacccctcttctgaattcccacctgctgtgtcccacttgtggactgtcctggcttctttcctgtgtggagccagggacgcagactctccttgagggctgctggagggcagggactaggatgcgcgtcatttctctgcttcctgtcttccttcagcaaaatccattcatttggcaaacactcatgagcccactgtgtacctggcgctgtactgggcactagggataccagacaggcaaggtccctgccctcgtggagcttatattctacttaggggagacagacaataaccaagtaaacacgaaagtaaatgagatcatttcagagggtgctaagtgacttagtaaagacagtaaaatggggcaaaggaacagtgagtccctggggagggagctggtgactgcttcaggctgggaggtcacagaaggcctctctaagatgcctcctaagaaggagtcagccatgtgaagacctgggggatctttgagcaccaagcacacagtagggctcaccaaaccatgacccccggagtgtgggaagccccagtgactacaggcgcgagtcccacccagcatgctcactccactcnttccacctccaggtttcatagggaaggggatgctgactggggtcatcgcgggagctgtgttcacctccccggcagtgggcagcatcctggcagccatcagggccgtggcccaggccggcacaggtaagcctggcatgcaggaggggctgcggcagggagggcacagtaagcacactgagcccttycggctgctcccgcagtggggacgctccttatcgtgaagaactacactggggatcggctcaacttcggcctggcccgggagcaggcccgggctgaaggcatcccggtggagatggtggtgattggggacgacagcgccttcactgtcctgaagaaggcaggccggcgggggctgtgcggcacsgtgcttatacacaaggtgggcttccaccggggacgtggagactggccagccctttccagccttcccttgcctggcagcacccagtaactggacctttccagcccttccccaagaagctagttctttttctccagtgttccctgatctcagaaggccccgccatcccctcagctacctaagcccagatacaggcattttcccagactcgtccccttttcttctccacacccaatcagttgcccggtcctggtgcttctcctcccaaatgtacaacacacatccttctcagaccccgccctcctgctttgccttggttcaggggtcatctactcatgcctgatggctgcagccacctcctcactgggctcccctgcctgcttcctgccttctggccttgctcatccattctccacactactgccagaggtgtctttttaaaatgtgtatctgactaggttattcatccactgaaagccttcttgggtgcctacaatcaatacaagccctcaccatagctccctgactccccaccttcatctcccatcatccctgccttcctcttttttttattttcttttatttattttttatttatttatttattttttgaggcagagtctcactctgttgcccaggctggaatgcagtggcgcgatcttggctcactgcagtctccgctgcccaggtttaagtgattctccttcctcagcctcccgagtagctgggattacaaggcgcctgccaccacgcccggctaatttttgtatttttagtagagatgtggtttcaccatgttggccaggctggcctcgaactcctgacctcaagtgatctgcccgcctcggcctcccaaagtgctgggatgacgagcgtgagccaccgcgcccagccatccctgccttcctcttatggtctattcacgccagctcctgtacctgccaggctatggatcatctctggctttgcttatgcagtatctgtggcctggaaaattctttccttgtccagcctccttttggcctggctaactcctaccattctacagaggcccagctctgatgtctccccacctggaaggctctccctgatctccatctccccactaccctgagctggttggcagccagtcctagtgtggactccatcactgtaattaccacctcacataaattttcaatttatgggtatctgcttccctagcctctccccaggctgtgagttcttgaaggtggagactgtgacttagtcgccttttttccttttcagcatatactagatgcttggtaaaaattgggtggatggatggatggatagatgggtaaagtgacccaaaatagcaaggctatgggagagagaactctggaactctagagttgggaaactggccacccactggctgtgtgacattggacaagtcaccgcccctctctgggtccatttccccatttgtaaagtctcttctgactccaacagactggaattcttgaagattcctggcaggtacactgtgaatgaggggagtttgctcttctgccctaaatgtgatgggccaggttgagtgtgaaaatcctgaggttcccccttcccaacaagaaattcatcccctgcctgtcttctaccccacatggtacagtgwtaccctcccccctggggcttttacctctttgtggctgcaggtggcaggtgctctggctgaggctggtgtggggctggaggagatcgcaaagcaggtgaacgtggtcrccaaggccatgggtgagtgctggcctgggagctggggaagagagtggggaaggttggacagycctggggcgaggagcaggttcctgttggctgcctagcggtgctccccaggttattccccaggggtctagggagtgtatccctgggggagctcctggggactggtggccttgggtaccatggctgaggtggagagtctggcagcctttctcagagaagagggtacctgtgggcagggcctctgagatgctgctgccacccttcctgatgcccagtgctaagagtggaacagtcatcccttcatgccttgtttctcataggtaccctgggggtgagcttatcctcctgcagcgtccctggttccaaacccaccttcgagctctcagccgacgaggtggagctgggcctgggtaagcttgtggccatccatcccagccctgcctgctccttggccctggactttgcccaccttgcatacccttagagccatcaacctggtcctctccccaggtggtcttagtatttttacctggtcatttgaggcccagcctgggccaacctgcctgatttctacctgctttgctgtctatacccacagctttggccatgtggagctctgtgcactgcccacctcctagcctttgcctgccattcccaggtcctcctgtccctgccagaatacacccttctttcaacggctrttcaaagatcacctggctgcaaagctttctttcctcgcctgtgcttcctccttaactatctctagttaaagctatctccaccaccaggccacaagctcccagagaacagagatcgtgtttttcattattctgtccatttccatcccccactcccgcccacttactgtgtgagtccagcactgtgtgagtccttgataaaaacgatgagcaaatccccaggccttgagtgggtcagcagtgaccacatctatccgcagggatccacggggaagctggtgtgcgccggataaaggtaggtggtccctctggcacaggccgccctaaggccaaggccccccagatgcagctcattcctggctccctctgacagatggcaaccgccgatgagattgtgaaactcatgctcgaccacatgacaaacaccaccaacgcgtcccatgtgcctgtgcagcccggtgggtagcctctcgcccgcgtctcccaacccctcctanacctctggggaggagacgcccagagggtctcacctggggtgtcatgtctacccgcaggctcctcagttgtgatgatggtcaacaacctgggtggcctgtcattcctggaactgggcatcatagccgacgctaccgtccgctccctgggtgagccatgcactgggaaggggatcctacagccctttggaaagggctgagggagggtcttgtgatggcagagaacacggactgtgcgtcagataagcctgagttaaatcgtctctctgccacctaattgccggataccttgagcctctgtttgttttcttgtctgcaaattgggggtaataataatggtacctgctttataccgttgttttgaggattaagtgagattaaacatatgtaagacactcaacacagcgcccagcacctggcacgaactgagtaaatgagacctgtaattactcatcttccccgacgtaggggacacctccagggaacgtggtcatttgtggggttattgagggatgcctgccaggaggaaatcaggacatctccctcccgacctcagagccccagcttccaaggtccttgcttttctgttgttttctttccctgatgcccatttttcccttttggactgccacactctggtattgcagagggccgcggggtgaagattgcccgtgccctsgtgggcaccttcatgtcagcactggagatgcctggcatttctctcaccctcctgctggtggatgagcctctcctgaaactgataggtgagacttggaacctggggtcacccaagccagggctccttgtaactggaaggagccagggagacttggagaccccgtcagggctgaccrtgacaatcagggctctggagcctgtgaagaaggctcttcctgggcttctccagccttctccagctctcactggactagaaggagttggtattaggatcctcctcagagaggcctgaccctttcccagggaccctctctccatacccctgtatacagtaggcactcagtccatgcttgtcgaggtggactcccttcctccagggctgctgagaaagccaggccaccagggtcaggatgggagggtccaagccctgctgaatccctggctggacagccgtgtctaagagagttatcttgctgcccttagatgctgaaaccactgcagsagcctggcctaacgtggctgcagtctccattactgggcggaagcggagccgggkagcccctgccgagccccaggaggcccctgattccactgctgcaggaggtaccaacccctgcctttggggaagggacaggcttcccaaaggatgcaggagtatacggtggggcgggtaggggccctggcacccacacctcccaccatagtcaagtgtggttgtgagaagggcctggtgggcctgttcttcagcatcctccctttctaggctcagcctcgaagcggatggcgctggtgctggaacgggtgtgcagcactctcctgggcctggaggaacacctgaatgccctggaccgggctgctggtgacggcgactgtggcaccacccacagccgtgcggccagaggttggtgccagggactttgccaagtgaggtcattcacaaaaccttagccccccttccacttgtttccctgaaggcagggaccttcctttttttttttttttttttaagaaggaatctcactctgtcgctaggctggagtatgcaatggtgtgatctcggctcactgcagtctccgccccccgggttcaagtgattttcctgcctcagcctcctgactagctgagataacaggcatgcgccaccacgcctggctaattgttgtgtttttagtggagacggggtctcgccatgttggccaggctggtctctaactccccacctcaagccatccgctcgccytggcctcccaaagtgctgagattacaggcatgagccaccacacccggccgacagggaccttcttaacaccacaaatgtatgaggttgttatcttagaattaaatgaaatccttcacagtgaataacttacaactcaaggcgaacttattctgttgtccttatttttctcagtttacccagaccagtgaaaagctcttaactgtccagcatcattcattcgagaaaaaggtatttggtgcctgccgtggggcaggcactgctctcagctgtggatacagtagtgaacagagcagacagaaatcactgccctcatggcttatgttctaggtggaagacagtcaaccagataaatcagtaaaacacagaggatgttagcacaaagggctaaggagaaaaaaaccaagccagggagcagagtacagagcgtcaagtggagggcttcggggcaggcctcacctccccaggcccctttcggttacgcagcccagcccctctccagactgcacactggatgtggaaagggatcttgggaagccttcattccacttccctgtcggccttttccagccttcattggtgctggctggaagtctggcagatggagggaggatctctgaattcctccccatctctctctgcctgcagcaatccaggagtggctgaaggagggcccaccccctgccagccctgcccagctgctctccaagttgtctgtyctgctcctggagaagatgggaggctcatctggggcggtgggtgcctgggggctgaagggctgacagggaggtggctgggctggctggggtccaggccagcaccacatgctcagcgttgtcatcttcyccagctctatggcctgttcctgactgcggctgcacagcccctgaaggccaagaccagcctcccagcctggtctgctgycatggatgccggcctggaagcsatgcagaagtgagccagagccctgtgcatcagaccaggggtgggctgggggaggtgtttggtgacatctgcgccctgccaggccctagcccaaccctcagagtgattcccttggttccctatagtgagcctctttcactctctttccctgccaggtatggcaaggctgctccaggggacaggactatggtatgtactcaggctgtggcctcagacctttctccttttggccctgtaagtctaaagagcaccctcggttgcagggcccgtgctcagccccctttccttcaccttgtccagctgrattctctgtgggcagcggggcaggagctccaagcctggaagagcccaggagctgatctgttacaagtcctgaccaaagcagtcaaggtgagtgaggctgggcccagccacctggggagacaggcttctagccagcasactcctgtctccatgtgaccctgagcaagttaataaccttcctggaccgcagtttccttctctgtacaatggagatgagcacctatctcagaaggtsgttatgtggctaaggaaatatgtagagccccgcacactgcctgggatgtgacagggcctcagtgaatggtgacccttttccctgctggaagtagatgagaagtgactttccatttggtgacagagcagagggtgctggcagagccagggcaagggcgtgcagggccaggctgcacggcagagacgttctgcccatggcaggaaggaggcggcctggtgatctgcccttgaacctgctcccacaccccatcccccagagtgccgaagctgcagccgaggccaccaagaatatggaagctggagccggaagagccagttatatcagctcagcacggctggagcagccagaccccggggcggtggcagctgctgccatcctccgggccatcttggaggtcttgcagagctagggtgtgtgactgcctcccttggcctcagytcctctcactgctgtgctgaggtggcctttgtcacttccttctgccttccaaccctcaccttcccccggcctggccccattggcccaccctctaagttgagcaggaaatcctccaccaagcttccagaactacagacagcacccagagtgagctggagtgggtccccatgcctctccagcatgccctttccctttgcaggagggtggagtccctgggtcatgccctcccctgccagctctgggcttcagagataaggcattttccttgtgcagcctttacctggcaatcctaatttggttttaagactccctgtgaaatgctttccgcaccttaaccccagtgagcgtgaaaaagaaagttaataaactataatacatggaagcaagaaagacactgcctcctctgagggaccttttcccaagcatgtaaacaagggggcccacagccctggctgcaggcatcatgacccatcttctaccaggcagatctttattacctgagcccctaaggcagtgtctcctcagctgggctgcttccactgagacccccgacccatcccctttccagtacacacacctgatgcatgtaagaatggtagaggggcttttctyagcattgaattaataattcagtggctcctcgggagtcgaatgggcatttgggacaccagaaggaaaagaaatcatcatagtctaaggttcagttgtagatcaaaaaatgcagccaggccgggcacggtggctcacacctgcaatcccagcactttgggaggccaaggcaggcggatcccttacactcaggagttcaagaccagtctgggcaacatggtaaaaccctgtctctaccaaaaaatacaaaattagccaggcatagtagtgtgtgcctatagtcctaacttgggaggctgagttgggaggatggcttgggcccaggaggtcgaggctgcggtgagccataagcatgccactatactccagcctgggcaacaaagcgagaccctgtctcaaaaaaaaaaaagaaactgcagccaagccagcccctaggtctctttctagagcgatcactgatggcaccagggtgagcaggggcactgtatgcatgtggagacaaacagcacatgcctggcacacatgtagggtagggagtggttaaaggcactggctgtcgactcatacacatgatctgaaatctgattctgctttaacccggctacaggagctaaggcctattttttagccctttgggatctgtaaaatcagaatggtacccacctcatggggacatgaaaggattcaaatgaattgatgaagatgggccataaagcccagcacagtccaagtgctcactcactgagagttacggttatcacaggggttgggcccccagcccctcccaggtcatctgctctaccactagctggtaggaaagagcctcctgccctcccaacccccgtcacctacttggcccaaatttggctgcaggctccccgagtgcctgggcttctctacccagggtcctgtctgtcggctgcaccatacgtccctgaccacaaggcatccacgtgcacaggagtatgcgcccagcagctgggaaggaggctgacctcagacggtggcctgtggatcccagctctgtcatttcctggctgggtgacctcaacctagtcaccctttttgagtcttgttttctcagattatgaaataggaaaaatttccttcctcgtgagataagcacgtgccattagctattaaggacacgcacataaatgagctgcatgtgaatccacacatgccattccatgaagacatcaaagaggatcatgtggatctttggtgccttccggttggcccctccctaggtctgtgagggtcagacctgtcctgaggcttttacaaattggcccagaactcatttaaccacagcatcatttcattagagggctgttattagagactgaatgtttgtgtcccccccaaattcctgtgttgaaaggctcacccccactatggtagtgttaggacgtggggcctttgggaggtgatggggttatgagggtggagccccagagagctctcacgccctttccaccatgtgaggttatggtgagaagatggtctctgaggaagctggcccttgccacacaccacatttgccagcgccttcatcttggatgtctatagcctccagaactgtgagaaataaacacttgttgtttaagccacccaggctattatatttttgttatagcagcctgaacaaagacagctttgattcttaacatatttaatgaaactcgagcttcataaaccagtgaaatgcctacccctatggagatggggagctggtcatgggacccaggtgcctggaggacatcccagtggctttgaaggctccagccagtcaagacggtcaatattagcccttctgccaacatctggcaatgtgaggctggggtggacgttggcctgatgttgccaggagtaggatgctgatgctgccagagagtaggtgggctccaaaccccaggcttctcwcttgcttactaagcacagcagtctgaagcttgggacctggcagtgcgtctttggagaaggcaaaaaagccacagcagcaacacttaggagcaagacccttcccgctctccaccctatttcctcccctgaagaagagcaacagctcaagctctagcatggcacagaacgctaggttgggccaggcaagcagccatggtggggccaggtgaagcaatgtgggtctcagcaaggaacccctctgaaggtggcagtggctcccagggctgctgcacactggacaccacaactttggcatcagctgcatggtgagctgcagagtggtcagaggggctggggccctgccaagagagcaaggccagacctgcccagcgggaggcaggaaggccctgatccagcaaggagaagtagaggaagtccacagccacctctgttactcatcgctactgggacatctggggacaggctctgttcttgggagagcaggtcaccaggatttgtagggctgcctgccggtgacagacacgtaagtcacagggaaaggccgggatccaggcctcagctgtagcagcagctggaagaggtggagccgcacggtcacaatacatgcagacacagagcagcaatacgaaacagaacagctcagagcggtcagctcctcagcagaagctgcrtgggccgccactccccctttctgcaatcaccccatgatgtctccaccccacctcacatccagatggggctggatggcagagcagatgaagcctgctctgtggcggggcagcctaactgaaatgcacacctttatgggggaagtggacggacacctcacctccctcatgtttcacaccgtggactgcacttgagtcccagctcttcaccacatccctaggagtcttaagaggaaatcagtctgatttcttcagacaggagcagcaagagcggccagagcgaggaggacctcgtgtgaatggaggacctgagaggctgacgccaaggagtgcagaagccaaagccaccaaggaaagcagacaggcagcaagcagccagagaaggcaggcccagcacccaggcaaagccaccaaggaaagcagacaggcagcaagcggccggagagggcaggcccagcacccaggcaaagccaccaaggaaagcagacaggcagcaagcggccggagagggcaggccagcacccaggcaagaagtctgggcccagcattggaagaaagtcgcctgctgaaaccagccgggagccctgggaagagcagagcttctgaggggagcacaggctgcaccaccaggagctcttgggagccccttcctgctgcttcactccccatcatgcagcaggggctggaaagagaggcagatgcccaggagttaatgacatgatgcaggagtcacaccaggcccaagctgttcagacagacccccagcctgcagggtggtccccatccaagccaccaaatccctcagggaagccccaaagtccctgagcctggtacacaccccgtctccctacatcccatcaagacctgctctgagcactcagctggtcaccaggcacccatcccactagactagcccccaggctggtaaaggagaaatcacacacccttgtcacagtcaagcccttccttggggaagaagataaggccacacttcaccccacagaaccacagtgatttgggggggaaattctgtctcccaatggacagactggggagtcccagcatttcactgggatgcgctggtttgggaccagtgctccccatcagccaccctaactccaccctcaagttacttggtttcctgctgtgccacagggtaagtcttcttgtcaaggccccagcctttcgtgggagatccttctctagacctggccctgtcccaccctggaatgtgggactggaacccatacctgtctgtcggtcaggatccccggctctgggcgcttccaagatgaagccagaaggatgtagagcaccagcagcccaaaggccaccaccagcatcccggtgctgttggcaaagaccgcctcactgggcaggctgtggtatggcctggtggtgtttttcctgaagatgacaaaacaatgtgagccctcgagagatttttccacctatttttgtctagtgggagactcgatgtcactaacagagggtgagaaaaccttcccgggtccatatgtgatctagaattttaacaccctttctttttttttttttttttttttttgaggcagagtcttgctctgtcacccgggctggagtgcagtggcacgatctcggctcactgcaagctccgcctcctgggttcacgccattctcctgcctcagcctcccaagtagctgggactgcaggtgcctgccaccacgcctggctaattttttgtatttttagtagagacagggtttcaccatgttagccaggatggtctcgatctcctgacctcatgatccacccgcctcggcctcccaaagtgctgggattacaggcgtgagccactgcgcccggctgaattttaacaccctttctaagtccctgcaaatatttgtataatgagccaggtgcagcggctcactcttgtaatcccagcactttgggaggccaaggcatgaggattgctttaccccaggagttggagactagcctgtgcaacatagtgagatcctgtctctacaaaaataaaacttagctaggtgaggtggtccatgcctgtagtcctagcttacttaggaggctacattgggaagatcgcttgagtgcaggagtttgatgctgcagtgagctatggtcacaccattgctctccaacctaggcaacagagtgagatgctatctcttggctggggggataaaaggagagagagagggtcttcctatgttgcccaggctggactccttccacctcagcctccctagtagctgggactacaggtgcatgccacggcacccagctgtaataatccttttacccatgaggaaactgaagctcaaagcaatgaaattaacttgcccaaagttgcataactagtaaatggcacagccaagatcgaaaccaaggtctgaccttaagtcctagttgcttttcactacaccccattgcctcaaaagaacggacagtagtggtcaggcatgcaaggctctagagtcagactgcctaatctgagtcccagctctgccacttactggctgtgtgccctcgggtaagttacgtaacccctctgttccctcattttttttatttttatttctacctgaacagtcctattgcagaatctgttccctcaattgaaaatggcaatgacggccgggtgcagtggctcatgcctgtaatcccagcactctgggaggccgaggcgggcagatcatgaggtcaggagtccgagaccagcctgcccagcatggtgaaaccccgtccctactaaaaattcaaaaaattagccgggcatggtggcacacacttgtaggcccagctacttgggaggcagaggcaggagaattgcttgaacccagcaggtggaggttgcagcgagccaagattgtgccactacactccagcctgggcgacagagtgagactccatctcaaaaaaaaagaaaaaagaaaatggcaatgacaacaataccaatcaataccaatgatgtagggtggttgacaggattaaatgtaaggtgcttagtactgtttctgacacacagcaggtgctaaatcaaactgatgctcaataaatatctgctgacttaccaatttcaacctaaagaaagatcaattctgttaccttccagatcaggagtggacccaaccccaaaatctctcctcccttgggtgagtcctgtgatcacagggtgtatcttttgaagaccctattccctcctcttcaccttagagttggggaccccactgcactcacaaactgaagaaaagcttctcattaatgcccgaaatgacggatgcgatggacagagagaggatggcggctccaaaaaagacgtggataggttttaggaggctgcgcagccacatggacgcccagggcaggaggaagacagcaaagcccaggaaccactgtggacaaaagggaggacacacccgactgtgctatgtgtgaccaaagcacatcccaccccatcagtgcctcctccc

SEQ ID NO: 96022 - DNA, 78568 bp, Homo sapiens
  misc_feature (1)...(78568): n = A,T,C or G
aatgagtggatgggtaggtgcatgggtgaatgaacagactgagtggatgaataggtgagtggatggttgggtgggcagatgggtaggtgggtgtgcaggtgtgtagatgggtagatgggtgaaaaggtagggggaagaatgagtgtgtgggtgaatgggtggatggaacaccttcaagaggacagactctctcctctggttgttggtgtccagaaagtgcagatgaatcacactagtcagtaaatacccgttttcctttgagacatctgtgtttactctcccatagctccccagtgccccaaggagaaaaactatttgctaccatacccatcagcgagcaaacacaaataggctgcttaatgagatgcaaggatctcccaatccgctgggcatttcaggggaagtgctggtgatacccaaactaatggggattaggcagaggtggaaaaaactcccagagcttcccctaggaagctgtcagtccttgttctcctccctcttgtcatgaccaccaaactgccatcactgtcaccacctccagcatctcctctgtcaccacccccattacaaccactaccacacagatttttgagattctgactgaaaattgtgtttaccaggtaaaagataggggcttgtaggcgcccctctggcaagagagaacaactcgtctcttggtggtgggtaacattttaacccctgggttaccagcaaagccttgtggtccagctcccacttctagcctgtttggtcctgtgatccattcatgttaccttatagcaggagggacaaggaaggcagggagagaaaagttctggcagtgcagggaaagtcgctgttttcagaagcaagaaggtctgaaatcctactaggagaagccctggtgatccagagctgactccaggtgtcctgaggtccatttcacatggatttgctagacyttgcaactggctaatttctccctctgtgacagtctgcagcctagcctccagagcttttctctggcctccccagacaggctgagattgtgctatttgggtaaacaacattccccgcggttgtcagagacagacttatttacctggtagcagcagttccttcctacccacctcgtcagatgcatcaggactcagggtgggaaccagcactcatcacattcaagggtggaagacccagcatcggaggggtgggcaacagacctcacacatactacgggatccagggctgtgtattgcaaagtcacattcactgtttagctcggaggcctctctggactttctacgtctgggaataagctaggctaaagctatcatgccccagagctgtgatttcatccagttatcctataccctgcagccaagctaaaatatagtcactatatctccctcggccatgagcagatactttatactttaaaaccctgcatgctttgaattcccctgactgcttagccaaggtgtcatattggctcccactatctcaggcagtgaggaaaggtggtcactcaatccctgcctccacagggcaatacagtcaggggatggtgctcagcttaggaattctgcagttgtctttctgcaggcagctctaccctactgcagttactgaccaagccatcccatcctgcagctgctgggagctgagttggggcagggtacagctgtgccagctgtcggagatagattacactatgaagctcggctgtgactcacattccagcacaggggaaatgcgcaaaagttctatgctgtctttggggtgctaaaaatcatcctggctttgtcttgcaagatgttcggcttgcggagcatggggcagatggaggacccttccatctgggtcctccatggggaggaggcagggggcagatctgtctccagccaactgcctgtcacacaactgccacagctactaataacaacactcagcatttaatcagcccctttgtggatgcagacgctgtcacactcattaattagttaatctgcacagccccgcaggaggaagagtcatgttattatccccactgggactcagaaggaaactgaggccagagtgggaacttggcacagagcggagggagcacagcctgacagctggactgggaccagtctacgacttgtctgttctggtgccctcgctcttgtcctcctccccagctcctgtctgctcacagtgctggtgactatctccaaagacacctggccaaatgctgtcagaactgggcctgaaggtgctcagagagaaggccaggcatggctttggcgtggagaggatgcacctctggtagctggaccaggtcaggtctgtggggagtgtgtgctctggaacagccaccctttctgatatgtttcttccaaagcgtcttggaactagaaatagaagtgatgagggtgcccctctctctcatcaaaatgcctgtttcctgtgcaggcggctctgggttttgattgtgtgtctggtggttttagaatggaagggaggagcaaatccatcaggaggcaccattgtggttccactggaaactgggactggccatctggggatctttgacacacgcagacacacacacacacaccatgggtagaacccacacccccgtgaaggacctcttacatcattgtacccagtggtcgatgttgctggaagcctgctgagatgccttacagccatggctcagccctcaagaagaaggcttaggtcagtctgtcaggcaaagaatcctgactgaataagaatcgggcaggagacctgcagaacacagaaataaggcgttagaggatggaattcgctagtaccttctaggagtttgtgaccaattgcaaaaataaagactgcagtccctccctgtctttccttgcttgttactagagttgttgaagattaaatagttgaccatttccccctttaagaaaatatgaatcacaatttgaaaatgtttttgttatctttccttttcctttcacctaacatttatgtgtgtatgtatttttttgagagggagtcttgctctgtcgctggagtgtagtggcgtgatctcggctcactgcaacctccgcattccaggttcaagcgcttctcctgcctcagcctcctgagtagcttggattacaggcgcgcgccaccatacccagctaatttttatatttttagtagagacggggtttcaccatgttggtcaggctggccttgaactcctgaccttgtgatctgcttgcctcggcctcccaaagtgctgggattacaggcgtgagccaccacgctgggcctattttttttttttttttttgagacggagtctcactctgttgcccaggctggagtgcagtagcgggatctcggctcactgcaacctccacctcccgggttcaagcaactctcctgcctcagcctcccgaatagctgggattacaggtgcccatcaccatgcccagctgatttttgtatttttagtagagatggggtttcaccatgttggtcaggctggtcttgaactcctgacctcaggtgatccacccgcctcagcctcccaaagtgctgggattacaggtgtgagccaccgcacccggtcacctaacatttataatagtggtgtttctcagcctttcatgtgcattcaaatcacctgggaatcttgttgccaacctgagattcttgggcctgagattatgcattcccgttaagcttctgggtggtgccaatgtctcactctgagtagcaagagttcaaaggatttggtgatggtaaaagtaaccctttaattcagttaaatgaccagatgggatcaatcaccttgaagatcttgaaataatagtagcctcatgacatcaagtgtgaaggtgactgttggtacttgtctggtgaagacaactttggaggaatgggaagaaggactggcgtgtgtcgggacacatgtgtgcacatggacacatgtgagtttgtgtacatgggacagctaagggatggatccgtagtagacagcctttttttttttttttttttgagatggagtctggctctcttgcccaggctagagtgcaatggcacgatctcggctcactgcaacctctgcctcccacgttcaagtgattcttccgcctcagcctcccgagtagctgggattacaggcacctgccatcatgccaggctaatttttgtactttggtagagatagggtttcaccatgttggccagactggtctcgaactcctgacctcaggtgatccacctgcctctgcctcccaaagtgctgggattacaggcatgagccaccgcccctggccgacagtctttggactggctgttcaggtcatgattctcctcctctgggagtgtctctcaacggggaaaagtggactgacatgtttgtatcacaaagcactttctgccctggccatagctgattgaccgtggcctgatctggactaataagattctttttttctgggaatcgggaactttgaaccaagagacatccaatctggcagttttgattctgattaatggcaatgatctagaaagaagatccctaaactgatactgctacagttgkcccttaaagcctcccctgatctctgcccttcctgagccttgaggaattcaactcctccttgaatcccctgaggtgccccactgggtatatgcgcccactcctcattttccttgttacctacgtgagtttgctttctaaataatcacaggtaacacagaactccttccagaagtggctccatctgcttcaataaaaggcagtcctggcctcacagtctcatttccaacccaaatgtccacgtaattttcagaccgaggcttctgctcaagccgggcaccccactacccacacctccttgttcacctatggctcccacttctactgaactgcgcgatcactgtgattttgggggtggcaacagggcctaggaaacattttagaggcacttctcttgcctgaaagaaaacgttcttcccctttttgtctctgatgaatctttactggatctttgggacccagctgagtcatcccgacctgcagactggactcccatccccaggcttaaattcctttccaagggctctgtctgtcctctcggcttagcttctgtgttaaaaccccctccatctgcgtctcctccccagcagaatgagctccttgaagtcagggcccgccttctgctcctctctgtgctccactcccccagttcagcacagtgctcccagggaggtgtaagcgacttacggtgaatgaaagggcgtgaaggggaacaggaggggcggttttcttcatttaccagaaattcaaaattgaccaagtaaacccctttggagaccaggcacgatgctgggcactgggaacgggggtaggggtggggggtgggggggtggtagggaggagggggtaccagggtaccacgggctctgtcgcccgtggggaaggatgggcatttacccttcccattcatcaggatgggagggccacggactccccccacggcagtgccgggtagacccctgcaccacaccgtgccaaggccctttctcacagtcacgccaggaactctagccatgctctgacttctcaagcagagttcagtcaccccgaggaggtgggacccgtctctctcctccccacaaatgaaccagttctccagtgatcctacttccttttttccctctcccacgctaaaactggtcacgagggacctaaaggaggggcaggcacccaggcggctcccttccccgcacgcatcgcggccagtccagcccctcccggccgcccacgggaccccagccgagcctgagccaggcgcccaccgcccccacgcgcagggccggcgcccgcggaagactcggctctccctggcctcgacgccgctcccctccctggcgccagggggcgctgcctccccacgaccgtcgccatggtcaccgctggcggcggagaggggtttacgtaaaggacgcagcgtcccccggggggcggaggcggccttcgcgccggcgccggcgccctgcggaagcggcgttagtgaatcggggccttggggagcccaggatggaggtggcggtcgcggcggcgggccgagccctgcggcgggcgggaggtaaggggggcctccggcgcggcgggccggtcctgggcgcgggcgcggtgcgagcggcgcggcgggctgggcagtgtccagggcgcgcggtggccggcccgacgggtcggcgggcggagttgcagctgccacgcgcgcccgtggcaggtgtgaggtctgtggagcccctggcaccagcgtggggatggtgacacgcgtggcacgggcgtgggcaacgtgggtccggcacaggcggcgtggttttcctggaacgggtctcagaagactcgcctccaccttggtgcggtggtggccacgcaggtgtgaggtggtgcagctgtctgcacaggtaggtgatgggcacggccttcggactggttatgggataggtggccagctcgtgccggcatggtggtgccgctagcatgrgtgtgaggaagtgctgccattgcttgggtgttgggatggttctggccttgggcttgacatgatctggggtgatagcactgggggcttgaagaattggtgttctcagcatggctagagttcctggcatgactgtgagaaagggccttggcacggtgtggtgcggggggctacccggcactgccgcggggggagtccgtggccctcccatcctgatgaatgggaagggtaaatgcccatccttcctcacgggcgatgaaggggacactgcctctgtcatgggggtccagttttaatgcctgttgggtacactggactgaggagggcagaaggctgggagaaggttggtgtcctttataatgggcataaacaagagatgccaggagaagcttctaccacaagggccctgatggtaacccagatagagaccttccaggcactaccgttgtcctgggctaaggtagagagaaccattcatctagcttttcatctagctttgggaatgaagggaggggtggatgattttcagtggtgatcggtgtcccagaatatgtcctgagaagcaagcaggaccaagaggtaacccgggtcagcgagtgagggagtggtatggcgcaccatctatctgtagtcacggggtcctgccttctccctgggttgatgggttcactccagggtatctgggagttgcctctcttctttgatgctggggagcctttgggtccagaggattggatcgattggggtatgcttgaaagatgattctgcagccactgggaatctgctggggccaccgggactcccacccccaggcttaaattcctttccaagggctctgtctgtcctctctgcttagctcctatgttaaaacccctccatctgcgctgagattgtgtttgctctcaccagtcctttgggaagctttgggtgaaggtctcactcagcatcacctagtgccttactttacagagaagcaatttgcagctcctcctagagaagtcttacagtgtaggggaaatcttcagttctttgtggatctcttgggggagtgggatcagtggtagaagaatcacagggttgagcttgtgctggggaaggcacttatgagtccaaaaagatgatgttgagggtagggtggcaggtggtcgccaaattgccaaggtgggtgcttggagatgctgatgagttccctataaccggagcactgtccgatgcctttggagccatatcactttaattccagtgttggctgtgtgaccttcagcaggtgacttcaccaatcaaggcatgtcacatggtggtctggtagtaaagaatgaaaggaaatggtgcacgtggaaacactttgcaaacagcgaaagactgtacaaaggtcagagagtctcatcaagtaaagagaccagggctggaggcaggagccataggaaatggtggcacgggatgtgattgggaggaagggagccggaaggttgagggcctgtcatagggaattagaggccctgagcgcacatgctcccggtgrgggcaagtgggatctgttgacactgtgagtcagctgctgagctggaaccaggcccccggtctccagaggacagtcctgagcatggccccggcagctgtgaagtcctgcaggagtggcccaagcaggaggaagcactttgcttgggcagcaracgtgcctcattgccagggtaggtctgggaggtgtctgtggctgacagatctagggtacctgtgtgggaggaagacttgggaagtgtgtgtgttttctctggagaatttcctttggctctgggttctgagaacgggggtggggagcagtcacatcagcgtcttttgggctgtggcctgaaggaaatgaagtgggtcagagcatccacagatcgatgtggctcaggtctggatggttctgcgggaggttgaggctggatggcagggggacgggggggggaggtgtggaggatgccctcagacacataggggaaaggaaagggggctacaggcacctctgagggcagacaggtgtggcacctctcccaatgtggccccacttctggctgaagtgccttcccaggtggggaggatgagggtggctgcacagtgctttgctctctgccaccaggagcctaattcccgacaacaagctgcagagcctgagttgcagaccctgccccatggcgctggaagtcctgtttttctctcacccaggccgtttcttcagcattccatgcgggtgtctgccttagccagcaacctgtttcacatccttgctccccgaggaaagtttttgccctgtgcccaggctgcagtgtcaagccatgtgggtggaaggaggacacggccctcccagacccagggttgtgagctgacttttccatgctatggactcgccctgtccccgtagctgccacgcagacactgtccagcattgcaggtgcttccctggtcattcccatgttggtctgaggggtatccatggcctgtctcacccgctccctgcagtgcttcatacctcccccgaggagttgctgggcacttcagctcatgtctggaaagctctcttaagtgcagagtccattaaggaggaagcctacagcctccctgttgtgaatattcagtattcaagtctcctcagctcaccctccacacctcctcctgtttgttctgatttgtggctcagccttatggtttggggctccaggagcccttttcagccaccctttgccttctgcttgggatgctgggactgcccaccagagctgagtggcaggcagggcagatctgaagacactgagaggaggagttggcctctgttccccaaaaggagagctgagctttcttcccagtcctggggttttggggtagcagggagcccagccaggttagcacccttgtcattgtgcacagatgctgatttcgagtaagttccagctgaggcagggggccagtcacttaggagtggacctcgagggcaagcagctccctggagctacaatatttcaactctggtccccagtcatattcccattttccttgtccatgtttctctaaaagttgctttcctcagctcctggcaattcctcagctgccccataaatcacagtgcctggctgytgtgctttaggggtgccggggagccaggcatctgtggccagaggatgctggaccagagctgacagcagcgggccagaaggctgcagctgaaggcacagcttgtcactggaagccactcctcccccagtccctctcctcgagaccagaggggaacctcagtgtttaatcacctgttggcccatcactctgtgatttcaatttctcaccggaatagctttacattacactccagtggactgggcaagtagcgctgggggaaatatcaatgagcatgtggtcagaggaagataaatcttttagaaccgcggagcccaggacattgcaggatgcggttacctccccagcggatagggctgaaaatggtttattttgattttctttttttgtttctgatactgacttgggctgggcgtggtctttctgggttggatgggaagcgtgagtgtgggtgtggacgtgggttgtgtgtgtgggcaggaaagacccaggaaactgccttatctgtgaggacctctttgctgctgaggaaggagtccagggagatgccgtggaggggattggtgtgaccacgggtaagggtgttttcatggggtgtttggcaggaacgcctaagtcctctagatggggatggggctgttattaccgcggggctgcccggggagtgcacgtgtgtaaagttgcttgtgcccataagtgtttctgtgggaagtgagggcggagggggtgtggagcgcctggtggtgtgggagcgcgcaggctcccgtgtctggctggcctggtgttggtgggtgtgcggagctgggggttgccgggctcttcacagcaggagggaacagtgggagtcggaggaggctgccttcaggctgtgggagggcagagggtgggtttcatacctcatgttatgactctttacatgaggagccgagtgctttctcagtattccttagaaggaagctgggctgcaggcggggctctcacacacccttctgtgtgctacctgggggcgtctcacacgcctgcttccatgctcctccttgaaccacctggaagtcagctggggacagtcccctcccccccatgacagaagatagcattgtagcccatgggtagttatgacttcagactctggaacctcacggacccagattggatgctggcacacctcagtttcctaatctgtaagatggggacagtaaaacctccgagagccgaatggcaagaattctcccaggtaatgcctggtgcgtagagagatcctgatgaaaacacgcactgaaaaaatgtttttgctcttgcggccggaatcctttccatagagaagtggttatgtcgtgatctgcatatattagcagtagggaagatgtaatgggtctcattacttgataagaagttagctccccacatccttgggatagacagaatcttgcatatctgttagcagtgtcatcagcaagagtatatcttagccttgaggaatgtttccacttggacatagtcgatagttatttcttgagcgcctgctgtgagttgggggttagtgagggcatgcagatgaggtggtcataccagagcctataaggtgtagattctgacctcaagttgcttaaaatctgttgagaagatatagttaatttctagaaatgagtgatgccagaggtcaaaggagggagagtgactcgagccagggaggttggggagactcgggtggccacggcctttttatgtgggccatgggtaccggtgggagtgaacaaaggaaggtgcttgtagaggaactggcagcaacgggggcgggttggcggggtgactggtggctgggaggggaaactgctgcccgtctgttgtgtgctgtagggcgcatacaacagaagtggtgaaagctaagattggaaaaatgagctggagctgggtccccaggagccatgatggcagggctgaaggtttggtttccaatctgtgaacgcatgggcattcactgaagtgttctgagcaagggtttggaggctggtgccacccaccaggaagagtggtatggcagcagggtactgagggacaagagtagggggtgcccaggtacagagggcttgaaccagggcagtggccactctgcaggggaaaggggagagacaaagcctggttgattatggaagggagacagaaatcatgagattggtcagtgtggtcactaggaggggaaggggtgggaagtggggccaggaagctgagctgggcctcggaatcgctgcctagaatgtgttgcccacacttgactttcagcgggtctgactcccgtcagtgctgggcgggagtgtgaacggcaggctttcagggctgccctcgaggccgttcccatccctgaggacccactgagggggttccagtgttcacagcacttatttccaggcatttgatcattttctcaccaaattaccccttgaaatttcgcctgcctgagttcagcccaggaggttactattctgggaagtttcatcaaaaccttttcagtgtttgggagttctctgagcctggaggaggatggaggagaacagggcttgccctcacctgtgtttgggggctgctcctgcaaaccagtcctacacctggagacggtcctggccagggagcctgcggctctggggtggaggtcgggacggtggccctccgctgtgtaaggtgagacaggatgctgcctcgrattcatcctgaatgggcccctcgtcattgtctctcctggagccatttaattaattgatgattgatgttcctggacttccttgaggttaatctattattgatgtcccttcgtttatataacatatgctgcacctcccagcccctggctgctcctgatgggcaggccacaccgtggagtgggctccctggggctgcacctctgtctcctggggacagggccctgcacttagctttctcaaagcctttcaggtttggggtcagggagggcaccagggcgtgtctttaggaggctttgctcagccacaaaataatactagtaacaataacttccattttctgaatgtggatgaactgaacccaggagagtgtatagaggatgtcatttactccttgcaacagcaaccccctgcacgctcccatccctccaacctccatcttacgggcggcttagggagcttgcatcacctgctcagggacactcagagaggcagggagccagggtttgaacccaggatgggttctttttggtgtccctgtccatacgccacctctccctcaggtcccacacaatcccacctcctccatgaggccattctccatgctccactgactctagcactcttttttttttttgagacggagtctcgctctgtcactcaggctggagtgcagtggtgtgatctcagctcactgcaacctccgcctcctggttcaagtgattctcatgcctcagcctccctagtagctaggattacaggcacgtgccaccacgtccggctgatttttgttttagtacagatggggtttcaccatgttggccaggctggtcttgaactcctgacctcaggtgatccacccgcctcgctcggcctcccaaagtgttgggcttacaggcatgagccaccgcrcctggccaaacaaaggcatcttgtagcactctcttatctgaatagcgctggcgcccctcagagagagcatgtgtgttcccctcactgatctgtgtcctcactgaagcataacaatcatggcgaaataacatttagggagcacaggtgccaggcaccaagctcagtactttttgtatcttctctcatttaatcctcatgaccataacaaggagcatgggactgctgggcctggagtgttcctggctctgctgggcagctgtgaacaagtcacttttcttttgttagcctcagttgccctgtctgtataatagcagcaatgatatttgtcctgtctccctcactgttcaaaggtgacactggatgggaaaggcctttgggaaagacattgtactaacaaaggattagggatggctgggtgcggtggctcacacctgtaatcccagcactttgggagaccgaggcgggcgggtcacgaggtcaggagatcgagaccatcctggctaacatggtgaaaccccgtctcactaaaaatataaaaaattagccgggcatggtggtgggtgcctgtagtcccagctacttgggaggctgaggcaggagaatggcgtgaatccgggaggcggagcttgcagtgagccgagatcgtgccactgcactccagcctgggtgacagagcaaaactctgtctcaaaaaaaaaaaaaaaaaaaggattaggattgctcgtacatgagattcaagagctggcatgaaggctgggaatacttaaggctgggcacataaacccaagccaaggcatctgcacccaccctctaagccaccccagcccggcagatgaattctgcagcttgccagctgccaagaacttgcttgaggaacctgtgtggccaggagtggggcgggagatccttagagtggctgccaggccctggtctgttgtcctggctggatgagcagtgcctgggtccttggaggcggtccctcccactctgggcgcctggattttgtggaagtgcagggggcccgtggggggttctgggccctgcttcctctcccatctcccacatgcagcctaactaggtcagttcaggctgggtgtggggaggaaggaggatagctcgccaggcagccacccagacctcccctcacccctcaacacatgcggaaagccttgtgaggaggtgagccctgtgtctgttccggaaagcgacggggccaccagcctcacagtggcaaggctcccggggcactggctgggaatcctctgctttctcatcagctttactcggagcgcatttcagtgctgggctggggctggggaagatgacacrtgctgccagggcctgaagaaaagggcagagcccttggacttgtgggtgggggcaaggcatgcctgccatcgctcattggaaattgtggccaggctactgttaggggatgttttgtttcacttcccaagtttccgccttctgcgggccgggattacatcaggctcccctggcacgccctttagccaactcccacttcatccaagctcctccactgccctgggacagctgccccgctgcagttttggggcaggctgcagaatcactgcgcagccctaggcccagtggctaaggggactgtcctggccttttcagcctcatctgcagaggctgggaactcccagtgccctgcctcccagttagcacctgcccacttcacccactcgagtctgcctggtctccaagattatccacttctgattcattctctctccctctttaaattcagcatagcacaggccttcagacatgggctttagcataaagacagagctttatatgagaccactactacttgtgcaagtcacttgacctgtttgagcctcagtttcctcatcttttttttttttttgagatggagtcttgctctgttgcccaggctggagtgcagtggtgtgatctgggctcactgcaagctctacctcctgggttcacgccattctcctgcctcagactcccaagtagctgggactacaggtgcctgccaccacgcccggctaattttttgtatttttagtagagacagggtttcaccgtgttagccaggatggtctcgatctcctgacctcgtgatccatccacctcggcctcccaaagtgctgggtttacaggagtgagccactgtgcctggcctcttttggtactgcttctatccactgccttttctttgtctaacttttcctctctgaggcctttaggggaagccagtttcttcctcagattctctgagtctccccgcacaaagcccctcagccctttcagctgccctcctaagagttgggggatcatgacttggcctcacagaattccatgccatcctctctggtctgggcagcctctccagggcaatgggagtgcagcccaccgggtctgcagagccccagctgaggcctgagcttccaggcaccgcaaactctcctgggctgcagggccagagtcagccccagtgcacccccagggccagaacaccagccgtatccaagtctctttccccctaggaacttaaggaatttttcttaagggttgtttcagtttcatacctttgaaaagaacttgcttctcctttgacaccttcgctgggactggggccagaccgkggagcagataatagttttgccacgtgtagtctcccatytccccatttattcaaggacatttattgagcacctacttgccaagccttgtgcctggagctgggaataatggtatcacttygtcctgagggagttcctgggttggcataagcggacactaccactctaccagcagccacaatggcaaaagctatgtggtgagtcctctctgctacacagtgctttatgtgtagggacacatttaatgcaatgaacagtgatggcttccattttctagacactcacccctctaggctctgtgctcaggacagtcccatggcacccatggaggaagcactcgtttcacagcaggggtccaagtctaggacctcagcttccttggggaattgagggaatctgttagaggctgcgtgtttgtagctgggactcaggttccgtctgtctggcccctgctctcagggtgtgcacattcccctcacctggcatggggtttggggattctgtgagccacgggaggaacagccgcccacaaaaggaaggccccctttggctatcctcttgctgcgaaggccaggccccgctcccaggaagccctcgccgctccccacatgtagacccatctgtggcttgcaccaccttgttactcccactgttgtccaaccgaccttcaccgaccctgtacctcgccggccgtggcaggcggctttcaggctcgcacagcatggctcctctcaycccacacgcccctgccagtgccactccagattgttctctttgctgcctgcctgctacaccatgcagtttagaacacagcctaatggagggctcggggcacctgagcagctgcctgctccatttcttcrcccctttaatccctcccttccccaggtgaaccctattcagcaggcttccggcagcaataacaaagctgggcacccagcccaccagctgctcagtgctttataaaagtttaaccttaatggtgtaatgaactcccatcataaagcagctggagcagtgcatcctgggatgtataaattataggaaccctctgaaattgtaattggaaatggcaacaacaagaaggttgaaagtggctggcctcattgggctgagcacagctattctctgtctcctttcaaaaggcacacaaaactgagtctggctgtgaagaaagaatatcctcagcccaaatcgagctcctggttcttccgcccgagttcccacttcctgcctccaactgtgtctgcagagcctgcagcctttggaggtgggacccyccccaacccaacctggccctgtgctctggctctgtgcccgcagacagagtgggctgagagggaacaaacacagccacaggggcaggctccaccatgctccagggagcgctttggagcagttgatttgacctcctcgagtctccataaagtggagtgaacccaccttggagtgctggtggtgattgaatgggaaaccgcagggggtgttgggatgtagggttgagaactcaggccagacggtctggctgcctgttgcagctcctgctgggggtagtcttgagtccttaaccaggtcctttcacctctcagctgcagtttccacctgtaaaatcagggaataattggcctctgaggagtgttaggaggtgacatgagatgatgctggcttgtgacagactcagcatcgtgcttctttgatgggcacacagatcactggggagcttgccaacrcagattccagtttaggctggctgggcccagatgtgcatttctaacaactcccaataatgctgctgctgcaggccctggagcacacctcaccttgagtctggagggcagtgtttgacccatagtcagtgcattagagcctgctgtgatcgtacgtccaggcagaacccagggcctgcacaggtgcccacgtggcccatgagccggcagcttcagcatcacctgggaccaggttagaaatgcagcatctcagcatcccttcaccaccaccctcctccacatcagaatcgctgggaggggagcctgcagccagctctggaagttctgcttatgcacacttgagcagtcctggccaggactcatccttcagagcaggatttctgagtgtagattggttaactccagcctcagagtctcctggggttggccatggtagaacttggaacctaaaaatataggttcctgagccctgccttgggcttactgattcagaattgctgggcggggcctgggagtctgcataagtttgagagttactggcgaccactcattgcctgagagatgggaagaagggcagaatccccgctccccactcccaccctttatgcataaacctttgcatctgccagggggagaaggaacaccaggctggggtcaggagttccgggttcctgcaggatcctgtcaccaaagcccaggaccccagagccactctgcctggggcccagctgtggggttttctcacaccgagaagagggaaacaacccaacatccccgagtagagagttggttgaatgaacttccgtacatcttgtatgtggactactccacaataatgaggaaagatggcggtaggaaaatgtttaaggagaagtgctcaccttttagttcagtaaaaaaaaaaayggtagatgccgaatggtcccacaattagatggaggaaaaaaaagactagaaggatgttaatagttgatagttttcctagagggatcatgggtgatttatattttcttctttttggtttctattttttttttttttggtgagattgagtctcactctgttgcccaggctggagtgcagtggtgcggtctgccttctcagttcaagccattctcctgccttagcctcgcaaatatctgggactgtaggtgcccgccaccacatctggctaatttttgtatttttagtacagacggggtttcaccatgttggccaggctggtctcgaactcctggacctcaggtgatccagcctcccaaagtactgggattacagatatgagccactgcacccagctagtttctattttctatagagaacttgtatttttgtaataaaaagataagtctttttctttttctttcttttttttttttgacatggagtcttactctgttgtccaggccagagtgcagtggtgcaatcttggcttactgcaatctctgcctcctgggtttaagcgattctcctgcctcagcctccagagtagctgggactacaggcgcccaccaccatgcccagctaatttttgtatttttagtggagaccgggtttcaccatattggccaggctggtctcgatctcctgatcttgtggtccgcctccctcggcctcccaaagtgctgggattacaggcatgagccaccatgcccggccaaagataagtctttttcttatgcataagtcagcgtgtctggtctggggtccccggtcacagtgcacctgccctgcctgaggtgaggctcctgcagccaggggcagcccagactcccccactggggtgactttcaccatcgcctccctcacctccagggtatggctgatgatccccagggcttcacaccgcttctcccgctttcttacttcctctctgctttgagtcttccctgatgatgcccagcactcctcccattttacataagaggagagggtggggaggggacagctgagaggtgggaagcccccagcttgcaaacctctgaggccaagtttagtttggcatcacctaggtgactaaatctaaattccagagtctaggcacataggatatgctcggagagtaatggctgcatgaatgaggctgggaaggcagccaaggatggggcagaggcccaaagctgtgtgaccttggcacgtcagcattcctctatgagcttagggtactcatctgtaggattcggggaatcagggaggcgtggcatctgagttccctgggcctctccagctctgaacttctggggactgtcacatgtcttcagtcctgcttccttgcctgtttttttctaagcaatttttgctgcccaagaagacctcacctgtgtgttccagctacccagtgagtttgcgcgtaaatggctgctcagggcagggctctccagtcaagggcttgagcaaggccactgctgtccccacagccaggcttccatgctgtggcaggaggaagggagaccaatgctgggacatgagagcgatccaccacccatagcagagggccggggtgcctgggtgtgcttggacctgacattggcctcacgtgcaccctttgtgcctctgcgccggctgcctgtcagttgtcaggtgtctgcctttcatcctttcctggccaaagctgcctttattcaagtgccccctgccaggctttgtgtctgataccccatttccggcagccctgaatctgtggccctttgagctgctgttttccatcgagtggctccgtggggaggaagggtgggagaaatccattcaagtcatttgttttaaagacattgaagtaaacccatgggattcatgcggtcacatgttttcagtcttctttcaaagtaatagttgggtttctggatcgctcgcattacccacttccctgcctgggaagagcgagaggcctggtcttcaggaagaaccatggagaggggaagcctggaagataaaagctgggggcctggcaaaaccyaaacatgtgcamgtctccccgccagtggaggggctctgcctggggagcaccaagcacctgtgttctggtgattccaggaagcagccccacgggccctctctgtgtactcgcaagcgtgtttttcctagcccagggagcctgcagaaactacctttgccagcaactgagaggcagggttgggagctaaagtggtgcccagcctccctgctggctggaatctggccctgcacaaggtgcatctgcccacaggctctggggaaccgggtgggaggaggggcaagaggaggggagccagctttgctttccccgctctttctgttcaaccatcaggcacctctaggaagctttctctgtctgcctggggctgagcagtggtccaggcatcagtgtcggagctctgtgctcactgacccgccccggtttccttgttattctgcactgtgagctacttgaggatagggcttggcatcctcgagttcatgtccccagaagctcctgcctaagggcctgctgagtccaacccactcccacttcccagcggggaggagcagtgggagcttcttgtctgggagctttcaggtcctaggtccactctctggccctggtctgagcctcccaccccgctccagccaactggtctggcgagtttgtggggacctggccacaggcgcttctccagggacagaatgtcctgctgtaaggaggctttgtgcctggctttctgttcttcttggctcctctttgctcctcctctctctctttcatcccagggagggtactgacttctggcttaagtctgctctctatcttgcctttttggggtccaggacagcatatagtgggggtgctgggctcaggcagagcagtggccttgcctggaaggagggcaggggcagggcccttcaggaatgaggtagggtgtgcatccctgcgtgccccggtgagaccctggaaagccagatacccagagtgtggrtgacaggctccgggccagagcccaggggctgtggtgaccgttctcccacctccttccccgctgatgttsaagggtgagggaccagaggcccaaagacggcagcctgcggaggcctcgctccaggactccgcccccactgagactcctccctgtccccaccaccaggcttgctctcagggagcaggaaatgagagtgggggagcctgggtgttcctctcaccctctgcgggaggggctgggcaccccgttccgtaggtgtcagcggaaccgtcaccagcggtgggcgccagtgccgggatttccctggctgactcaccctcggcctggctgtgcctcagcctaggcatgagttctctgtgaaggtgtctggatagtgacagcgattcccatggagtcctgggagcgggagagtgggggtggaggtgcccactaccctggctgcctgccttccactcccagtggacctgacgcccagccgtccgtccgtcaaggacaccacccccacttcccagcggggaggagcagtggggccggggcgctccctgaaagatccctccaggggccacatgcctcccctccccttcccctgtgggagaggcaggagaatagggaagccattgattccctccatccctcccagagtaagaggcatttcacagactgggcgacccggggttgggggtggggtggggtggggtggggagctgtgagaggcaggaagtggggtcagcacccggatccaaagaccccttggagaaaaggggaaaactgtagtcccttcccctagcaaggtttgcgtgaagcacatctttgggccatcccagcctccttggcagcgagcaggcagcggcaggcactgtcagtggggtggaggtgttgcaattacsgtgtgtagggggctgggggaggactgagcagacagaaatgtggagtgtgcggcttgtgagctggcctgtgggggcagtggcagcagagctgcgtggggtgggatgggaggtgtggatctgggtggtttgccccaagatcctcaccttcctatcgccaaggggagggaggtcacccatgacctccctgggatggcatagcaggggatggtagcctctggggactggcctgccagggctgagggcacagggcgacattcaggaccctggcatggttyggtcttggcaggcagacttctcagccccctacctgctcacctggccagtgagaaatgaagcggtttctgtgccccagtgccatggacagctccagtgactctgatgaggctgttggctgtgcaaattcctttgtgggtagccccagggtaaggtggccctggaaaggaatgtggttggtaggcccaaccctayccagcctcctgagcttggcccgctgctgtggtcaggagcatagaagccgggccagggcgagggaaggcctggcctaaactgagatgggccctccaggcaaggccagcattacctcagtcctcggaaatgcatcgctctgcttgggggaatggccacacgtggctgagccccaggtggtgccaaggacaggaggacagcagccattcctgcgcaggagcacaccaaggccccaggagcctgggctgtggggcagggttccaggttctgctcccagcctgctgctgacctcgatgtggcctggggcagctgtctacatccttcctcaccttcctccctcaaatgagcatttgtgactcagtggctcagaggttccttcccactcagatattctcctgtttttttttatttttattatttttttattttttagacagggtcttgctctgtcacccagcctggagtgccgtggtacaatcatagctcagtgcactcactgcagcctcgaattcctgggctcaagtgatcctcccatctcagcctcccaagcagctgggactacaggcatgccctgccatgcccagctaatttcctcctgtgatggccctgggtagccaggtgtctctgcagtgaggagcagtgccagggccctttcttggaccctccatttcctcctcccctgggagtcatggggcaaagtgagataatgactggaagttcccagtaccaggtcttctggcagctagttgggctctcagtgagcaatggctggtactactgcccttatcacccttatgtttacattatcatcagccttattgtggagttgccttctcagagcctgttgggggctccctggaaaaggcagtgtgactcttgtcctgggctggcatcctggcccccagtctgctcaagaatcagaaggtcagactgggccagccagagggtcagggcaggcaggcagggtccctgacatctctcctgtggtgcctctgcagcttggctgagctgcaggctcccatctgcagaggggcggcccagctctctgcaagttggctgggagacctcagaatgaggagcgcatgttctccaaacatcttgctcacagcagatggcagccacaactgcctttctctctgcagttccggtgcacttccctttcctttgctcacccccctgctaactttggtttctgcttttggagatggggaggcagcctgcaagcctccagagccacttctgatagtgggtgaagcttggtgcacgtagcacggacagtttccaaaggaaaggaaacctcgtaccccacctgcttccctggggaagctcactcttaccctgcttcccacatgccatctctgagtctctttggccaaatgtgccggcagcatgatctgagaggagcaagggagctggcccgggggccttgtctgacatttcttgagcagctgctaggcaccaggcgtggtgctgggtgccaaggacacagagatgcagagtgtagccctgccctcctggagctcccakcccagtggggagcccggaatggagggggcactgattaggtctgcccttgggggttggcgggccctggcagcttcacagaggaggttgtgtttaggctgagctttggaacactgaggagttcccaggggagcaggattggaaaaggccttttgggcaaagagaacagactgtgcaagggcacagaggcatgcagaccgcctgcagagcacgctcaactgtggtgcacagcagagcagagaaagcaggacatgctatgcaccctcagaaagacagggcctcctctggctgcgtatgggtgggggccagcctgaagctgaagccctggatgggagccattgggggaacaggcctttctcagttggggggaattctgccctgagtttggggccagtagacgcagcagcccctgctggtagaatagaactggaccatccttccctcctggctggccctgcagccacaggccagaagtctggtgttggccttactgccctggagctaaggccagggggtcacagatcagccaggtgagcatgccctgggagagtgtgtgggccagacctccatggcactgcctctcctactgcgacctgccctggctccaccccacacccacaggtggcactaagctgagcacccacatatccagaccctcttctgtgccaaatcctttctcagtggtcccacatgggcctcatcccatttaaccttcacaaagrccatgtgcrgtgggcatccctggccctgaggtcctttgacttgctccaagtcacccagccaaggcrtggcccagcagagactccaggcctaggtccgcctcaccctttgcagactcatgccttgcctgttcttccctgcgctgcttctgtcacctcacagtcaggcccctccggggagtacagtggagggaaggccaaagcattcatcctggaagaccctccaaatactgtaggcagagtgctggggacaccaatggcagctgtgggcagggccacccgaatgccaccccatagggcagcgggcccacagcatggaggccctccgtgtttgcttttcccagccctgcattagctgtgctgctcacacctggctgactgtttgcccaaggatttctcccctggaaggagggtggggctggggagggtggcaggcaggtggccggctgcctctgggcactccgtttttctgcagacccacactgcctgcgaatgccacaccaccctgcatccccaaggctgccccagcagtgcccggcctcgcccgcgcagagcatgtgacttggcagtgcctgggcctggcatgcctggcgtgccagggcagcggcagcagcagccgractgtcagtaaggagctggagaggcccccagagccctcctgttggggcactggtcctgggttgtgggggtgacgggatgcatcagtgagacttttgtatggcaggagrcagaggagcacataactgaatctgggagtatttatggacacgtctgcgccttccttttctgcagcagcctgtctgcaggccctcctgcaaggagagcctgtcttgattcaaccagtccctgccctgaccttctcttcaccctctttctgatgagtcagccccaggaacttgaacttggacttctccagcctctgggccagccctggaggcggaagccctggacctgcctccccaacacctgccctcctgagggtgtggcctgcaagcgtccttttctgtcagattcagctcatggccagtgactccttgagcctgtgatcgtggtcctcaggccaaggggaacagattagataattagctgctgatggatctggcatcctagggaagagggagccctttctctcccacagctgggaccccaaagagaggcttgcattagccaggcaaggagccgggtgcctccctccctgcagtcctgcacagccccttccttctcttgctgctgtgggtatctgcctaaggagagctggcccagcatacccacctgggacacacccagagagtgccagcctgaacggcactgccaatagcccgatcctcaggcctttcaccctgcacctccctgctcctccagcaacgagaccccctgcatgtcactcacatgtggccccgggccaggcacttggccacctcacagtgagcgatgctgggaggctggtgttcttgcaatcccactgacaggtgaggaaatctgatttgtgtcatgctttctccagcatcgctcagatgttgttcatcccctttttcccggaaccggggcccaaagaggttgtgacttgcccacacctcttgaatggccaggccccatgtccagcctggattctctgacaccaagccccatgtgttttccactgtgccctgcagtaaacagaagtgctaataaagaagcgtgctaatacataattaatcccacctccatcccttgggccttttctctctcagacgccctgagcaccgcccagacgtgatctcatgtgtcctaccaaggccccagaagagcagagaggaggctgggctctgaggggccatggggactaggagccagcctctccgctgccaggcccagccctactgcatgcctgctgcccgcctctccctctgctctaggtagggaagctgccgaggctcgggcatgtctcaggcacctgctgtcttcctctggtctcgtggattgtacgaacctggaggaggaaagcagccgggattcgatgagcccccatgtggtggggatgtgtgcgcgcaggggcccaaggctctgcttaaagggaaggagtattgctgaggcttgttctagtgccttcctctaaggaaccctcagtatatcttgtttgttctcacattcgagggaagttggcaaagggcagttctgtgtcacagggaagggggtggatgaggaccccgaaaacmmgccctttaccgagtctcacccccgagcctgctgaggtcacacagcggcagtcagtggggggttaggttttcttgttttgtttttagagacagggttttgctctgtcacccaggcttcaatgtagttttgcaatcacagctcacagcagcctggaactccccagctcaagtgatcctcctgcttcagcctcctgagtagctaggactacaggcatgtgccaccatgcccagataaatttttttttttttaataaagacaggttccccgtatgttgcccaaactattctcaaactyctggcctcaagtaattctcctgcgtcagctgcctgagtagctgggactataagcatgcaccaccacatctggctaaattaaaaaaaattttttttgtaaaaatgggttcttactagtttcgaactcctggcctcagtgatcctccagcctcggcctcccaaagcattgggattacaggtgtgagcccccacagctagcccatgttaggttctctctctctttctctctctctctgtctttaactctgataattacaagctgaacatgttaggtttcgaacttagttctgacagatttcaaaagtggggatcatcaaagcactgggccatggtgtgcaaattcctggcctctctacctccaggacaatgttggggcccagaagaaagtgggtgagaaagatgatagcaccttaaggctccgagtcttctgtgggattatattcctgagccagaggctgcagacccttataaactgagcattgggggatgggggtaaaagtggatcctagggaaattagagatcatctggtcaaccccctcatcctccagatgaagacactgagtctcttagaagagaagtcatttccccaggtccttccccttctcacttatagccaggccatggctgaggtgccctcygggcccccggttgggagagggcttcagtctcctggctgcatcctgagaacgtagctttctgtgctctttcctggaggtgcgccctccctcccacaggatgctgtacagaggtggacgcaagtcacacggccccagatgcatagggaggtagagggaagccaggcttgtcaatgctagggagccctccagtagcaggaccactcactgcattaccacaggcaaatcacccacagccccttcctgccacagttgcctcatcagtaaaatgaagatgccacatttcctccctgcctcgcccacagcgtggtcgttggtagccagtgaagttgcatatgtgggcagttcaggatagggctttggatcccaggcatggccagcagatggtgtggaaagaggccagggctgggagtcaggagccctgggttctgggtgcagctctgctgtggctcctacgttctcctgtttctgtccttctcaggccgtgctccgaaatggtttctctttcaggcagcagggacgtggtgagctcccccaacctgccaaacctttactcagtgcagggaacctggcaaggaagaaaacaggcgagacccctcccctgagaagccacaccctggtggagggagccagatggtaaacacattcaccagaactttagatggtgagaagtgctgataggaaaactgagtcctatgatgggggcgcttggggtacctaagatttggcaggcaggtcccaggaggggatgtttgagctaggagctgaatgacaggagggagccagccacgcaaagctctgggggtgggggtggggttggggttctctccaggctagaggaggagtgaggacaaaggcgttcggcacgcctggcctgttgcaagaacagagagaaggccagggtgcctgggaggctggtgagggcaggcagaggccaggccacagggctggcaggccaacgtaagagggagagggctttctaagtgtgatgaacagtgtagaatgactggaaatggtgagtgggtargatggaggatggaggatggatggatggatggatggatggatggatggatggatgaatggattgtaggtgcagctatggggtgatcccttttctccccatcatgagggtcataggcaacactcctgtaacaaaagacaggttaacaagaggaaagcataacaaatgtatttaatcaaagttttacgtgacatgggagccttcagaatgaagatccaaagatccagggaaactccatttttatgcttaagtttgaggaggaatgggcaactatgaagagctatgattggacacaaagagtaagaccccatgggagcagactgagtggggaaacccagcaaggcctgctctcagatccttcttggcctctctgtgctgcattccttccttcagggtatggggcaggattctgagtgggggtcttatgatctactatcaaacaaagtaggtcagagaatttctttytttttttttttttgagatggagtctcactctgtcacccaggctggagtgcaatggcacgatctcggctcatggcacctctgyctcccgggttcaacagattctcctgcctcagcctcccaagcagctgggattacaggcgcgtgccaccatgcccagctaattttttatgtttttgatagagacggggtttcaccatgttggccaggctggtctcgaactcctgacctcaggtgatctgcctgcctcagcctcccaaagtgctgggattacaggcgtgagccactgtgccctgcccgaccaaaggatttctttatggccagctcttacgcagaaaggcaggagaaggctaatacttttaggttttatgggtggctttaggggaaaggagttctggtttctgtgacctgccttgggaaagaggaattctagtttctatggcttgcctctggggagagtgaggggtggggaagagaattctagtttctgtggtttgtgtcgggagagtaagggatagagacaggaaggcaggagatgttcagagaaaagctttgcttctgaggctgtttgtgaggcgttcactttggggtaccattttctgagccccaacatgtggttgggagagtggatgactggcatacagagaccctctttccattcccctcctgtagtaggttgaattaactctgagagctcctctgcgtagtcctattcatggtcgggcccggatggcaggaagagtggggagctgaatgttcaggagaaatgcctcaaaccccctcaagcacatgattgggaaccctcagcggtgggagcagagcccactgactgctcctgagtgggactcctggactgacatcctgacctgccgtgcccgggctcgcctgagctcgggactgggctgagctgagactggggggagggggaggacacagacttcacctgtgttcacagagcccagggctgactcccggagctgttgctctgagggtgggatgggcagccccaggcctccgttctcaaggcgttcctctgggatccagtgccccctctgcccgcccaattgcacgggccagacagctggggtcgtctttgacagcgccagtgttacagcgagcagtaaacatccttaatacctgccctgtctgtccccattttgtctgctgaatttccatctgggccacccacttctcttcaccctcgcacccaccttggcttgtcattcccaggctcagagtccagggcctggccctgccagcctgcctgctttggcctcctctctgctggcctgactctggccttttctccatcctccaggcctccactgtcctcacatccaggccctgctgccgagggtatcctccagtgcttgttccgckctgctctctcctgtggttgcttccctctgctagtccttcagaaacagctccagctcctagttctataggcagcctccccgcctgagcacgtgtcagaggatttttctttgttgtatgtgaaggttcacttgaagtttctttccttctggtctgcaggctccataagggctggcaccatgtcggcttttgtcaccatccacccaatccctggcacatagtaggcactctggtgatttgtggatggatggagaatggctgcatgcactaacttgactttaaccagatttcacctgtgttcacaccacccagggcccaccctcagggctgtttccagccttttctactctgagagcctgcccctgccctaaaccagggactctggaaccaagccctggccatctgtgggtgttggtgtcttcacacctgccgaggccaggaccacctcctgtccttgctcctgggccagcccagcctggggtttgaggcctgggcctgtctgggatctctggaggagggaagggctcactcagaagcgtgctaccaaatggaagaatgaaatcgtcaaggactcatctgagcaactgcagaacagtctaacagggcccctttcgaagtagagtacaccccagggaggcttccagggtggtgacaagtttggaaaccaggctgaatcaagaatcgaggacaaccgtaggactgagaagttgggggcggggaagggactcaggatcaaatggctttggagccttcacccttgagctgggctccagagggcagtgggcatggaggagaatgaatggcagcaggtctcaggctgagccaatggccctgggtgccatgtctctttcgggtcttgggctggccagggctctgctcccagggacctggtgtctgcaccccacccatgaacatgtcgaggtgcaagttggaggaagctctaggtttggaagccatctccctcagtgttggggttttatctgctggccgagggccctgctcgtggttgggggtgggctctaacctgtgaggattttctggtcgtcaggctctgtctaaaacaggcggggggtgcacccaggaggcctcagagcccatgattctaggtcacctcccacaacatccagagacaggagtggtatttatagcagccggcggccactgaaggtggaggagtcagcatgagctgtgacgcaggctgaccccgccgaggtcccctagctctcgctgactcccttaccaccacccccaccccagagtcttcctaggactgggcctgctgaggaagcaggcattatcagattgcctccccaaaccctggaggagacgaggtgccactttctgcctggcaggagccttggcctctgccggtctcaccaggaccttgtctggcttgacagccccagctgggcatcccattagcactgctggtctctctcagacgttgccgtcagctccttcacggaaaggttcatcccctggagttacagcagcttcactgacctcccctgggccagcaggggttagcgggagcctgccttttccccactgcggatagttaggggggccgagggcaccagcccctggttgacagggatgaagccctgccaaactcccgccccctccctgccgtgtcctcgtgaagtgggagtgaagtgccactggggccagaggggctgtgccgagcatgtggccccagctccacctcccaccacaccctgagcaggtcgggaagcagaggccgcagaagtgacagcgtgacaaggctgggcgagtctcttgggaaggaaagtgatgccaaattctggggtcagaggtcgagcagatgggcacttacctacccagaacagagtgggtcagtggccttgctcaggcatgggcaggcagaggctggcacttgtcaggggcctgatggggttcccctcatcgtggaggcctgttctcccctctcctttccagtctctatgttgcccagagcctcctggcctattcccccacaggctgggagagaggcagatggaggccagggtcttcttgggaactacagtgtaatggaggaggtgaggcagacacaccagaagcatgcaggaaagtgggtcacgggcttacctggtcatttgtgggctggtttgccagggctggggctgaaggccagctgggacaggcactgagcaggcctcgcaggctgtggaggccatgtcggggcggagtgcccaaagcaagcggggccatctggagaggaggaaatgcctgggcatggggygcactcagtggctgagcaggtggaaagacaggagctgggagtgggcgtgcccggccggcagggacagagtcagacaaggtggagggtatgggtgctggtggcagggctgggcagggcggggtaggggtgtggttggtggagagctttatagctaatggttgggagttttaattttatttaaagggcatttaggagtcataataggctcttgagaagggaatttatttatgtatktatttatttatttatttattttattgttttgagactgagtcttgctctattgcccaggctggagtgcagtgacgcagtctcggctcattgcaacctctgcctccctggttcaagcgattctcctgctttagcctcccaagtagctaggactacaggtgccccccaccatgcctggctaatttttgtatttttagtagagatggagtttcgccatgttggccaggctggtctcgatctcctggcctcaagtcatccgcccgcttaggcctcccaaagtgttgggattacaggcgtgagccaccgcgcccgacttgggggttgatttaattaaagctctatgtcaccaatctcctcctctgagccagagcctgctttcaacactttacaacttttttttttttttgagatggagtctcactctgtcgcccaggcttgagtgcagtggcgtgatttcggcgcactgcaagctctgcctgctgggttcacaccattctcctgcctcagcctctcgagtagctgggactacaggctcccgccatcatgcccagctaattttttttgtattttttagtagagatggggtttcaccgtgttagccaggatggtctcgatctcctgacgtcgtgatccacccgcctcggcctcccaaagtgctgggactacaggcgtgagccaccacgcccagcctcacactttacaacttttaactcgctttgtcctcccagccaccccaagagggaggcactgtcatcatcctcatcctattttatagacgaggagagggctgcgttgtatattgaaggtcacaactctgtggccgtttgagtaaatcaaggcactgggaccaaagccgggtccagtcctgtcctccacccggcagcaggggccttctgagcccctgccccttcctggaggccttgtgcttgggtccagctttgccctgcctggggtgatgggaggggatagggaggtctgaaggacaraatagtcagctgtaggcccaggtctctaagcttctgggtcagtgacttttttctgtggccccttttgccctcctggctcaggcgaggggaggaaatgctgtgatcattgtgtgagctcaggcacctgtatgtagcccccaggctctctccttggccattctgcaagtaaaactctaaaagtccagactagaatggacctgagagcatatcctgcttagtggctttcaaactttgtttgtttgtttgtttgtttgttttttgagacagagtctagttctgtcacctagagctattttgggaggccaaggctggctggagtgcaatgtcgcaatcttcgctcactgcaacctccacctcccggttcaagcaattatcctgccatagcctcccaagtagctgggattacaggcatgcaccaccacgccccgctaattttttgtagagacggggtttcaccatgttggctaggctggtctcgaactcctgacctcaggtgatccagagcagctgaaagctgctgtggttgacattgcctgcaagcccactgaagcctgcccactatggccacctcccctcatctggggtccctgagggcttctggaaacccactgaagagcactgagatccccctcattgagcacagaaggagaggagggtgacagagggaggggacggggctgcagcctgtgtgccattggtggtggcaggtgccacctccctctccagtctctgtgggggcaggggatgttggcccttcctgtcacatactagagctctgcagaacctcttcccctggggaaagagctcctgttacgaagtcacttgatccctgcttgcttccgagatgcccggggtacagtcgaagggaaacccaatagcccagttggccagcctgtgccctagatggccatgcagcttagggaggtggcccacgaagcctccccacctttgagcagcaggcacccacaccagccagaccccgagggccaacccacagcctgaggagaggaggcagcaggaccagggctcagggtaggctgggcaagggggcgggggccccaagaggggaggcatcaggctaggtgtgcccacttagcatatcattaacagcttcattagggggcccctaatgaagtggaaggtactaattcttcactgaggcgttgccagcacccagacggagtctcctctcaaggaagttctgagaagccagagcgctgggattcgtgctgggagctgatgaactgcctggcaggggggccatctggggagtgaggtcccagcaagtggctcctaggagagggggtgactctggggggaggagcagagggtggggccagtggaaagctggaagggcagatgggcttaaagggaggggggaccgctacctctcagggcatcctgcgtttgagctgggaaggggcctgcaatgagacaccctgaaactcaaacatgcaagctgatagatgcggggcatcctggcaggatctcaggctttggagtgttctagagtcttgtggccttgggcgagaactctgtggctcaagctgtcccaggggtgttgggtcccctctccctgggtggttgtggattaaaggaggcagtgccagtgcggccgtgctgggctcctaggagttggagctctccctttccaagaaggcaagtcagaggattatgcaggctggaagggtgagggcaggtgtgggtcagcctgctcacctgtctgtttgggaagattgacttagatcgcggagagttattgcccctgccatgcaaggtgaggtaaaggttctgcgcacactggggagacatggttactaaatcacaatgatggcagctcctgttttctaagagctgagcactttatgtgcgttatttcgttaactcctcatgactcactcactatgaagtgagtaccttcattattccatcttacagatgaggagactgacgctcagtgaagtgacagtcatagacaactagaagtgatggaactaagattcaaattcgggctgccctgctctggggccagaaggcaggcctcggtcagctcattggatggccaccccctccaagtcgmtgcctttgagagagtcgcgttcccgggagagtggggtaaagacgtgttagggcatgaggggactgaccaagaagaccaccggggcaggtagaaaggacgaaaaccacagacacccttccccacagacaggcaggagaaaacagcctggtgccacccagtgtggggcggtgtcggcctttgcgtgagggcttggagatccaggctgcccggccgcacccatcacagaggccagcagaacccgcctgtctgggcctctccagaggggatgtggacgtgtgggacaagggcttgttctgagtttcagaaaaatgaataatctccaaggaagaatccagaagccagacctggtctggccagagcctgggggactccttccactgttggaaaacattgtcggagcacaggactgagtgggctctgatgtgaatccccctgggaagagaggtcagaggaaggctgggggcaggaggagggcccagcctggtcgccagggaagggtgctgctgccctcctggccctcacttcccgctccccagcagccagccatctttccaaaataaccagcaggaaacgaaaggcctcaattgattcccagggagttggctggtgtcagtagcagggctggtggcagatggcaaattctgctcattgtggatgagtagaaaataattagcgtgagaacgagtagctggagccttggtaataaatggagccctggtgaagccttctggggagaggcctggagcacaggccctgcaacctcaggcctggctctgccgctgaagagctgartggccttgggcaacttatttagcctctctgggcctccatttcttcatccataatacagggcataagaggttgttaaaaggattacattaaaggaggtaatttttgtgaactgcttgttaaagtaaccagcatgtagtaaatgctatataagagtttgtttttaaataaacacgatcgagtaattgttggaactatttctgggtccggcccaggctggcattgcccccaagtcactggagcttctctttccgtcctcctccctgaactctgtgcccagctccctgactgctgttttataggggaggggtctctggccaagaagcacgaggagggcacagagagaacacagcaggtagacctggcttcagagcctgacttggacactcacttgctagcttctttaaattcttggagcctcagtttcccgatccatgacatgcgaacagctagacccacccctggggttgtagtgaggatggttatgtggctggcacatggtgaggggtggaggaggtgcctcctctggtccttccaggccatcctgggggagagtgggaaaggcgtttgttagcctaagaccctgggcggcgggtaggaggggacaaatgtcagtggcctcccactcctgcccctggctgcacaaggcacactgttttcatccctaggcctgggcgtgtgaggacctatctcatgctgaaatctggccccagtcctgggcaggctccgctctgccttctgctctagcgcagctgatgtgtgaaaagcgacagctttcaggcccctaacttgggttgcacacacccaggtacaggctggtggcgcacgtggcccccagcccacacgtgctttctctccgtcgtctcccttgycacctctcccctcctgtgctttcagaggccagcctctcggccactgggaagaaggggaaggtactgtagccccgggagcctggggtgggacctgtgggtcctactgtctctgtgtttgtgacaataaggagtcagactgacaggcagagagggtatttttttcttgcaagtagttcaaggaagctacttgaaatcccagctctgcgatgtcctcgtggagggatcttcgtgcaaaccattttgcctctctgagccttggtttcttcatctgtaaagttggggtaataccctgtggcctgatgaggctggaggtggatgacacatagtgtttctagtgccttgctctctcccgactccacagcctgctccgtggaattcccctgggctcagttttcctcatctgcagaatgggtcccgtgctatcccacatgattgtgagtctgaagctagatgaagacccagagagctcctcagtctgtaagaagaggcttagagccagcttttgagttcagaaacaggcatttagctgaatcctgcttctcagaaacagcatgcagaggtaaagacctgggttctgggcctaggctgtgtggctgtgggcaagtcacttcagctcatctgtcaaataaggggaagggtagtacctacctcacagarctgttatgaggactaggtgagttcatgtttgtaaagggcatagatgtgcgccgagaccttgtaggcaattcataaatgttaggagaaccgaagcagcccagtccccaacttataggtggctgagatcattctgtccctgtcactacccaggatcctggagcctgcagtttcaccagtgcagagaggttaactcgctaccacagtcctgcagccacagtgaacagctggaatctcaccacgaccaaagcctgtgctaaagagagcaggacctgtctgccagcccagcgaggccagacagcgacctgctggtgagcccaccctagctggggtggagcctctgaacacaacgcctctgctggggggcgggccaccagtgtcctgcgggrcaccactggggggcccagcctcactgtgctgagtcccgcagatcagatgcccacccccagaccagataagctccagtgcccaacaaggcacattcaaaatcggatggaccacgagagcatagcaggcagtaggcatcagttcctctccactattttggaccaccttccaatttcaaagccctttcacataggaatcccattcgtcatggaaatgggagtcctgggctctcccttcaggacaccaagggycaaaaaaccctgcagagcgaaaaagagcccttacaaacttgccagtttccacatttactttggcaaccaggaagtgtggcgtccagtgctagttttacatatagcaaccgtgggggcccttatgtctcacatgtgtgcaatggactcatcctcccsgccctcaattttgatttactggggcctagaggggttgggactttctgtcctggggacactgctcttcattcagcaccaggcagctctaggatgtggctggacctggtccccatcaccagcccccagaggcaggagtaaaatgggggcccagggaaggtggctctctggatctgtctgagagtctcctctctgtcaccacagctgctgcagagcaacagggactccacygctggaggcaggagagccagccgcaggtgactgaagtaggcacatggttgatgcctccctrcagrtttatctcctgtgagggagcttctgtggatgttgctggcttctaggagggttaggcatcttcaagatcgtgaaagagaggatctcagcccaggctccctgtggtgacacgctaytaatgctgttgtcactggggagtttgagtggggtatgtagtgaggtagaagggagcaggctggcttgggggcttgggttgtgtgtccagcacctggcagtgacgctgctgggatggatatcacgggaagagctagggcctctgtgttctttctgaacctcagtttcctcgcccatgaaaggggacagtgggactgttctgagactccttttaactctgacctttgttaggtgtgggctttggatggcagcaggaatgacctgcgcctcctgcctgcctggcctcttgatcctcggatggtgtcaggcagtctctgcatctcagtctcattcttcagtagtaatagtaatggcagtggcagcatttgctgagcagttaccagatgacaggcgctgtttgaagtgttgactgatttaaccctcctgataattcggaggtaggtactcttcttatccctggtttagaagtgaggagactgaagcacagagaggttaagtaccttgtccaaggtcacacagccagtaagtggcagagccaagactcagatgcagcctgttttagagtgcagggtcttaaccaccccttgcacacactgtggaatgagagcgacactgcgaccctgtgttactgctgtgaggactgaagccggttagtccaggacttgggacacagaaggtgctcagctaatgtcagatggatccctatggctggacctggctgtcatcccctccttcaggcacaacctctatcccatccccaggccaatgaccaaagccatctctggccagatgggaaatctcatgggctggaggtggcactcgygggggttcccaagctcattgtccagttccctgtggacactccagagggctgagccagtaccttcttcccccccatccccctgggagctcttggagccccatctgctgggagtcttgctgccaagggactctgctccttaaaatctgctcccagggccaagcccacagggtaccttaggacgagggggcgaggcccagcctggggtgcttttaccagcagcaccggagcactcatggtgggggcaggctcctcggtcagggcttctgtttgctcactccagccctttctgaccagctgggcaccagcagcaccttccagaccccagcacccagtcacaggtcacatcacaggaggtccccacaaagcccctcaggtgtctgctaatgcaacagcagccatcagcagatccttggggtgtgcaggacctgtgcagagtcctgtagtgacatcaccccastctgttctgaccacagccttgagagggatgttgttagccccattttacaagagaagaaactgaggtcccagaacagttcatctagccagaggrgggggagagggttctccctgagctgtcagggaagacactggggtgggaacccagcctgacagtcaggaagggagggacgtttccccagaagggaagggtgtgagctcagagggggaaggagccactgtctcagcccttgtgactgggaggggagctgtgctgaggaggccatggggtgggactgaggtgctggagccaggcactgcagctggcacccagaggtgtggcgatgggtactgtgagaccctggccccggggactgttgagctggggtggggatgggcagcaaggagtcagcaggttaaccgtaacacagtgtgaccagggccatgctgggggaaggggtctagggttcccataagggagcagcctgtttcccaggaggagagtgggttgcatgagggctgtcagggagggcttcaaagaggaggtgacttttagctgacctagagagatgagttggatttcacccatcagaactggagtaagcaaagcatggacccttccagtgatgtgtttctggggagcagcatgtttggggtgtcgagaaagaaggatgtggcagtgtaagaaggtgctggagagcctctccagccagaaggatttgtcagctgagggtgggctctgtgctggagtctgtctgcaccaggatcgctttctgctcaggtgataagggaatgcgtggattcagagagggcgaggcatatgcctgaggttgcaccgcctgtcgctgccgcccgaggggcttggactttgtcctgcaggccatggggagccaggaaggtttttaaagtagggggcagcatatgcatttttaaaaagagtttgcatttttagaaagaggaactcccagaatggttagtacttagtccaggggcctgaatcaccagcaggaaaattgggctgtgtgggtgggggaagaaggaggcttccttgggctgcttaagtcattccatccatgtgagaggggtcctggcaccccattcacacttgcctgtgctgggggtccaaccagaggcaggaggagcccccagcagtgcccctgtggcccctgctggaaggtatgccgtgcctgccctggaagccccactggtgtgggataggaagggcaggcagcgcctacccccgccccactgtggctgttagaggggaggaccctrtgccccaggggaggagagccagaagaggtgctttgtggcagccccagaccaggaagtagcctctgccctccccgctcctgagacatttcctccagatgaaatcacatccccagcaggggaacaggcccttattgtgatgggccggggtctctagagaaagggcaccattcaaggcccttaaaaatagccccaagagatgtatgaattggcctggagagtggtgcagcccacccccaacccttatgcagcacaggccctgccacccccaccccagaccttgacttgttggtgaccagccggagattccaccagcccaggcgggaggggtggctggtccagcaaggggttccttgcactccctccgcctcgcccgccccagctaagacagctagagcctctgcagamctctcatgtgattctcaccaggactttaggaggtagggataatcgacattttacaaatcgacattttacagttgaggaaactgaggcacgactaataagtcacacagtgggtacgtggtagagcccaggttcaaaaccagccagcctggcacttgtgtcccagcctctgtgcctcggattctatggtggtgggccggccactggtgcaggcctgtcactgggtacccagcagggtcggcccccaggagccccgcctcatactctaggtaggtactgctgttgaccatggcaattggcctcaggctggtcaccctgaggtgggggcagtggttaccactggtcatatccctccagcgtcttgacagtccttcagccacctcacctctgcagggcccagggccaggttcggctcactccttccagcctgagagctgaagcgagcgggcattgttcgggcagaggaggggagtgcagagtgagtgtgtgtgttgggtggatggtgtgtgatctcgaggagtgttagctatcctgggttccatgggtccaagggtgggagtgagaggagggacctcccagggtgactgagaggggccatccatggggtggacctgagaaggagatattcttggctgctggcagaggcaggcctgggggcaggctgggtagggccagaccctagccctccagccagcccctctgggacagcactgctccctcctcccctggtctggccagatcagagcaggatgcggctctacagcacctgcgggggcgtactgcccccccagcctctagattcattccatttcattctgttccattcatgtgaggggctcctggcagccccgacagccccctgagcccgacccagcgctgcaccttaccctctgtgagctacttggagacagggagggggcggcaataccagctgttggcagctctgttctgccccagcccaactgccacccacggtgccccagcccccsctcctgtcctatcgtgtccaaccctaatctgaagctggtgctgtcagccacatgtcacaggcactgctgacgccccggacccctgcagtccacagaccaccccccacccccaaagcccagccaccccaccaccatgctccctcactctccacccttctccctgcctcccagaagctgagctccgactcctccttggagagagagtgggatgatgtcacttcctgagggtggggggaggagtaggcacgaccccggcaggctagcccgccagcccgccaggccacagctcgccaagtggctgcaccggggatagggaggcgggccgggcggacatgygggctggccacctggccccacgccctctcgcccaccctgggggctatgcccactggccaagggagacttggctgcttcctccccgaatgatgccgggctcctcggacacacattttccctggagccgccactggggagaggaggatctgccgcctgccccggaccaggtgccatgtaagcctctactggcccccggcgggggacagctgcccaccaacttggtccccagccccctgcagcagtttagtgcagagctaccctggagccctttatgggtatctctggggacctagctccctgtggggtcacctcccacccatgctgcttcctttctctttgggatgctaaggagtgagggccctgagttcctgggcactctttcctgagcttgcttggggctgatttgaattcagctacttcagagagttgaaaatccagctggaaaagctgcatggctcagggtgggcttgggaggtatggttgccaggaggggtgtgaccctgcagggcttaccccatccttccagcagtgtggggtggaaggtgtcccaagccctactcctgaccctgcacctcaaccgtgctcttccctccctggaggcatagctgtggtggggacttctgtctgatgggttcaaaaccaagtcatagagcacgctcttggcttccagcaaagcaggaaactgaagccttcattcaagaaatacttactgagcacctgctctatgccaggcactcctcaccttccatgtttgtcagtcccagctgccaaccatacagggtcccttgcccccaccttcccaaggccttcagccttcctcctgccctgctgggctttgtgctgttgggtgggcttgttcttggtctgggaagcccctcccttgactccaaggacagtgtgcactgggccaggtctaaagattatagggtttgagggctgggctgagggtcccactgatcccatgaaggaggaaacggggtctttaatagagctcaacagtgactgctggggtaaccccaggtagaagccgatccctagtggccagtaccagtctcgggggacaggagagactccagggggaaggctgaagtctgtgtcctgctgctaaggtcctttgtgttggctcctgcccggaggtgggtcagcacttccagtggccagctccaaaaatgcctgtgcttctggccacaccggggactggtcccgtggcccaaggaatgcagtggccctgggtgccttcacctcctcaggcagctataaggtcctctgctttctttcaggaggtgagcaccaggcccactgagcctctgcagagccaccagccatgcccgggatcgtggtgttccggcggcgctggtctgtgggcagtgatgacctcgtcctaccrgccatcttcctctttctcctgcataccacctggtgagtccccaggcccggggccacaggcctgggtttggagagaaaggtctggaaggacgctttctggccatttgttcctccctgcttgggcccaagtcccaaccctgtcatgcccccagctgcccggaggaggtgcctgaaacatctagccccttagggcaatgacacccctgctaccattgctggacctgaccccaacactggggggagttgctgctactrtctccccatggctgaccctgagtcttttactggccgcccatgcccttctaggcattcgatgccaggtggacaatggtcttatggaggaggtgcctgctgccagccctccttccactgaatctgggctggggaagggcctgcctgctagtagcatctcgaggtacaggggccacctggccttgctcacacgggcgttcctgtgacaggtttgtgatcctgtccgtggtgctcttcggcctggtctataacccgcacgaggcctgctccctgaacctggtggaccacggccgcggctacctgggcatcctgctgagctgcatgatcgctgagatggccatcatctggctgagcatgcgcgggggcatcctctacacggagccccgtgactccatgcagtacgtgctctacgtgcgcctgggtaagggccacccaccctggggtgctgccccagacaactcccacctctccattcactcagccagtatttactgcgcacatgttgcgagccaggccctgttttagcactggggtacagcagtgaactaaggccttctgtagcttacattctagactaggggccagcaaactgcagcctgagggccaaatccagcctgctgtatgtgttattaaataaggttttaggctgggtgtggtggctcatgcctgtaatcccagcactttgggaggccgaggcaggtggatcacaaggtcaggagttcgagaccagcctggcgaacatggggaaaccccgtctctactaaaaatacaaaaattagccaggtgtggtggcacacgcctgtaatcccagctacttgggaggctgacgcaggagaatcacttgaacccaggaggcagaggttgcagtgagccgagattgcgccactgcactccagcctrggtgacagagcaagtctccatctcaaaaaaaaagaaaataaggttttattggcacatatccattcagtaaggtattgtctccagctgctttgcccctacagcagccgagttgagtagttactacagygactgtaggactcccagagtccaagatatttgctctctggccctttacaggaaaaggtgctgaccccatcctcaaccatgtgcatctcttcaaagcatatcttccttgtgatccttctcaaaacaggccttctgcttcctgggaaccccctcaggagtctgggccagctccccagaggaccagcctgtgtcctcttcttgggcttaggttgcagccccttctggtcatttgtagtgaacactgctcttgtgcttctgtgcactgggctaggccctttttcctgtgttaactcacagggagtgggtgttattggtctccgtttatagatgaggaaactggggcccaggcctagctctcacacaactagtaagcgtgtaaatgtcggagctgggatttgaacccacgctgtctggctccaaagtctggtctctgagctgccacactgctgcccgtgcagctggggctttccaggctgcccccatgaggccagcagatctccttctcagccaccactccatacccctcccctccagtctcagcccctgaggggcctgagctggatgcagaccagctgctgggcccttcctctctcctccatcaggttccagaggcctcttgctgggaaatagtttccatgaagtgaacacgctctcatctaatttttgcacagtcctatgacataaatgttgtcactcccattttacagatgaggaaatggaggctcagagagattaggwaacttgcctaagatgtgtctgattccacagttcagacatgattctgagatcctgatagaatgaggaaatgggccaggcgcggtggctcatgcctgtaatcccagcactttgggaggccgaggcgggtggaccacttgaggtcaggagttcaagaccagcctggccaacatgacgaaaccccgtctctactaaaaatacaaaaattagctgggcctggtggtgggtgcrtgtaatcccatctaccctagggactgaagcaggagaatctcttgaacccaggaggcagaggttgcagtgagtcaagatcacaccattgcactccagcctggacaacaagagcaaaactccatcagggatgccccggggacttgagagcacagaagctaggagaggtggtgggcacattgcaagcggtcattcaggggccaacaggaccaaatggtgacaggacgggcttggggcctgggaggcggggggtggggggtctgctaatggcccgctgcctctgcctttgctactgagctggctgaaagcccagcrataggaaaggccaggccggggttctaggcccttccctggcatgcaagtggcagccatccttcagccaggcctgctctccttgcagccatcctggtgatcgagttcatctacgccatcgtgggcatcgtctggctcactcagtactacacctcctgcaacgacctcactgccaagaatgtcaccctcggtacgtctgggtgaggcctgctggagcctcagcagccccgggggcacaggggangagatcagtttagagaggaagaagcttgggcattgccagagggcagtgccttctgtgggggcaccagcaggttggctgggcgagactgcttccctcacccttgaggcctgccagctacctggtctggggtgggctgcagcaggcacagagctgctcaggtcaagccgaggctcctcagcacctccttggaaacccacagagctgcctgctctgagccaagagtggcccttggggttgtgggtgggcaatagggtggccacgtatgtggccagagactgggaccaggggctttggagcctggcttttgtccccagaagcatttggggttagggaggctccaatgtccctttcttcagagcgggtgagccagagaggtgtccccagcgcccctacmtaatgcctcccactgctgcccgcaggaatggttgtctgcaactgggtagtcatcctcagtgtgtgcatcactgtcctctgcgtcttcgaccccacgggccgcacctttgtcaagctgagagccaccaagaggaggcagcgtaacctgcggacctacaacctgcggtcagtcagcgggctgggtgggcagtcccagggtgggctttgctgtctggtgrgcagaggtctccattcttcagaaggctaccccaggcctcccagactgcatgccaacctcgtgtgagccgtgggcattagtcaaagggcttaactgctccctgcctcagtttccttgtctataaagtgggaataataacaattcttgtctcatgttgttgtgagatttaactgagctaatacctgcagagtgactaacacagtgctcacactgggtaagtgctcggttaatagtagttgttgtcatcattgtccactgctgataataacaatggtaataacagtgaagccaagcattgcgtgtagtaagttacaagtccaccacacagctgtcawcttccccataatatgggtggagaaactgaggtacagagagatgatgggacttrcctgaggttacacagctagaaaatggtaaggctgggaactagcccaggcagtctggccttagagtcctcgcttaactagctattaaattaggctaggctgcctctaggattcagagattgggagaggcaagtcaaggaaagcttcctagagggggtgagttttgcatgatgttttaaagatgggggaaagtgtgccatggcagacaaaatgagggagggcatccaggtagtgtcacaataatttgtttgttgaaagaaaaagagaggggcttccagggtgggtcccagtacctcctgttaatggggcttctacagtgcattatgtaaggagctccccatgccaagccctttacgcaattcatccatttaatccctttgtgaaccccggcatggttgtgagatccattctacagatgaggaatccaagtcccagagagggcaggtcacctgccgtgggtcttgctgctggggtgcagaactggcaccacacctgcagcccagagcagctggctcaagcacctggggagcaggctgtctggacccccgctgcccggmaggaattctcaccgtcccaccctcctgcactgctgtgttcggctccccgtggaccttccacgtcagctcagcactgcagccagagccacacccgtgcctgctgtggccacgtcccagcccaaaatgtcaggtctgggagccaaggccccaaagcccatattccctcccagcccagctggccaccaccacccatcccacagtgctctgggaaccctgcttggccagcacactgtcccttcatgccccagaaggtgggacattggtttaggatgtacagctgtccaagtccctaagagccagcaggtccccagagtagcaattccctgcacccttccctacctgcctcccgtagccctggaagaccctgttgccctccttctccttgtggccatttgccttatgaagccagggttggagagcgggaagcggtccttagacacacggaggagccaagaggctcaaaaagggcctggcctgtcactacagattgatgttaagtgccttgaatgcatatgagggccacccttgccttcctctcctgaccacccagcatcaggcttttaaggggccgcacatggcacaaaagcaagctagccccttcttgctcggtttggaggtctgcacttttaatgttggatctgttatctttatgctcaacacactgactgcagacatccagcctaggaggaacctctgtgaataactggcccattgctctgcctttgggtacagactcctggagaccctgattctccatctgagcagccagacccactggggatggggttggggggtgagaatagacaagggcaaccatgtgggtgaggggtagagccctctccctacctaggtatcagatccaaggaattgggaaatgcagagccttactcagccccatagatttcctgtaagtagagtatgtaagtatgtaagtgtctgaaatcctttctggggaaaagcaggtctttctggaaggtctgttccaggccttagaatgagacgacagggaggcccaacaccctgctgacctcccagggtttgagcctttggacacctgagctgcagggtagcccccacttagggctcccagctctgaagccccagagcctgcctgtgttcagtcttccaaaagccaaggagcctctcaactgctccccacctctctcttccacccacccacccttggccaacggcacacaccatcttaggctagcaggagtctgtcagggagggcccctgctggccagcagccaggccactggccaccagctctggcagggcctgggccctgttctcccccagaacccactgcgggaaccctttggtagggtcctgggaacagcctgccctgtttccataacgtctgggtcccagctcttctggtccagccctctgacctcacacataccgcctctcctgctttgcaggcaccgcttagaggagggtcaagccaccagctggtcgcgccggctcaaagtgttcctctgctgcacgcggacgaaggactcccagtcagtaagtactgggaggtcgctcccctctggctcacatcctgtggtcaggtgattaaggggctgttggctcctttggcaaagcaggatggggcagggctggtgggaaggagctgggtttccagcgtgagcaagtatggcctgctcacacagggcctgttattcactgagccactcgctccagcacgcaggaccacgtccacttgctttgtcaagggaacagaaagctgtgaagactgcatcaactcccttggaacttatactctagtttaggagaagaaatatgcaaagtcagggtgacctgaagacaaagaaaagtagcgtttcaccagcagcaaattaatcaagaaggcctggcaaagccgataggcgtttagcacggtcctagatggggacacatagccttcagcacctgggagctcagaggagtgaccagagggccggacttaatgccagggcactgcagaaggaagacagggccagctgggggcggcccccaaggggagggaagggaggcaggccccgggatcatccaggggtgccccgcagcgggcagggaccttagagatcatctagtcccacccctcattttacagatcaggcagctgaggcccagagaggtggagtgacttgctcagcgtcccacagctagttagtagcagagccagtgaggtcaggagaccactcctccctgaggcagacagcaaagtgccttccacggaagccaccgggaagcctcgagtggctcctgcccaccagcgtcccctggtgagccrtagagtgagtaatcaagtgtaagaaagcccccgaggttccctggtgggcggggagcacccccttgggtctctctggggcggtctgaggggtctgggctgcaaggcaggccatgcagagggcagagagccggcccctggcggatggaggctggggctgctgtgtggagggcacgcctgcccctctgggtgcacgggcagagctggggctgttgtcagagtctggggaaaagatagcacatcacagcagagccccacggcaaaggtcctgttagacactgatggcctcagggggcaggtctggtcccaagcatgttttgatcagcgtgtgttgtgttgcttacacattttaattggatgccagcatttaaaaatcaggggtatttccataaacttctgtatttctgaatctggtgaagtgggccctggagggcctccggtcagctggagccgagcagtatctggctccgtttggctccattcggcatttgaatttgcagcccttgatttagtcacttacaagtgccaaacactcaggggcgagacccagtgagacagacttcattgccatgtggttgttcccacctcagcgtctcctaacaggttagggaagaggctctgggctgcagcctggggccaggaagggaagactaagagggcaccagccagcagggctcgcctcctgccctgaggcccagacatgcactgtcttcaggccaagggcctggagagaagccatgggggaccactgggccagagagtacacccccttctagggcacattgtgggggtcactgagccagcagcctgtgggtagctgggggaggggccctgagacctggcaggctccacagaggccttacgagggacttccaaggtcccagctggtgggtcagaggcagccaggagcttagtttggtttctgtgctggagagaatggctagaggagaaatgagccagagccacccggccttgattctagcgtctgggaaagcaaaaaggagtggctcaagttggcgcctgctcttggtagacagtgggcaccatgcgaattccaaggagaggagagggctgggtggctactgccaggtctaggagccctgggcagggccctcagggtcacagggccacatggggtcaggctcagtgggcgctgtggaggtgctggggagaacctgtccaggggaccccgagcagacacctgcttctgcagcctcccagccctgggggatttactcctggcctctcgtcctctctcctgctcccctgccactgcctcctgccttcctggacctcgtaggatgcctactcagaaatcgcctacctctttgcggagttcttccgggaccttgacattgtgccatccgacatcattgctggcctggtgctgctccggcagcggcagcgggccaagcgcaacgccgtgctggacgaggtgagcaccaccagccccttctccaggtcacctctccacaccacccttctttcaggccccttccctgtggcccctgcagcggagggctcggctcccacgcagctccccagtgaccacgcactctcttggaccctggaggtcacctttacctctggctccccctgccttcctgagcttgtccttyggccaggctttccgtgactactactctagggactttctgggtcgtgcatggctgcctctggggctggccctcaaaggacttctaaccacaggcttagtggacgtggtgagctcccgagtcggtcttctgcgtggccgctccgcccaccccacatccccaccagcacaccaaccccagttagggtttctcagtgtctcatacaaaatacctttcgcctgctgtgggccaggaatgtcctcaggggcttgatgttttgggtagaaggggagcatctggaaatatgggsaaacctcagattttggaaaagtggctgaatcttggaagaactmgaagctgcatgctcgtttgggcttctcggcctttgggaagcaggcggacgccagggcctgggccccctttcccagccatgcagccgggcctgggccagtgattgtccttcttcacctgccggtcttacaggcaaacaatgacatcttggccttcctgtctgggatgccggtgaccagaaacaccaagtacctcgacctcaagaattcagtgagtcagacatcaactctcaccccaccccgtccccatccctcccactctgccacaatgacctaagcaaactcctcccagctgcccttgcagtgccagccacattgcccctgcccggtctccccccggctctccagagagcctctctgctcagatcatgcccctcacgagaaccayccacttcacaccggttcgacagacraatcccctgaattcctttaccaagttcagaagtgtctggtcctggcctcttgagatgacagagcacttyaccagggtgagctgctagcatttttgctgctgctgctgctgttaatgaaacgcaatgggcgtagtacttggtttccaagcttttttagtagtggaaccttttctcaatcgcctttcgtagaaatccagtgtgtaatagggaaaggtggtgccagtaacatggtgggagaaccccagcccagggcccagcacacagcccagggcccagtacagcccagggcccagtacagcccaggctgaaaccacagctggcagccgggagaaacaggccctgcctcaggaagcaaatggctggagcgtgcatctgctctgatgcctgtcgctgcgacctccagcaggcccctcatcccctctgagctggatcctgaatctgtgaaatgacactaggcacaccttctaccagagctgtgctgagaggacacgagccattcccatcacagtgccaggaagcctcggtgccagccaggatgctgatggaaaggattccgtctcttagaaatctcagtcctttaggccacgtgtgctgccttgtgcctgcaatcccagcactttgggaggccgaggtgggaggattgcttgaggccaggagtttgagaccagcctgggcaacatagtgagaccctgtctctacaaaaaaaaaaaaaattagccaagcatggtggcacatgcctgtgaccccagctacttgggaggctgaggtaggaggattgcttgagcccaggagatcagggctgcagtgagctatgattgccactgcactccagctgcactgtcccttaaaaagaagaaaaaaaaaaaaccaacactcagtcctctagaaaagcctcagtcctccctgcctgtccctactccccactaaagcaggcatttgtatcctctctaaaaatagccacatccatagtaagtgccccaaaccagcccatttctgcttgccaggctctgccctggctgttctcaccaccttctccctcccactcctcacagggagcggggagggcaggcagctgtgactcccatcaagtgactcccatcgaggtgccagggtcacacctgccacctggcagaggctgccagggcccaccccgcccccagggctgcagggagcttctgacagggagaggataattacctctccactctcgttcctgaagagcagctgagctggccagggatgtttccacccctccgggccctgatcaaggtgccacctatttcacttcacaaggtgactaaccaccctccttaacttttacaaggtgactaattccctctcccggtgcctggggcactcgggaaagactggaagctggcagacactttgctggggcacccctgcctcttcctccctccaccccagcagccaataacctcctcagcatcaacagtggctgctgggcctcagacacactggctttcaaactggtgcctttctcccaagagatcccartctcccaccaacgcagcccctgcccggagccctgggagcctgcagctggctgagtcaagttgaaggctcccaatatttgcagtcaaagaacccaagggccagagatttggtgattggtctcctggcctagcgtggctgccctgttgcccaaggcccacacacgccgcccagctggagggctggggcctctcagggctacattttcccagcatcaagggcccttctcagggctgattgccgaggtggggggattactactcacatccctcaactcttcccttctctggaaaacaggcaaggaaatggaccaagtgattttctgtccccaaatcattaattctgagactggagcaacaggacaggtctctgaggattcgtgtcctggttgcatggagataattagggaaatgcaattatcacctggaggagtgtccttcctccaaggcctgggccccacacctcaacaggggaccagcaacccctccctgccaggggttgggtccgcaggctcccaccctggggaactgctgggccctgaggctgtaggcaggaagggcaggaggtgaccgccctctgcctcctctcttctagcaagagatgctccgctacaaagaggtctgctactacatgctctttgccctggctgcctacgggtggcccatgtacctgatgcggaagcccgcctgcggcctctgccaactggctcggtcctgctcgtgagtacccctgtcccatcccccagcgattgcacctctcctcccgggtggtgtgtgaggaagggctaccgggctgcgcctactgctttgccctgaatggcttcttttctacaccttctctgggcctcaacctttctagttctgtgttatccctgagcagtgaagttgtaggcttcggagtcacacagttatgggttcgaatccagatgttgtcacttgcagcctggggcaagtgggtccacctctctgagcctcagtttctttatctgcgaagtggagatgttgatacatacctcgtggaattttttggagagggctagatgagatattgcataacacccacactgctgcctcccctccccttctggcgttctctctctgccccctcagccattcccttctgcccacatcttcccttctctcggctcccctcatgtgctctgcctttctagaagaaaggactttcctagtagagaggcccaatccatagaggtctttgaaaaggcaccaagaaggcctgttagttaaggctccaaccttcttcataggatctaggaaaggccttagccccagacctggcctgcagcctagctctgcgctcagcccaccgcttgggggctgggtggactctgcattcctaagtgggccagagaagggcgcctgctccaggaggaacccctccctgtcctgggtgtctccgccctcagctcatgccaggcagaaggaggacagttccctgggctcccgttctggaaaggctggcatgctgggcagcagcttctttccttgacacccctgcccttgggacccacagcagccacacccactctgcagcgccctccctgtcctcagaaagctgggtggctctcggggccttattctcaccatccctccagcgactgatcagagaggactagagcacctcatgcccccttcccatctttgtcagctgcatgtgcctggcattcttgcctgcatccctgggagtcccagctgtggcagagaactcttcaaaatgagcaccaggctccattactcactggtggtgtggggacagctcttagagcctttgtttcctaaactgtaacaggtggtatctgtcctgcctgcccatagggtgtttcagaacccagggtatcactggcaggcagggctctctggtgctctgcagacaggaggggtgctggcatttgtattaggtgccttagtgttgcagagagagcagagtccctagacctcatgagggcccagccaggcccctgcctggaagaaccaggtgcctgtggggcagagagaggcaggcctgcagcccagggtgttgggaggaggccagagtccagtgccccagcctgtccataacagcctggccagagggagaagggctgcccatctgcctcgggcccaggcctctcccctggcagcagttctcagcccatgcagagcacagcgagccaggcctgcttctggcttggccctagccctgccctggatgagccccagggccctcccatccggggtgctggccctgctcccctgactggtcctcctggcccacacatcactgactcagaggyagccctgtcaccggagaagcgaggagccactcgttattaagaacctattataggccagaccatttctgcatcttggacccttgatctcacaccagccttgtgaagtagctgtcaccacctgctcttacagaagaggaaactgaggcttagaatggctgagtgacctccaggcccttgcggtcaggaagtgatacagcaagggttcaaactcaagcctccagtctccaaaggccacactgttacagcctcatgctcagctgaggttggagagggaacagctgccgagcacaggagctcagcccctagaccctggcccatcaccacttgacctgcagtgtgggggaccatgctctcccattgtacatcggctttgtccccccagcaagcactgtggctttctcagcaaagtctctccccattggaaagtgtgtaatagtcactcaggtgatgctctgagtgaagacaaacctcctagcatcaccagaatccaagcttcttaataaaatctcagctgtcatcccgtgacagctggcaggcccagtcacgtgggctccagcgtctggtgccttagcagttggatgctggctccctctggtggcctgaggtgccgctgcacctagctgggtgcccagctcccaggctgcctcattcatttctgtggggaggctactgtgtacctggccctgtttgggtgctggggatacagctgtggacctctctgtggtgctcactgcccagcgaggaggcggacagcgcatagacaaggcaaatagggcacatggtggagcrgatgggcactttggacccacataaagccaggtgcctgggatggggagtgctgggggcctggggagccctggctgttagatgaggtggcaagagagacctcactgtgacaggacgtttgaacagaggcccagaggagcaagggccaggccacgctgtctcaggtgctgctgaacacgctggcagcaggtcagagagaccagagccaggtggggtagacagggcgttgctgtagggtcttaaaaagaaaatgatgtggctcaacttatcttaaaagggccactctgttgctgagctgagagcgtaggggcaagtgcarggaggccagtcgaggccaccatgacagtcccaggcagagctgccagggcaggggtaggggaggtgagggagtgcctggagtccagctctgagtctgaagggaagccgagtacgtgtactgaccgagtggcatggccgtgggggtgagggctgaggagccacagacagttgcaagccagaggccaagccaccgaggggccttgggaagacctcaggagggttggggtacacaagcagggaaggggtttgagagctggcagggtgtcaggtgtccgagagaggtgctggctaggccattggatggaagcatctgggtgttggggcaggcctggggtggattcctgagcatgcagatggtgtctaaaacacaagactgcatgagtgcatggaggagccagtgcccccagagggaccccagggcttcagtgttgggtgcatcgctgagtaggccctgcccggaggggagatcccagagaggagggggccccagccaggtggggagagggaagggcccacagggtcaggtgccgccaagagctcagttaagaggaaggctaagagtggccagtggatttggtgacgtgggggtcactaggacttagcaagggcaatttggtagaggcagtggggctgaatgcccaactggaactggttccagggacagtggcaggagacatttgttccctcggggactccctggccctgaactctcttgtcaccccaccctaggtgttgcctgtgtcctgcgaggccgcggttcgcccctggagtcaccatcgaggaagacaactgctgtggctgtaatgccattgccatccggcgccacttcctggacgagaacatgactgcggtggacatcgtctatacctcctgccatgatgcggtgaggccgggcagggctggggcctggtgtcaggagcaggcagctgagggcctagggtgctgaggctatccttccaggccggcaggagcccttgcttggctggtgctggctggctgcagcttccaggcatccctagctgggcagaccagaggtggcccccttctcttccccagaccctggcttgcctgtaccacctctggggctgggaaagcagacatcaaccccacacccagtgtttgggttgccgagccctagccctttagggaaaggaattgagggcagaagcagggaggggcagccatcacctggactcaggggcaagtggtggcactcagggctgccagagccagcaaggagcggggagggcagggcaggcctgtggctgggatcgggaggagatccccagtgaccctgggagcccgtcagcctttctggyggcagaggctccgtggctggtggagccagagttcctggccaggaaggagacctgcctaggtcactttccctgagtgtggccccaccagggccgctcaggctcacgagctgcccgcctcctaggtctatgaaacgcccttctacgtggcggtggaccatgacaagaagaaagtggtgatcagtatccgggggaccctgtcccccaaggtacgctgcccatggctcccagcccccgggggtgcctgcctccctcttcctgtcctctttagccgccccctcacctgtctcctctctccccaaggatgccctgactgacctgacgggtgatgctgagcgcctccccgtggaggggcaccacggcacctggctgggccacaaggtaacccacgtcatggaccccagggcccctgggcttctttcctgccctgccagtgtgcagaggcgtgtatggttgggggttcctccctgctcrctgggctcactggaagagattggtcagagaggcatgaattagtctggaaggcccgttgcggcccactgctgcgaccccactgccctgcacagcccagagcctgaccatggaagaacctgagaggcagctgcggagagatcataccagcttcattagccacactgcccctctgagcctcagttcccacctgtgaaatggaagtgacaggatcagcgtgtctgccagcccccacagctgggttgtcacraggcccaaagggaaaaatggatggggcagggttcctgagctgcaggtcactgtgggtttgctggtcactgggaggcctcccaccaacacctgcttctgttcctgcccacccagggtatggtcctctcagctgagtacatcaagaagaaactggagcaggagatggtcctgtcccaggcctttgggcgagacctggtgaggaattttccatggcaccaagccttttcacacctgggtccccctcctccaacgcagcacagagaggagaggatggatgggtgatggagcctcacaactcccacacaagccaggctcctgcaatcccttccagcctggctcccaacccctcctcttttgtgccaggtcctgtgggcatcctgctccgccccacctacagtcattgggcacctgattcatgccagacactagaggcacaaagatgattcagggcagacggcttttaagcctcatagctgcagaaccgtttgtcagaaggaaacatggagaggctcaaaatacagagcagagagaaggggtgctgctcwacctaggggrkaactgagtcctgcccactggccacggtctgtgcaggtagctcctgaggtgccaccagctgccctttccaaagcaaagcaggctctggcctcaggagacttcagtctagtagtgagggtagagagatggggtyaggtaaccacatgtttatagtgataaaaagctccatcccaggtacagatgcaatgactagagggagtgagccactcctggaaaatcagaagggcttccccaaggacataacctctgagcaaggtttggaagcgtaaataagagtttattagaacagtctgcctaagcagtcgctctgtggggccctatcttggttctctgtgccctagcattcacacagcacagacaagatcccaggactctgggaagatgggaagaccctctgcctcccttgggttggctaagacagtcgcttggcgggcattggggcagggctctcaggcttctctcggtctccagggccgcggaaccaaacactacggcctgattgtggtgggccactccctgggcgcgggcactgctgccatcctctccttccttctgcgcccacagtatccgaccctcaagtgctttgcctactccccgccagggggcctgctgaggtgagccatctggggcttcagagttggctggggcagttgggaccagtggaggctgagggttggctggtgctaggggctggactgggagtctgacttctggtcacatggaggtctgggagtggcctggagggtggagggtgggggctctgaaatgccatgcgccccccaggatctacctagcaaagccttaccagtgggaaagacagagcagggagcaggcaacccagcctgccaccagccagctccccgggagccatcccaggagtgcaggagcagggcttgcttgtggctgggccccccgattccggaacaccaccaccccgcccccttggccttagcttctgcttcggcttcccttgcagtgaggatgcratggagtattccaaggagttcgtgactgctgtggttctgggcaaagacctcgtccccaggtgagtccttggccccgctccatggtcccttgccaggctgttcctccctcctccaggcctctccccacccccagcccccgcatctctctcagtccgattcctgtctctcaagggaccccacgcccctccccacccttagttgcccagtggtgagaagcccaggtgaacgcacgtgctggcgcccgccctgcctgtcctctcactcctcagctctgctctggggagctgctctgtggacacctctccaccccgtgaccctggctgacgtgtcttcttgttccaggggctaggcgtgtgcctgcccctccgcccctggccccatacctctcatagccgctgaccaggcctggctgacrgscctgtctcgttccctccccaggattggcctctctcagctggaaggcttccgcagacagctcctggatgtcctgcagcgaagcaccaagcccaaagtgagcccccacctggkcaccctgcctctgtgcagcctcatctgtccctgcccttgacccccaccggtttcttgggacaaagcacaagaggccctgccatggaaggccagggcagggtgtggctggtgttgtgggaacttcaggaagtcagaccctcagcatccccaagctcaacccatccatcccctgtcattgtgcagatggggaaactgagacccagagtgggagggacttgcatttgctcacataaaaagttagaacagaatcaggacaggaaccgagaggctcccatcacacagagctgggagctgcccacagtcaggagaaagcgatctggaggctttgagcggtgaggaaaggcctctgccgaagcctctgagattccctaggctcagggagggctgggaatgacctgtggagaggatttgggtacagtttgttctgattttctgctgtgaccaagaggagagggtcagcccttcctaatccgcatcaggtctctggaggacactggcagacggggtggccaggtgggggtggggacatggtggccaggcacactgaggcaggccagcgcaggaggagagggtcctctgtgtggtcacccctcctcaccccctgccccccgccccctgccccgggcgagccctcagcccattcaccatctcagccccgtctggaccgttcccagctttggtgccctagaccctgtggcaggcagggccctgggccaggtaccaggtgccaggcagtgagcagggcagcaaagctttgygggactttgcctgyctggaggagcctggttctggggaggtggaactgctcccaccagattagtcctgggcttttgtcaggccaggcctggcaggtccagctggactcaactccagggtgtgtttggcctyggacttgtggagtgatccagaataagtccyttcccctcactaggcctgtctccccatctactagatgaggggttggctgggcttccagccccttgccagccctgaaattcaacaattccatgtcatctgtccttggcaccttattggccgtctggccaccgtgcacctcagccactgcctcttcaggtgggcaccgacctttaatgctctggccactgcccttcccctgcccctttgccatcttactgcccacctctcacctgctgagccccccttctcggtccccctgcccctgccccccagccagtgctacttagctctgtccccatctctcccactccaccccgcgcagtggcggatcatcgtgggggccaccaaatgcatccccaagtcggagctgcctgaggaggtagaggtgaccaccctggccagcacgcggctctggacccaccccagcgacctaactatagccctctcagccagcactccactctacccgcccggccgcatcatccacgtggtccacaaccaccctgcagagcagtgctggtaggttctgccagggtctgctgctgcagggggtagtggccagggcaggggcagtggagagcagggccggccttggctcaatcaccgctcggggctgggggtggaggctgggagaagatggcccagggcctccatggaggggtttccccagcatcgggctctggaaatggaacaaaaggccagccctgagcaggactccaggcgtctctctccatagtctggctttgcctccagtgtcagcccttccctggtgtgccccagggcagctctccccactggtggtccatttaaaagtaggtgccctggagggctcacccctcaggccctggccagctcacacctcagttgtcacttggtttcaccaagggaattcctcgaagacagctgtgagcaaggtgggggctgcgccaggagagagaataggagcaggcaagtsggtagacctttcccactgtgctccttcagacggctgrgccctggctcctccctccagggtcggcttcctcccctgacacagctggtgagctgggccgtgcagcaggtggagcaggtgtggcccaggccaaaagcaggtcgaaggctgtggagggaccatggctgaggctcgaggtcagcctttcccaggctgagggcagggcaggagccaggccagggaacagagccctgctgccaggcaggccaggggcctccaaaccatgccagctctgctgagcagggcagagaacagagccaggaggccctggcaccgagggccaggccaccaccccacccttaactcccctctgtccatgtccctctcagctgctgtgagcaggaggagcccacatactttgccatctggggcgacaacaaggccttcaatgaggtgatcatctcgccagccatgctgcatgagcacctgccctatgtggtcatggaggggctcaacaaggtgaggcagytcccggcagggtaccaccagggaataaggcactgtcaccccatcagaaccccgtaagcaccatcagatcactgcccgattttacagacaagggtgctggggctcagagaagtaggtagctgggccagaaagccccactcaaatacttcaacctcacacccctggctctgtccacatcaccacgttgccccrtggtggggaggagataaggagactcccaggggcctgtccctgaggcaggctcagctcagaggcccggaaggccacctggcccttaacagatgaatgggcaagcagcgacagccrcagccatcccctggctgcggaaaggctgarggcaggtagggcaggagcactcgccgggctgtggggcgagtcgtgaccagatgggcaagtctcaggccttggggagtggtgacctcaggaggaggagagtgggacccaagtgrctccatgaggctttgcttggcctgagaggcctgggccctggctccacatcggccccacgatggggcctgatgtccctccaccacccccagcctcctctgtcctgtcctcaggtgctggagaactacaacaaggggaagaccgctctgctctctgcagccaaggtcatggtgagccctaccgaggtggacctgactcctgagctcatcttccagcagcagccactccccacggggccgcccatgcccactggccttgccctggagctgccgactgcagaccaccgcaacagcagcgtcaggtgagccttggccactcccagccccaccccagggtgagtgtggttcagagcacatagacttgtgtgcacatgcattttgtgcatgcactgggctcagctctgcacacgtgcacaggaggggtcaaactcaccctctgtgctctagggctctcttgctgtgctccagctgtcccacagcctgctgtccctgaatcctacatgagccaggkgaggcacacagacccacaaaccctgggccacaaaagcacagattcactctttttttttttttttttttttgagacgaagtctcgctcttttcccccaggccggagtgcaatggcgcgaccttggctcactgcaacctccacctcccaggttcaagcgattatcctgcctcagcctcccaagtagctgggattacaggcrcctgccaccrtgcccagctaatttttgtatttttagtagagatgggatttcaccatgttggccaggctggtcttgaactcctgacctcaggtgatctgcccgcctcagcctcccaaagtgctgggattataggggtgaaccaccatggccggcctgcacagattcactcttacacacttagacgcaaacagatggacacccatttacttacatatttgtattgaagcttacacacatacatgtgcacacaattattagttataagtacacaggtcaccccctacagacatgcacatgtacaagacacacaccaagacaaaggtggagacacatatacaaggacacatgtggacaggcagstgctcatggaaatgcatgaatacacctgtgcacagacccagacacacaagccagctgacatacacagacgtctggtctacacactcatacacatgaacagaggcgtgcacacatgctcacaggggcacgcacatgggggccacagcgcccttgctattcacacactctttgaggggtgcgaggctcttaagtggtagtccttccaggggaggattgtcctgcctttctaggaccttcccacacaggccctgtgtgcttggtcacagatctggtcaagaggctgcttcctggcccttggtagggacaactggacgtctctccctgccatttgtgcatttcctgtggcagctgcacaacccgatgaagaagccagtgtccatttccggctgcggtgactgctgcaagccacccactccctgccctgtcactcattccctgcaggctggtctgcggagccaggggcactaggctccccacccagcagagggctgcggcccatgggagacaggaggagacccggatgaggaaggaagtgatgagatccctgggagtggcacccagggttgctggctctgagattggggtggaacacagttggcatgctatgtgcagggcatctctcccattcactctctccctccatgccctctgtccctccctctgtctctctcattccactgtggcctcatgagtgacctggggcaggctcatgagtgatctggggcagccagtctatcagagcctcattctcacattggtacaatgacrggggttctggtgcagagaaccccagcagcactcctgaagtcctagtgctgccagcagggccttagcccctcagggaccccgcggctcaacccagcatcaactcttttgtcttctatcttgggttcttgtgagttgtttttaaaaaataatcattcctggctgggcgcggtggctcacgcctgtaatctcagcactttgggaggccgaggcaggcggatcaccaggtcagcagattgagaccatcctggctaacatggtgaaaccccatctctactaaaaaatacaaaaaattagccaggcatggtggcgggcacctgtagtcccagctactcgggaggctgaggcaggagaatggcgtgaacccagggcggagcttgcagtgagccaagatcgtgccactgcactccagcctgggcgacagagcgagactccgtctcaaaaaaaaaaaaaaaaaaagaaaataagcattccctgctgcacatcatcaacaactgctaaatgaactgtaccctttattccctgcaagttccttttagccagggagctggggttcagtcccctctcccttctgagtcttataccccctgctctcctctccctctgcaggagcaagtcccagtctgagatgagcctggaggkcttctcggaggggcggctgctgtcgccagtggttgcggcggcggcccgccaggacccggtggagctgctgctgctgtctacccaggagcggctggcrgcggagctgcaggcccggcgggcaccactggccaccatggagagcctctcggacactgagtccctgtacagcttcgactcgcgccgctcctcaggcttccgcagcatccggggctcccccagcctccacgctgtgctrgagcgtgatgaaggccacctcttctacattgaccctgccatccccgaggaaaacccatccctgagctcgcgcactgagctgctggcggccgacagcctgtccaagcactcacaggacacgcagcccctggaggcggccctgggcagtggcggcgtcactcctgagcggccccccagtgctgcggccaatgacgaggaggaagaggttggcggtgggggtggcgggcyggcctcccgcggggagctggcgctgcacaatgggcgcctgggggactcgcccagtcctcaggtgctggaattcgccgagttcatcgacagcctcttcaacctggacagcaagagcagctccttccaagacctctactgcatggtggtgcccgagagccccaccagtgastacgctgagggccccaagtcccccagccagcaagagatcctgctccgtgcccagttcgagcccaacctggtgcccaagcccccacggctctttgccggctcagccgacccctcctcgggcatctcactctcgccctccttcccgctcagctcctcgggtgagctcatggacctgacgcccacgggcctcagtagccaggaatgcctggcggctgacaagatccggacttctacccccactggccacggagccagccccgccaagcaagatgagctggtcatctcagcacgctagcaccccagttgcgtggccagccgggcccaggcaggagcaggtggccctgtgggcacctggtgcctgccccctgcygggcagctttaaggacagacccccaggggcagtttagcctcaggcacaggcatcgctgctgagctgggggtccgcatccctacctcagcttaggacccccagagccaaggtggctgggatctggccccacagatggggaaagatggggaagggtgtggagtggggaggagcctgggcagcctgctgggtgggccacactcagcctgactgccctccatgggggcattctggcaccccctgctccaggacaggccatgggcaagctgcctcccatcactgcctgctggctgctctcccaggggccaggtggagagcagtgccccccgacacatgtattctcatctgtggtccaggccggcatcgtcctggccaccccccagatctggtgcctgctggccggccccctggggtgcccctgccgaggtggcctgcagtgctgtacatgtttacagaagctgctgggcttggctcaggatgtgttctgggcttgcaagccccccgcccaatcatgtgttcagtagccrtcctctgagcagggcccaaggcagccaggggcctggaggggccagaggagggtggggtcagggccgccccttctctgccttgtgcctctcatgctgcctcctctgcccatgggtcctgggcacccaggcctgccctgcctgctggctacttcctggcttaccttctacccccaaggatcctcaccacccaaagggtggtgggcactgctgtgaccaccccagctgcagagtcagtgccctgggtggaaggaaggcactgagagcccccttcctctgagggccccacctcaccccttggtgtcacccccaccacgcctaggcagctctgggccctgggatctggaaccaacacacccctgttcccctcagctttccctcctcgctggcctgggcaccctcctgggagcaggccttcctccctcccacccccaatgtcctgttggtaggaggtggggccaagagtggggtatggtgggccttggctggagacctctgtccactgcccagggaggggcctggggctgggagcagtcccggtttagcctgaggtccccatagggcttcctcccctgctgggtttgggaagcagttagggagatagcgacccggagtttccccagaagcggggtgggagggtgtgcatgctagtgttggcgcgtatgcatgtgcatgagtgtgcaccgttcctaaggaaggggcctctggggctgcccaccctacctgccctgcctgcctgctgcccctcccagcctgccaagaaaacggtaggggagcatgatggggcctttgaggcagggtcgcagggacaagctcagctttaggcaccatctgttcccatcgcgcctgctgctgtgacccgttttggaaaactggtgtgtaccgaggcgctgactgcacggctgaccgcctgctcgtgccttcattctgcagcggcatggtccctcccattctggctccacctgcagcctccctgggtggcctaggctcccccgaccaagagacctccctctcatgatcactggtacctgggggcctgaattctggcccccggctccccacacagctgggactggcctggatggctgtcctgggagcccctgcccaccctgacagagggagctgggcctcccctcatcctctgtaactcccgccttcaccagactcraggacaccctggccctgctgaggcatacagagcttcagcccagcacagaagcaagacaaaatcagtggctcttagagtttagaaaacaagacagactctcagatgaaagatctgacaagcaccgtggccagtcacagggagagacttgatgtctggccttttaattcctcctctgccagggtgggtcctgggacctctaatgtgggcatgtcgtccaccccaggacragccatcagggacagaccccccacccccaaggctgcagccacaccatgtttcaggcttggggctggggcaggcttgggctcaatcctgggcacccaggggcagcccacccctaacctggctcctacccacctygcccttgaaggatgggcctgctgcacgtctccctcctccaccccatacmacactggggggtctgagccacccccctcagccccgttcggctcagaccgacccccactccatccccagacctgcagcacaagtgcgcgggcctgtcctcccaggggcctgggcgactccatatgcaatcagtagcgagcagccgggccccacagaccctcatgcactctcttacgtgccattctccccagactttttttgtacttaatgtatgaaagatccaaactaatattgctgtaaaaaggagagacaaattaatatagcttattctataaatatatctgtatataaaggtttctgtatattgtatagagctgtgtataaactggatgtagaagcacgctggctgcctcgaatgtctttgcatcaggtggggactgggtagaaatttgatgtcgaggttgcagcagagcagggggttggcatggggccgggggccgggggggcctctgccactgttccctggatggaacagaaagcctaagggggaaacagattccttgggaccagagcccgtttcacccacaagacgcaggstgtgtttgggtggttcaggtccagccctttgtctgtattgggttagaacttcgtttctcaaagttcacggtgctcatgactcactggggcgcttgctaaatgcaggtgcgggtttagtggtccggggtggggcccaggtatagatttcttacctgctcctgctcggctagtgccctggccyggggccacactttgagttgcagggagggagtagaagacccttgaagccccctgtgaatgagggcagccacttgcggagtcctgcctgtgtgagagatgtaccagcgggtgcacgttcatactacagcctggaaagatacagcttgctggcctccccttcctccctgaggggtctgagaggattagctgcccaagactgccaagctggcgactgggggaccaggctagtctgaccatgcccacctccctccccaacaatgcagacagctagggcaggcaggggtggaagatcccagtgggacagcactgaaatgcaggggccactagaagtctttgctgagggctttcctgagagggcgcaaaatacctggccagacccagtgcagcccaggaaccccaggccagcatagcttccgggcagtgaggcctagggagtggctggaaggcccaggtggtggggcctgccccctctacacagcaggtggcgctgttcagccagtcagtcccgccttggccgcagagtctggcctcggcactgacccagccaagctgaccggacctttcccttcccctgaccctgcccccatctcggcccccagtgtccagtggctctatttggtgaggggctggggagagtgatagaagaatgcccccagccttagagcctgtcttcacccacagccactgaacagaagcagaaacgggccaaacaagggtgaagacctgcccaaggtcgcatgggaggtggggacagactggggaccagaatcagggcctctcagcctaggactctggcctccaccacacctgatggctttcagaggttctttgccctcagtggtctcaatggtctgcaaattatcctgtccagtgagcacagcacaggcagaagaaactgaaggccagggaggctctgtggcttgcccggggctgcagccagggtgtggcattggggagggtcttgagagggcagtgctgggaagggctagagaggcactctgcctcacgctccactcaatacctgcagcagccccctcctgtcccggtgcccctgcagtcaggaaggggtctaccctgcaggaccccacactcaggtgtgcccttgggccctagtccggggaagctggaccaccagcctcactggcttgctggattgacactcaccccactttgagccctcctcttcctctgcgaaatggcctgatgccagtgctgtgtgggtccacaggaggccaggagagtcccacggtggggaggacagggctgtaccttctcctgggctggcctctacgcccattacccattaaccctcaggtgccagcatccctctccccagtgctgccttcggtctaccacctcctcctggccctgctcccactcaagggacagtgatgggtgctgagagctgattggaactggagagggcaccatttactgatcactgacctggcactttacctccactgtaaggcagggatactgagtgtgctttatagatgaggcctctgaggacagagggcaggccttggggactaggtggagctggctacaggggacagccatgtctgctgggctagggctgaaatctcagcccctcactcactgtggctcggtagagaagccagrggcacagatgaggactcatctccattgatgggcccccctaggtccttgtatgcaagtcccctgggctactttcaccggcccagccaccttcctgccccagcctctgccccagcgctgcttgggacccaacttcattatggagttggcagatggcagcctcaactcttggctgagcccttgagtctgggacatttcagccacctctttcctccagtccagagatgaaaatccctggggacagttgctcctttgctcagtgacctagtgtaacaggggagatggcagggcctgagctcccttagccaggtcagctgctacagggttaacaggaggctccattccaccccttccaacttcaaggctaccctagagattgaataatctatactcttaattgattataatgcaatggagttggggcgttagggacaaagtacgagtcttcccttctacctccagcccttgctgaccaggacagggacaatgtgtagctcaacggatggtggtgagaacttagatgatggtcagttatgcagtatgtgggatacggaggaaagatccgtgggtatgtggaggcttgtagagaagctggttctgtggctggtcccaggcgactcgtaatgtaaatccgtttctcagaatcgcgtggtgtaggcgggtgtctactttgtccgcaggcaggcctgaccccgggtggaggaggggcagggtggagaataacaattgtcttaagggagtctgcggagggagaaaaacctctggggtgtatcagctggaaaagaataggagtctcagtgtggcccctctcccccctctcagcccagcccctgcgggggcggtgagggagctgcggtcagcacacacagctggggcctccagcaaaatcccattctatatatctaagagcaacagctctgagagcggcccccagagggacaaaacctcattgtgaggcacccgccggcctcagcaccccctcccccaaccccagaactgtcgtggcattgacccttttcggcgggccaccatgggcctgctgactgggccacatctggggctcaggcattggctgcccctcccccacggctggccactgagaactgacagggaggctggggtgggagcggcttccaggcctctcaccccatccccacggggtggcctggcttgtgccccaccctccctggggatgctgcaaggcagaggtgagagtccgaagctggctacgttggcatcttgatctgccagcagtcccccacacctctggcctctgtttagtggcttgtcaaacagtggttgggtggggtaggtttttccagcttttacgtgctgccttgaagggtcccgagaggcttcaagttgagccactctgaagcgggatgattctctaggtctgggattccagaattatccgctcccaaggtttcagaggtccaggattctgtagatttttgtttgtttgtttgtttgtgtttggagacagggttttgctctgtcgcccaggctggagtgcagtggtgcaaacatggctcactgcagcctcactgcagcctcaacctcctgggctcaagcgattctccttcctcagcctccccagtagctgggatcacaggcatgtgccaccgtgcctagttaattttttaattttttgtagagacagggtcttgccatgttgcccaggctggtctcgaactcctggcctcaagcaatcctcctgcctcaacctcccaaagtgctgggattacaggtgtgagccactggagcctgactggattcggtagtttgaagatgccaccatacattcattcaacacatttattgagcacctactgtgtgccaggtcatgttcttggtgttgaagctatagcagtgaccgatacagaaaaatatcttgccctcgtagggcttccattctagagcaagaaggataataacagaaactaaataggaatcttttacatggtgagcaagaaaggcctaggtagggagaactgctttaggtaggctggttggggacatgacatttgagctgagaccaactgctacaaagaagtagccatgtggagacaagcattgtaaacagatggaatagcatgtgccaaggccctgtggcaggtgtaggccttgcatgtttgagcaatggcaaggaggtcttggtggctgttattcagtgagcaatggagagaggggaagagctgaggccagtggtagaggcggggcctgagaaaccagagcaagacattcagatattgttttgagtgcaaagggaaacttagttttgcaaaggaatgacatgatcggatgtatgtttcagaaagggtgatttgggagaactgaaggggatatcagtgagacgagaggctgtgcaagttgggcaggacagagatgtggaggcagtcagtcataagggtgaaggcaggggcacaaggacaaccgctttatcctggacttatatcgagttagaacctccaggtttcattataccagacagggccacggcaaaggagagttcggattcccggggcagccaggatttggctctgaactttaatgaccttgaaactcttaggcagggcggggagcggtggctcatgcctgtaatcccagcagtttgggaggccaacgtgggctgatcacctaaggtcaggagttcgagaccagcctggccaacatgaggaaaccccgtctctactaaaaatacaagttagcccagcgtggtggcgcctgtaatcccagttactggggaggctgaggcaggagaatcgcttgaaccgaggaggcagatgttgcagtgagctgagatcgcgccattgcactccagcctgggcgacagagccgaactccatctcaaaaaaaaaaggagcttttagacctgcattgtccaataccacagccacacgtaactgtttaattacaattaaacaaaatgaaaaaatcagttcctcagtctcaataggcacatttccagtgctcacttgtggccagtgactaccatactgaacaacacagggaacatttccatcatcacagccacaggacagggcttcctggcagtccttaatgcattgagcctcagtttccccatctgtaaaatgcaggtaacaacagcatctccttgataaggtgcctgtgaggagtacatgagataatgcctgtgtggcctggcacataacacacgttccctaaatgcaggttgttattgttgctgagcggggtgtgtgggtggctaacgagagggatgggggctgtctctgaggtttggattcggaatcgtgacatcttgtcccgtgcaagacgaaggcgaggacggcgagggcacacccttccagtcccgaccccacagaggccaagcggcccttcgcccccaccccgacccgggaaggccccgcgcccctcaagcctgggacggtctcgcgtcccccgacccgggacggccccgcgccccgcaagcctaggactgcccagcgctgagcgccgcctgcaggagtcgggagcgtggtgcccgcggccgggctgggcgcggcgcgggccggcagggggcgctgggcgcggcgggcggggcgcgtggggcgggcaggggccgggccagggacgcgcggggggcaagcgcggcggcggaccgggcgggaccgtagccggagcccagccgggactgtcgcgcgggccgcgccggcgatgccgcgcccccgggccgggctgtagcggggccgcggctggagtgtgcgccgggcaggcgggacatggaggtggtggacgagacggaggcgctgcagcgcttcttcgaaggtgagagaccgcgggctggcggcggcgaccctctggcgctgggaacccccggctgatctccccgggaactggggctcctcgctgtgtttccgcctcctctggctgggaccctccttcaggctggcaccagcccgccaagacaggctcccggggctgggagtcccccagcggttaccacccaccgccgctgaagttgggctccccctccccgctcct

SEQ ID NO: 96023 - DNA, 13494 bp, Homo sapiens
taatctgacaattatttgtcttggagttgctcttctcgaggagtatatttgtggtgttctctgtatttcctgaatttgaatgttggcctgccttgctaggttggggaagttctcctggataatatcctgcagagtgttttccaacttggttccattctccccatcattttaggtacaccaatcaaacgtagatttgatcttttcacatggtcccatgtttcttggaggctttgttcatttctttttcctattttttctctaaacttcttgcttcatttcattcatttgatcttcaatcactgataccctttctttcacttgatcaaatcaggtactgaagcttgtgcatccattacacagttctcgtgccatggttttcagctccatccagtcatttaaggtcttctctatgctgtttattctagttagccattcatctaatcttttttcaaggtttttagcttcctggcaatgggttcgaacatcctccttctcttggataagtttgctattgccgaccttcagaagcctatttctgtcaacttgtcaaagtcattcaccatccagctttgttccattgctggtgaggggctgcaatcctttagaggagaagaggcactctggtttttagaattttcagcttttcttctctggtttctccccatctttgtggttttatctactttggtctttgatgatggtgacctacagatggggttttggtgtggatgtcatttttgttgatgttgatgctatccctttctgtttgttagttttccttctaacagtcaggttcctcagctgcaggtctgttggagtttgctggaggtccattccagcattccagaccctgttttcctgggtatcaccagcggatgctgcagaacagcaaatattgctgcctgatccttcctctggaagcttcatctccgaggggcacccagctgtatgaggtatcagttggcccctactggcaggcatctcccagtaggctacatgagggtcagggacccacttgaggaggcagtctgtccattcttagagctcacactccatgctgggagaaccactgctctcttcagagctgtcagacagggacatttaagtctacggaagtttctgctgccttttgttcagctatgccctgtccccagaggtggagtctacagaggaaggcaggcctcattgcgctgcagtgggttccaccaagttcgagctttccggctgctttgtttaccttttcaagcctcagcaatggtggacacccctcccccagcccaggctgccacctcgcagttcgatcttggactgctgtgctagcagtgagcaaggctctttgggcatgggacctgctgagccaggcacgggatataatctcctggtgtgctatttgctaagactgttggaaaaacacagtattagggcaagagtgccccgattttccaggtaccatctgtcacggcttcccttggctaggaaggggaaatcccctgaccccttgtgcttcccaggtgaggtgatgccccgccctgcttcagctcatcctccatggtctgcgcccactgtccaaccagtcccagttagatgaaccaggtacctcagttggaaatgcagatatcacccatcttctgcatcgatcatgctgggagttgcagaccagagctcttcctgttcggccatcttggaatgatcctctatcctgatactttaataagataaagacatcacaggaaaagaaaactacagatcaatatctctcatgaagatagatgcacaaatcctctaaaatactagcaaaccagatctaactgcacatgaaaaatattattccccatgaccaagtgggatttatcacaggtatgtgaagtttgttcatcatttgaagatcaattaattcaatccatcacatctacaggctaaaaaagaaaatttgcatgatcatatcaatagttgcagaaaaagcatttgacttcaaagttcaaaacccattaatgacaaaacctctcagtaaactaggaatagaagggaacttattcaaattgataaaggatatttaccaaaaacctacagttaacatcataattaatagcaagaaactagaggctttcccactaagaccaggaacaagataaagatgtcccgttaccattccttttcaacattacactggaaatactagctaatgcaacaagaaaaagaaataaaaggtatacagattgcaaaggaagaaatgaaactgtctctgttcacagattacatgatcgtctatgcagaaaatccaaaagagttgatttaaaaaaaaccctagaactaataagtgattatagcaaggttgcaggatacaaggttattatacacaacttaactcctttcctatataccagctatgaacagtggaatttgaaacttaatacaatttacatgtgcacaccaaaaaattaaataggtaaaaatctagcagaatatgtacaagatctatatgagaaagctacaaaactctgagaaatgaaaccatgttcatgtataggaagactcaatattgtcaaaatatcaattctttgaacttgacctatagatataatgcaatccagtcaaaaccccagtaaattttatcgatgtccacaaactgattctaaagtttatataaagaggtaaaatactcagaatagccaacacaatattgaagaagaacaaagttggaggactgacactacccaacttcaagacttactataaagctacagtaatcaagacaatgtgatattggtaaaagaatagacaaatagatcaatagaacagaataaagcagcctccccccccaaaaaaatcaaagacaatacaatggagaaaagatagtattttcactcactattggatatgttatagtattttcactaactattggatatccaagcccacctggataacccagggaaatctctccatgtcaatagcctaatcacatctgcaaagacacttctttcttataaggtaacatttataggttcttgggaatagggtttgatgtctttcagtggctattactcagcctactaaaagtaaaaaatgtaactactgtgggctggggtggttaaggaatgtttcattgaagagtaaaatctggctttgaggaatgaactggattttgctgtattatattgacaatgggttggtgcattagtcagggttctctagagggacagaactaataggatttatgtatatatgaaagtgagtttattaaggagaattgactcacatgatcataggatgaagtctcacgataggccatctgcaagctgaggaacaaggaagccactagtagctcagtccaggtcccaaaacctcaaaagtagggaaactgacagtgcagccttcattctgtggtggaaagcgctcaaggccctggcaaaccactggtgtgagtccaagagtccaaaaaccaaagaagctaaagtcagatgttcaagggcaggaagcatccggcacaggagagaaaggtgaaggccagaagactcagcaagttgactcattccaccttcttcygcctgctttttctagccatgctagcagctgattggatggtacccacccacactgagggtgtgtctgcctctccctgtccattgactgaaatgttaatctcctctggcaacaccctcccagacacactcaggaacaatactttgcatcttttaattcaatcaagtagacccttaatattaaccatcacaattggtgttagcaattgtaggggagaaaaggtaatactttttcctcacccatcacaagggacgtggctggcatcccagttaataaaatacagattaacaaatcataacacatttattcaaccaagacttatgtgacacaggagcctttagaaatgaagatccaaagacccagggaacactgtctttttatgcttacattcgatgaagaagggagacatgtagaaatgtgattggacaaaaaggggatgtgatctgatgataataaactaaaggggaagctgggcgtggtggctcacccctgtaatcccagcactttgggaggctgaggcaggcgaatcacaaggtcaggaattcgagaccagcctggccaacatggtgaaaccccgtctctactaaaaatacaaataattagctgggcatagtggtgggtgcctgtaatctcagctactcgggaggctgaggcaggagaatagcttgaacctgggatggggaggttgcagtgagccaagatcactccactgcactctagcctgagcaacagagcgagactctgtctcaaaaaaaaaataataataaaataaaaggaactcagcaaggcctgcttgttcagattcttaatggcctctctgtgtagtattcctttcctctgggtatagggtaggacagttgacacatgagggtcttatgacataattcagggaaggtaggttggagaattcctttatggccagttctcacacagaaagatgggggaaagtcagagagcaacctttctgtgtctgctattttctcagtttccaggtgccatactttggggtagtgtgtcccaaactctgacataatctattggggaatacctttgttctgcttgatttgtatctggatagaggtcaagtgtgcagagggaaagaaagatttaaaaaaattggcttaaggccagaatgtggaaggccctgaattttgtgattaagagtttgagcctgatagacagtgggataccactgaaggactgaagcagtgaagtcatgtgtgccagtattgctttaggaaaatcaaactggcaataatttatagcagcaatgcccaatatttttggcaccagggactggttttgtaggagacaatttttccacagactggggaggatggtgtcagaggcattagattctcttaaggagcatgcaacttagatcccttgtatgcacagttcataatagggttcgtgctcctatgagaacctaatgccatggctgatctgacaggaggaaggtcttaggccacaatgctccctcacccactgctcaccccctgctgtgtggcctagttcctaacaggacatggagtggtactggtctgtggccctgggtcacagaccagttgtaaatcagggacccctgatttataggatacttctagagaaggaagtgagagtcagggaaccaatttagaaatcgattgatccttgagttgtaagataaggaaagttggaattagaatggtggctgtgggaatagaaagcaagggatggagtcagaaacagggccgacttcataggcttgtgaactcagaagcctcctgcacttcatttaattccccgctatcattgtgctgaaattcttaataagtttgtattttgtaagtgaagttcaatgagacaatggaccatatgcatgagcagacaatacaggcacaatcttgttttgtcattccttgccatcccttgcctccctgtgtgcgtagaacattcaagatgccccatgagcacagaatcccagtggacccataatgcattggagctcagtgtgatacaaattgagtacaaggcaagcgtgttacctccatgactgagtaagcagaggctctgataaacctgacgagccatgctttctgttcagtcttggtcagaacacagaaagaaggtaagggcattctaagaaacatgaactaacaaggaactctatcacatcctttctcacctttgttactttgctgtatcagtcaaccatgtaggctgaaaatgatgacaaattagaaaagagagagggtagggcaacccatagttttgttttcttctttactcttgagtatgcttctttaaaagccttctaaagtcctttttgactcatcagtgagccaaaggtagaaagtgttagaagaggtgcatataaaagcaggtaagttctgcctgctctgtcgcctgccaccgctgctcgaacccgagtggttcactgcacggtgaagacagattccggatgccaggaagtcatgcctccaatctcagacgctatgtccaccaaaggctccgtggttctggcctacagtggcagcctggacacctcctgcaccctcctgtggctgaaggaacaaggctatgacgtcattgcctacctggccaacattggccagaaggaagacttcgaggaagccaggaagaatgcactgaagtttggggctaaaaaggtgttcattgaggatgtcggcagggagtttgtggaggagttcatctggccggccatccagtccagtgcactgtatgaggaccgctaccttctgggcacctctcgccaggccctgcatcgcctgcaaacaaatggaaatcacccagtggaagggggccaagtatatgtcccacagcaccacgggaaatgggaacaatcaggtccggtttgagctcatttgctactcactagccccccagataaaggtcattgctccctggaggatgcccaaattctacaaccagctcaagggccdcaatgacctgatggaatatgcaaagcaacacaggattcccatcccggtcacacccaagaactcgtggagcatggacgagaacctcatgcatatcagctacgagtctggaatcctggagaaccctaagaaccaagcacctccaggtctctacacgaagaccaggacccggccaaagcccccaacacccctgacattctcgagatygagttcaaaaaaggagtcccygtgaaggtgaccaacgtcaaggatggcaccacccaccagacctcattggagctcttcatgtacctgaacgaagtcgtgggcaagcagggtgtgggctgtattgacatcatggagaaccgcttcattggaatgaagtcccgagggatctaccaggccccagcaagcaccatcctttacctcgctcatttagacaccaaggccttcaccatgggccaggaagtgcgcaaaatcaaacaaggcctgggcttgaaatttgttgagctggtggataccggtttctggtacagccctgagtgtgaatttgtctgccactgcatcgccaagtcccaggagcaagtggaagggaaagtgcaggtgtccgtcctcgagggccaggtgtacatccttggccaggagtccccactgtctctctacaaggaggagccggtgagcatgaacgtgcagggtgattatcagycaattgatgccaccgggttcatcaacatcaattccctcaggctgaaggaatatcatcgtctccagagcaaggtcactgccaaatagccccctgtacaatgaggagctggggcctccttaatttgctgatcccccaagtacaggagctaattgttgtgataatttgtaattgtgacttgttctcctcggctggcagcgtagtggggctgccaggccccagctttgttctctggtccccctgaagcctgcaaacgttgtcatcaaagggaagggtggggggcagctgtggtggggagctataaaatgacaattaaaagatttaaaaaaaaaaacctgtgagttccttttatacagtgttttcaccattctggtaagaacctgaaactcaagtgcatttgtgagctacaaaatataaactatgttattttggcaattttatataaaaggtagcttttatatttgcatttaaaaatggccttgtacattataaaaatgaatggtaaaatttcaagtttaaatttttctttacttagaaagatagtaaattgcaaataaaaaacaccgtggcaagttgaaaacaagctttttacatagaataaaggaaaaaactttatattttggtactttcaggagtactggtttttgaataaaggactgaattttcattttgctctggactccatgaatgatgtagtcagccctagtcagaagatgttttgctgggagaatcaacaggactttgtgattcaccgtaagaaacaatgtagcagtcaggtagtatgttttatgcttccaacaccacagcaatagcacatcttgcaacagcttaactgaagcctctgtttagagtaaatagcacaattttactatatgttctttttttaaaattgaggtaaatacacataatataaaatttaccctcttaacaatctttaagtgtacatttcagtaatgttaagtatattcacattgttgtgcacccaatctctaaaacattttcatcttgcaaaactgaaactctctacccattaaacaaaaactgcccattttaccacccttcccatcccctggcaaccaccattctactttctatttctatgagtttgactattctggatagctcatataagtggaattatatagcatgtgtctttttgtggcttatttcacttagcgtaatgttaccaagcttcatccatcttgtagcatggtcctttttaaaggctaaatgatattccaccatgtatatatactacattctgtttcttcattcatatgtcaatgctcccagcttaataaactcaataaactcacttgtaattacagtcaaaacttgcctcaattgcttctgactttctacaagaaatttaaggtgatttacagaaactccaataaaatgtagtaagtgaaggattcaggacaaatggaaaatgtgtataacaaaacagtaaagccaggatccagtgaaaatttggctgaaaaggtttctaaaaatcatgtatccacaaagtggctagattgacctagagctactaattctcaccgagggtgtcccaaaatattttttttttcagactgagtctctctctgttgcccagcctggagtacagtggtgcaatctcggctcactgcaaactccacctcctaagttcaagggatcctcctgcctcagcctcccaagtagctgggactgcagacgtgtgccaccacggccagctgatttttgtatttttaatagagacgaggtttcaccatgttggccaggctggtctcgaactcttgacctcaggtgatctgcctgcctcagcctcccaaagtgctgggattacaggtgtgagccactgcgcccggcctagtgtccctaattttttaatgtcattttccatcacatacagaaaatgatgataattgcatggcatataggagtaatgaggctgctctccacctacgggagctggccccagactgcacccctatactctgaggactgaaggaactggcatctcaggagtatgacctgatcctagcatgccagtggctgtcacttatggtgtgggaagctattgcagcttatccccttggaggggccttgctgtcacaccgttgtacatatttcaattgtccataaatggcccaaaatgtcatatttctatctccagcaacgaaactgtggagcagtggaaagcacccaggctttggagttcaaaagagtgtaggtgtttctgtttctgtcacttactagctatgtgacaaataccagactagatacatatcgaagcagctcaataggaactttagttcctatttcattcatcattgattcattcatacaacatatttattgagtacttattttgtgccaagcactaccaggtttgggagacatacctgctaagttgaagtctattagagaacttttctgatcaggatattcgtgttctaactcaggcggtgtaacggtacctatgtgactttgagtgaatcatttcaacctcctgggccatcgtattagtcagttttcactaagttacgttataaaacaagcaacccaggccgggcgcggtggctcacgcctgtaatcccagcactttgggaggcagaggcagacagattacgaggtcaggggatctagaccatcctggctaacatggtgaaaccccatctctactaaaaatacaaaaaattagccgggcgtagtggcgggcacctgtagtcccaggaggctgaggcaggagaatggcgtgaacctgggaagcagagcttgcagtgagccaagatcgcaccattgcactccagcctgggtggcagagtgagactccgtctcggaaaaaaataaataaataaaaattaaaaataaataaataaaacaagcaaccctaatgtctcaagaagttagaaaagcatgtatttcttgctcatattacataaaggatgaggactggctgtagttttgctttataccaaaatccacacagaaggtgagcacacaggatatgctcttctcctggtggagggctgaaataagaggacccagccaagccacacaattgcacctaaagtttctgctctgaagcaaatgccatatccacccatgttccgttgtccaagcttataggcaatggggtagagaagcatggtgagggtgagaagaaacgaataataatgaagaaagaacacaatctaccactgtctttgttttcctatttataaagtgaggatgttgggctagatttctctattgcctttcaactccctatttggtaattctgtgatttaatagagaagagagaagtatcattgttaattattgttacccattgaaggagctgagtcacactcccatactccacattaaacacaaaacattttggacaaggactttatattatctgataagcccaattactctttttgttttggtttggttttgagatagagtcttgctcttttccctgaagctggagtgcaatggcatgatcttggctctctgcaacctctgcatcccaggttcaagcaattctcgggcctcagcctcctgagtaactgggattacaggcgcccgccaccatgcccagctaatttttgtatttttagtagagacggggtttcaccatgttggccaggatggtcttgaactccagacctcaggtgatctgcctgcctcagcctcccaaagtgctgggattgcaggcatgagccaccgcacctagccaagcccaattactcttttgcagggatacacaagtataaaagtaattttaataaacattactctgaaactgtttctccacttcgattccttaggtctttatgaactttactctacccaaacatagctttcaaagattgcaggtgtgtcctaagaactgcaagggccctgagtttatctaaataaaatattagaatcacaatgcaattttaattttcagtttaaaagaaccaactccagagtgaattgttaataaggtataacaatgttttttaacaattaaccttcccaaatcaattgcttacaaatacagtgtttttttgttgtttgtttgtttgtttgtttttcttgagagggagtcttactctactctgtcacccaggctggagtgcagtggtgcgatctcggctcactgcaacctccaccctccgtgttcaagtgattctcctgcctcagcctccttagtagcagggattatggatgcctgccgctgtgcccggctaatttttgtatttttagtagagatggggtttcaccatgttggccaggctggtcttgaactcctgaccttgtgatccaccctccttggcctcccaaagtgctgggattacaggtgtgagccaccgcccccagcctacaaatatagctgtttttttgtttttgtttttgttttttttgagacagagtctcgctctatcacccaggctggagtgcagtggcgcgatctcggcttactgcaacctccatctcccgggttcacaccattctcctgcctcagcctccctagtagctgggactacaggcgcccaccaccgtgcccagctaattgtttgtatttctagtagagaaggggtttcaccgtgttagccaggatggtctcaatctcctgacctcatgatccaccctcctcagcctcccaaagtgctgggattacaggtgtgagccaccacgccaggcacaaatatagtttttaatttactgtcaatctgagaaaaaggctgggacaagataatcctcctcaaataaaatagccactggcctcatcaaattctgtgttgtgggccttgcatcagtcttcaaatgtaacttctttttcttttttctttttttttttaagatggagttttgctcttgttgcccaggctggagtgcaacggcactatcttggctcaccacaacctccacctcccggattcaagtgattctcctgcctcagcctcctgagtagctgggattacaggcgtgtgccaccacgcctggctaattttgtatttttggtagagacgggatttctccatgttggtcaggctggtcttgaactcctgacctcaggtgatccacccaccttggcctcccaaagtgctgggattacaggcgtgagccaccgcgcctggcccaaatgtaacttctaaacatccaagcttctataggttcattaatgaccagtcttatgaaccttgtactgaactagaagcaaaaaaaggatttccattatactgttacaaatggctgtaaatatggaggacccattatgtggcaagtattatgctgtggctctacatatgtggtctttgctctcaccatattcctacagagtgagtattactccagttttccagatgaggaaaccaaagtgtctagaggttcaataatttgcttacataccaaataatggagcatattttaaacgaaggctgtaatgtatatgttctccttcttgttaaagaaggtccccatcctgctgaagaagaaaacctgaaacttcttttactacctttatctgccaggaagatggaaggctaaagagcactttctcttgcttagattttgatcatcactgatttcctccctggagtagaagagtcgttatactctgaaatttgtatatgcacgatgtggatatagggagtataaaatatatctactgtgtaaaggacatgggtgccttgtttttttgtgcttaggatgacatttgattaaacaggtgaaatgcaaccattttcttatatgaaacagcatccccctttaagaaaacagccttctctgaagcttctcttacagctctccttggattagttttattctgacttgacaggagctactagctacacactcagtgggtagggatgagagccccagaccccagtcctgagtactagagtatgctgaggattatacagtctccttgaggtgggagtgaactgagaactctacagaagaaaatagcttttccttctggctaatagatgaaaagagtcaccccatcacatcaaaggtacccatgttcatctgcctacagtgaggctgtggccatccatctgcaatgtcaccaacttggcagcccagccagccacatctggaaaagttaagtgagctgcagaattaacacatgttggggaatgtcctcagcacagtgtattgacaacaggctaacacaatttctccctctatttgcatcaaacctaataagttacttaaaagttaaagattcaagagttagacaagttattgaagagactctgtatgtactatagccaacagcgattctttgaaaagtaagacatggcaggcccagaaggattaatgaaatccacagaaagggtgaccagttcatgg

SEQ ID NO: 96024 - DNA, 16122 bp, Homo sapiens
attttgctgtaaccagaataaataggagaagatgttctccgaaatctgttctcagtcttcagatagacttataaaccagcctggtaaaacctagaaaatagttgcccaaccacatctgtagggcatctgtggccttccacccatagtgcttgctgtctgttctttgaagagactctgattctttgatcctgcttggagtgatggcgggggtaggccctcttctgggaagccataataatatggtatcccctgctgagagagcccaccctgagcttttctttgaaaagctttctgagaccaggaacacggcaagcatggagtcattgggaatcatgtatccaattgactctcacgcattgcgacatcgagttatcccttaaaatagacctggaaatagctctgaaaattatccagagctgatgtgacttgggaaaagtataattaccctgaacttgcttgatcttgaaagtggcattttgttggcagggctcgatctcaaggaagagaggcagttgtggctggaggcggtcagttaggttggtgaatgttcactggagagggctgcccagttgcttcccagatggtgagaaagacctattctatgggatgccataaaaagccatacaagtgaggacatctcagtctacgtggatgttgatggtttggggaagggaagaggggcaaagatataggtcatgatgtatccgtttattttactgaatcattaattattcctgaaaatctaaaattagtcttgaaattttctctgccagatgaggcaggatgacagaaaaaataacaaaaaccaggttctttctgtgcactgcctacatcatgtctttgattgaggtctcaagacatcactcttctcaagttgctcaccaatgagttcaataaatttaaaagcaactacacctggctggtaatgtcaaagaatgccttcttacccatttattgcctctcctcaagaccaaatttcaagctccatagtgcagaaaaaaatctagattgactatctcactgtgattgtttcatttttctgtatgcctctcaggtcgacatttgtttagccctctatgtttaatggtgctgtgctaagtatggtggcaatgagaaagatgcatcagacaatgttaaggttgatgtccctctagtgctccggctgtacattgtcttgaagggatgcctcaccaacttcaaattctatgccaccccagtcatatgacttggcagccccattccagccctcaccataatagaaaattgcttaattccaaaatctcaaactctaaaatttccctttactaaaactgcctgttctactctgcaactcccagccaatctattcttggttttcatgatttcatgcttctcaggctctcccaaattcctaagctcattatcccagccctcagtgattcccactaccatccctcaccatgttgtttttttcccatgatatccataagcttagtcaggctgctggtgggcttagctattcaaatgagccctcttttcccacaaggacattcactgcttcctcgaattttttctgagcctctttttgatttcctatcctcttccccacagccacctcaagacaacctttcttgacacccttaacaggatatgatttctcccttttctgaactctcataccttgtacttgttatgccctcatggttctcagcactttctgattcagataatagtcgtgtctatttgtgtagtttctcttcgaggtcttttagggttaaagttcttattcatctttatatttcagagcttagcacagtgcctgacatcaaaaagatgcccactgactgttttctgaattgaataggatgacttttccaaaaaggaacttttaaaaaataatagcttcatcaggatatcagctgcaaagtttggagggagtagctttacagagaagcataataaaatgcacactgagaattattagttttctattgctgcataatggattaacacaaatttatcagcttaaaacaacagacttgtattatgtcatagttctgtaggtcataagctcaacacagctttgataggctctctgcctatagtctccctcctgaacagggtaagtgaggacattgaggctgtttgtctctacccaccttttcaagcagaatgtcacctctttctgcaacttgtcaagtagaaagagaggacattttaacgttccttttgcagatgagaagtcataggttgaagttacttggaaataacttcctgcttatttcaaggaggaatttttcttaaagtcaaaattttttttatatttatccaaagataaaaggggctgacttgagaggttgcaaaccctttggataaagagaattctggaaacagagcagaggtggatttattcagcctctttcagacattcatgccaagatatttgtagagataggccgggcgcggtggctcacgcctgtaatcccagcactttgggaggccgaggcgggtggatcatgaggtcaggagatcgagaccatcctggctaacaaggtgaaaccccatctctactaaaaatacaaaaaattagccgggcgcggtggcgggcgcctgtagtcccagctactcgggaggctgaggcaggagaatggcgtgaacccgggaagcggagagcttgcagtgagccgagattgcgccactgcagtccgcagtctggcctgggcgacagagcaagactccgtctcaaaaaaaaaaaaaaaaaaaaaaagatatttgtagagataatcccagctggagtgtcaactatttaagacaaagaatatcttgttagggccattgtggaaaggtgttaacattctgtccccttgagtgaccctggtgctcaggcatgcctggcccctcctctgctgatcattagctaggtcatcttcagcaaatgcaagctaacttgtactccctcgcccatcagatgtggtctcatagccaggctgtcatgaagaccgagtgttcatggatataaactttaaaagagttatgcccatgaaaggcagttttatcattacctctagccacaccaccacctttgtgttaacttttctgttactggagcatcttgggatggacctcccgctactggttattgaaaaactgacaagttttacattgtggtatctcattttaggagacacccagacacataatactttgttcaattttacaggccacctcatattcactggttaatttggtcttcttgggtgggtgctgtggctcacgcctgaaatcccagcactttgggaaactgaggtaggtggatcacctgagatctggagttcaagrccaacctggttaacatggcaaaaccctgtttccactaaacaatacaaaaattagccaggcaaggtggcatgcatctgtggtctcacctatttgggagtctgaggcctgagaattgcttgaacctgggaggcaaatgttgcagtgagccgagaccgcaccactgcactccagcctgaaggacagagcaagactccatctcaaaaataaataaataaataaataaatacatacatacatacatacatacatacatacattgtcttcttcacagccatgtagtacattcctaacaatccatagaactcaaatccttacaagtcaagccatactttgaatgcataaagagaaatggctatttcaaagaaatgtggtgaatttattcattctacttctaaggtgttgcctttctttccttcatcatttgactcagttctgtcccaagaacatggagttacccaatacatgtcttgttgatgaatgatatatttggaccatgccatagtaacaggtggggaatggctggaatcctggcagtcttggttcatcatggctctaccggagcttgaggtctgagactgtgcagggttacgcagggaccacacaatagtgtactaggtttcttagtttaagggtgcccactttcattgctatcagaaaaagagggtggttttgttgttgttgttgtttatggtgacttactcaggaacagagaatgaagtagtattttactagattttaaaatttttctaaggatgtttaatttccacggctcgcttcctttttcccttccatttaaaaatctctaaggaacatctaccgcagaaatggtgccttcccaagaatgtcacctttggtcctgtgtactttcaagtttctttctttctttctttttaagcttctgtactgaggcatacttcatatattataaaagacacccacttaaaatgtgcaattcaatggtttctagtctattcacagttttaaaatcatcaccaaaatctaattttagaaacttctattgaaagaaatcacatactctctccccaaccgtatcccaaggcaaccactaatcctctttctgtcttgaaatatctgtctattctaaaggcttcattgaaatggaatcttacaacctatggtcctttgtgaatggcttttccacttagcatgatgttttcaaggttcattcatgttgtatgtagtatgtgccagtactctattccttttttatggccaaataatataccatttaacagatatgccatcctctttcttttgattaatcagctttcaatgctctgagccaccagatctcttacctattctcagtatttccctctctggggaggccatatctctttctaggggagattcaatctgtgttttgccataactagccccaactgccttattgcttttcataattctagtatctgaagggtttgcacgtctgtttatatggcctgtttttttccctgctgattctcagttacaggggcttgactctatatgtttgctttttctcttagctataacatttttcttgtttgtttattttcttgaacataatctacgggaattcttgcttatttacaatgaagatatagccctctgggttttctctgcaggttgtcttcaagattacctggagtgttccctgaacttgatcttctgacccttcaccacacacatagtctacacagcaggatctccaggtcaccagcttcagcaagactcccaaaaatgaaagccttttttggcccttgtttacttccctggtttcctggtttcacatcattggtggctcagcttattcctcattttcactaagtggaaatacatatttaagatgattttgtttcaaatccagcatgtcagttgtttcagacaggagagtcatttagatatatataattcaccattctgcatgatgcagaaatccttagtaaaccttattttcttgttcttttaaccacatattttatttcccctttttttttttttgaaacagagtctcgctctgtcacccaggctggtgtgcagtggcacaatctcggctcactgcagcctccgcctcctgggttcaagtgattctcctgcctcagcctcccgagtagctgggaccacaggtgcatgccaccactcctcgctaattttctttttttgtatttttagtagagacggggtatcaccatgttagccaggatggtcttgatctcctgaccttgtgatccgcccgcctcagcctcccaaagtgttgggattacaggctcccatcttctttctttgacatgtcagtagcatctatttcatgatttaagacaattgcttttcttgatgtctttatgggtccgatattgccatgccttcttggttttcattcataagatcttgtttccttgtatacttggacatttgtataacccaactttccttagaaggttatttgggagaattgtttgagtctgggtttaagattcttttttaagaatttggagakaatttgcatttgctttgactagcatttgagggaacttacaacctgggactttaaaataagttatcagctaaagattccttgaactgcacaggtagcgtgaattaagaccacaaacctccattaggtcttgcagttacaaattcgaagatccttactctccccgtaggatctttactttagaatgacaagggacatcrcccccaggatcggatatcctaaacccgtcctgctgcattcttccttcttctctgacctgcagggcatccagaacaaaatgagtgccagtgaccccagctcttttatcttcctcaccaacatggccatgcagatcaagaccaaggtgagcagtgcccagggcacaggacagccagtgggagtagaaacatgccccggggggacacacacaaacacacaccattgcacagtcctttgggccccagccaccatagcgatgctgaattccaggagtccaggattcccaactatgctccctgcagaactcaaggcagccttgtccctattcccaggtatcacatgaatttgttttgtgtcctttcatttagctaacattttgaatttctttctttctttctttcttttttttttttgagatggagtctcactctgtcatctaggctggagtgcagtggcatgatcttggcttactgcaacctctgccttctgggtttaagtgaatctcctgcctcagcctcctgagtagctgggattacaggcatgcccccccaggccctgcacccagttaatttttgtattttttagtagagacggggtttctccatgttgaccaggttgatctcgaactcctgacctcaggtgatccgcccgcctcagcctctcaaaatgcttgtattacaggcatgagccaccacgcccagacaatttttttttccttttctgcttttcttaccaacgctgtactagaagcaaagtcacgacgatgttcttaaagttataattaatgtggatattattaaacaatgaaaatgagttttgtatatttctgatcatcagctgtgttccaggggctggaccgggtgccttatttatgttatctcatttttaattctcactgggaggtagcagggctaatccttttaaagatgagagaaggccttctctttttttttttcttttctttttcttttcctttttatttttttcttaaggaaagggaagataaacatccatttgctatttttttttcagccccgcaggcccacccaccagccagcctacatggtgccagcccctcctgcagggccttgcctgagcctctcccatgactgctgctttcyctgcctagcttctgggcagtgccctgccaagatagagacctgtgcctttgccccaacattcgtctgctccttctacacgatcccaagttatccagttaagaatctgctctggaattctccttgggaggctgaggcaggagagtcacctgagccccagaggtcaaggctgcagtgagcggtgatcgtaccactgtactccagcttgggtgacagagaagagaccctgcctcaaaaaaaaaaaaaaaaagaaaatttgtatgatctttgtatattagagctttctcaaatgctcattgaaagaatgttgaaggaattgtgccaatctttgctgacttttatttttcccacctcttagccctaattacgccatgattatcttcaatgattcctaaaagtcatttcgttagttttagaatttttcagctcctaaactttgcctgtttttaagcggagacctgcctgcaggccctttctacctgttcacttttggtgggttttgctttcccttattgccttattctcgtgccttcttgttctgctttccatggtggagaaggcagaagccagttgggttgggtgctgcttttctgtcccctgttaacaccccactacctgtcccaaagagccagctgccctccctgccatctcctttcctctgaggatggcttactcatcctttttcttttatttatttatttttttagaaacaggatcttgccctgtaacccaggctggagtgcagtggtacagtcatagtacactgtaacctcgaactcctgggctcaagtgatccttccacctcactctcctaggactttgggtgcatgtcaccacaccagctaattccttaattgtttttgtagagacaggggctcactatgtctcactaagttgcccaggctggtcttgacctcctggcctcaatcaatcctcccacctctgcctcccaaagtgccgaggcaggaggatctcccaaactcctctcccaagtttcagttcaattagtgctttggctttcccaactctagtctcctgtatytctgacgatgggggagcacaaagctaatctgccccccgcctctcctgcagtgagccccatggtagctcaggctttgcaggaaggaacaatggtggggctgccggctgtgcaccttggcctttctatggtccagaatgtgacagcactcacacctttgacttccacacttgggcccctagccagtttccaggcacaggatgagcaggactcatgagtggttctgtgttctcttctggtgcagatcagtaagcatgcattttctggagagagagacaccatcgaggagcacaggcactttgggggcaactgtgttgtggacgtgtctttcatgtacttgaccttcctcaaggatgaagacaagctcgagcagatgaggaaggtgagcagggagccccaaggacccagtyatcccrtttccaaccacccactcctgcatatgggtcctggaagctccaacagctgggcattaagggtttgtaggagccttgggaactggtgcctgggccttaggaacaggtgctcaactgaaacaagatgaaaactgagtagaggcattcacgttttttaaacatgtgctcagaaacctcgtgaacaaatcgcaaaagggcagatataaattactatttatttagtagccacacaaaacagtctcatcttactagtcaycagagaaacataagttaacatgatcaaagctgagacaattcactatagaattaccagagtttttgtgttgcccttgactgtgttttcaatgattgtaaaccagatgcttcaaggcacacccatgtgagtgttcatccacacagcctcagtgagcagtttggtaccaggtacaaagagcccaaaaatgttcagagctttgcctcagttttccaaatcttggaattttttccaaggaaataatcctgaatatgtaaaagctttccacaccaagacattaaaatgataatagcaaaaagttcaaaagaaactgtataacagaggaaatgttaaattagaattgttacaggataggttattatggggacatgaactattttaaaagagttttcatatgcagggtatggtggcacacatctgtagtcccagctacttggaaggctgagacgggaggatcccttgagctcaggagttcaaatccagcctgggcaacataatgagacactcatttctttaacaaaacaaaaaacaaacaaaaaaaagactttagtgacacaggagaatatgcctaggataatgaaaaaagaacaccaaatgaaaaatgcagtgagaggttaattgtttaaatgaaatgcacagggaacgaaatgtaaagaaaatgtgccaaatgttagcagtgggccccacctctgggcactggaattgtaggtgatttttttcttcagtttgctgctgttttgtggtttgggtaccttattaaatttgtttaatgagcatgtactacaatcagaaaaagaaaaacatcagcaagattttacagaggccataaggctgccaggaattattgttgtttatgcttgggggagcagtccctagcgtcggtggaggtggggactgccctcctcattggccctttcactatgagagaccaagttatggctactgccacagccaggtttctagttgttttaagaaaagtgtagctgaaggtacagctgtttgtcatggtaacaacagatttcacttctaagtgccacttgcacgcctggctctgcaagggtggtgtgggctgacctggtgtctgaggcaggaagaagccacttagggcatgtggagccatctctcaccatggctgtctttttgagggcaggatgacaccagcagagacatgctcactggtgacctcaagaagatgctcatagaggttctccagccygtgattacagagcaccaagcccagtgcaaggaggtcatggacgagttagtgaaagagttcactaacgaatgagttcagtcgtgctcattttatatatgcttataaagagacgtgatttatcaataatcccagcccaatcaaagtaccgctacctgtagtcttccgtcacatgatcattactgggcttggtttctctaagcctgtgtatgttatcaatactgtttattcctctgagtttcattatttctgtctcttgagggcaaaacattgtgggtgattggtgctgacattgcatggtcagatagagaagtccagctgtgaatctctcccccaaagcagccccaaggcatggagcctttggctggaagtccatgggccaacctgttctgtccatagaagactcctagggctcccagtatactcttaaaacccactctattttaaaatatatattctatgtatgcatatatggaagtgaaatatcattattgtaacctaaaaagtgctttgaaatgttgatgtggggaagtttattgagcgcaagatgtatttcagcccatgactcaccacgaaaaaaattgataggtaaaagctttgctacacatttgactaagaaatcagccagctttaaagctgcttttaatcataaagagtgaacagagttgggcagtttttattaaattgagtcttgggggtgaaactttccggtttacttaactccagaccatgcatgtattctactccggaaatcatgctcatttcccttgactagtgttttcccgccaatggatcctagaccctccatcctgcagagtcagcggtgtcttttcccctgactgtgtcagatgctgagcagtcattacctctgcaaatgtttcattttgacaattgaccgcaatggaagtcagtacagagcaatgcactggctgtgtccgggatgggtggacgtagctaggaagaaagtcacacaagcagccctagaggccctcactggtgtctggacaggctgcatttaatcacatgccatgttcaggcttggaagagaaattccaaatttcaggggagcccctggtcgatatatctgggtctctcctcttgagcgctctgccttcctgccgccccttggagtaaataaacttctttggctcccgcacgaggtgctgtgctctgtctgggaggtctgaggagggaacaaagtcccctcccttcccctcttcatggatggccttgagtctgctggggtcaaaatctggggaaaacgcacaatcccgggaaccccaccgtgccgagtcgtaggctcccaggaatgggcttgtgctgggacagccgttagcagtgtcttggtgcgggctccctctcacacctcatttcacattcccaacagctggtggagaacacaagtagaggttgtccttgtttctcagaggaggggccagccatggggtgcttggtggggctgtgtagtgatggggagcacaggctgggagccaggccaggccccattcacatgaggcccagggcagagtccaagctgcaagggagacttgggctcactataccggactatcctcattttgcaggtggggaaactgaggcttaggagaggggaacatggcttgtccaaggccacagggtgactctgacacagtgagcctgtcctggctcttggtgcttctgtctccacacagatacacaggagcaccattttacaaataagggaattaaggttccagtcctgggaggctggacgcctgggttcaagtcccacttgggtactggtgtgcagcatgacctcacgtaggcctcctttcccagccttgattcctgctgggctgagcccttctccctgccttcccaggcccagcctctgctcacctggctggctgtggccagtgggagtgaaccacttacagaagatagcatctcaccagccatgttgccctgggcaactaatacaacttattgtagctccattgtacctgtggggcaggtgcaatgagggacaacaagtgaagtcaatgacagctgctgctgtcatggtccacccagccagagtgtctattggcagggcctgggcagggctgtgggcccagaagggagtgagccaacacagaccagcttcttccctcatcagctgtgtgactttggacaggtcacttaacttcctgggacctccatcttctcccctgtaaaaagcagtgatgcctcctatttagggtattaggaggggtgccctgggtccaatagtcaggtgacttgcccaaggccaccgctggtcagggcagaggagggctgcacacctcccatacctcccccattttgctaaagtccaggggtttccgagagaatttttccctgagagacaagggcacatctggattaggacggacaggagcagtggccccgcaggtatttggagatgaggtgtgaggccggctgccagcaccaccatggtgccgtaggctctgccggaagagcactcctactccagctggtaatgtcctcttgtcagacagatgtggtactgaccaagcttggccttgctgccctgtggtccccagcctggaagggagaccagccaactttgtctgaaagggtacggtgtatgaagagcaatgggtaggggagcggggatccaaggtagagggtggctgagcacacagggacagctgcagaacagcttgccgctccaggatagtgctcggggagaaacaggtctgcctctggcccccagcccccgcctgcagcaccagcagatgtgatgtgttctccccagggccacgctggctgggccttgccscaggcccagtaatctctgatcattacggtagaggttgtagagacaatgagtacaggggccgctcctgtacaacctgcaccccctccccagtgacagcgctccggacacacatggagccagctgctcagtgacacaggctcagggaagccaaaggcccccacctcccagggtgcagctgctgctggagctgggccaggagtgctaccaggaaccctccttccaagcccgagcaggtgtggtcttcttgacaaagtggtcctggggtcagcatttgatgaacagtggaaactctctcttagctgcctccctttcccagcatttggccagagcatctcagcctctgcatctcctaagctggacacactcccaggaatccactgcaggacttcattcattcattcactcattcattcattccacaccctctgagcacatactgtgcaccagccctggagccagatgaagtccttacactgctcacaggctcttgtgggaggagggcaggtagacaagtgaccacacacccagacagggcctcaagagagcagagcaggagacacctgggagaagcctggtggtcaggcagggagagcttcctggaggaggtgacgcctgggatgtagaaccagccaggccgagcaggaagagggtgttcctggcacagggcacaggacataaggtctggtgcccacagcaccacacatacagagaccagtgtgacaggggcaggctcaggagggggtccacctcttgttccggaatcagttttgttcagcagaacatgggacagcatacagcccacagatacctcaagatcagtgtccgtgagggaatgtagtgaaggcaggtggctcccagccctgccagggggctgctgtggtggagacctggtggcttcacactggacctgccagccctggcccatgatggcccccatcactggatgccatgtggcaccaggaaagggagggctggagcttcagacgcactggcatgagtctgctcgcccctccctgctgtctcttagtgttgagggaaacaaagatcacaccctgggaggcaggaggccgggttcaagttcctactcaggtactgccatgtggcatgacctcacctgggcctcctcatcccactggggtccccacccttccaagtcccagcccctgctcacctggctggctatggccagtggggccgagccacccacagagggcagcataggagaagaagtaggtggcaaaggagtggctgtcccagaaaagcagggctgagctgctcttgtagaggctgtgcagcccctcctcatgggccaccatggccaggcagtgcagcagcccatggtacttggacactgaacatacaggagacacaggacacacgaggggcacagacaaaggccccgaggccaagggccgcaactgctgcatctgtgtctgcaggcagaccttagccacctcagtgggcgaggccaggaacacctgcagaggaggagaaggcagggataagatggcacctacagctctgcccacagcctgcgcctggcctcccacaggcctcgtgttacccatggtgaccttggggagcctgagccctgagatgctgcaggtttgccatttgcttcctttccctctccctacccatgtgtcttgaatgccatgccacctggcatggagggatccgttgcccttcgtggatatccacggcaccccatgctggtcaggcagccrcgggtggccagaggctctgagtcaggctacccaggtctccactaatccacttctaactacatgacccggatggatcccttcatctgtgtgggcctcagtttcctcatctgtaaaatggaaattctatgacctaacacgacacggccattgggaggacagcggagtcagcagatacaaagctctgcagccctgcctggcaggcagtagactctgtgaatacaaccagcaggactcagctctgctgccaatgtgctgggggcttgtgttcagcttattgcagagtgccctagtgaacaccatttggggtctttaatgtttaactggggcatatttctagagggaaatttccgggtgaaacatacctgagctattttgtattgtaatagattttgccattttggtgggatttggaggggccaaagagggacagtgagacttccaaagaatggatcctgactcaggagcccagagtggactttggggtactggcccagttccagagaaaatcagcagccctggcatttccagaaaatggggcttcttggcaagtctgagcaaagtcagaagtccccacattctcatctggctcactcagtgcccaggaggaagccgctggcccacctgagcctgtttcttcatctttaaaatggggcatgggtcaggcatgctagctcatgcctataatgccagcactttgggaggctgaggcaggagaatcacttgagcccaggagtttgagaccagccagggcaacatagcaaaacccttgtctctatgaaaaatacaaaaactagccaggcatggtagcacatgcctgtagtgccagctattcaggaagctgaggtggaaggaacgcttcagcctaggaggtcgaggatgcagtgtgccatgatcacgccactgtactccagtctgagagacagacaatattttgtctccaaaaataaataaataaataaaatgagacaagacagccctgtacccaggacacgggaacctctatgctttaagcttcgcctgcttgcatgtgtgcaatgtccggctggttgatgctgaccacacagccccaggcagtgggtgggtacagtctcagccactttgagaggcggtagatgtgtctctggggtgagattggtgtgtggagcgggatgagcccccagtcagtcctcccagacatcctggcctccctctgaaatcccaagaggttagggctctgggtctggagtctctgagcctgtgtagcccctgggatagacctccaagctacaaagcctatcacagggcattctgtgctgcctctcctccctgaaaacagggcacaaaggcagggctgctccccagctccagctcccgctctacttttcccaccgagctcatggcatgcatcaaaccccacctcccagcccactggcagtatttgtgggcaacaaccgataagtacaccacgactcaggcagaaacagctgatgagagttcggggaaagacctggaatttgaggcccagctctgccacagatggcaccgtggcaaatagactcaagcc

SEQ ID NO: 96025 - DNA, 35273 bp, Homo sapiens
attcacatagacttgaaaagccattaggtttattatttccttaatttctgagatctccttaactttaattttatttggttccttgtagctataacacataaaaaatacacgtatgtacagataaacagacacaaacaccctcatacaaagattctacagcttttactttagaactccagacatgagatattgatacaaactcactggtttacaaataataataataagaagaaaaaaaaaacaaaataatggttctagccaaaaagtgattttttttttcctcagtagaaaactagcagtagacataaagcaggtagaaaaaagaaaaatagagaacataaaaactttatagttacatgtaagcctttgggtctaaattttcacttagtgtaattgggccatcagtttaaaatgtgcaaaacagaacataatatgtaactatctagagccctagaaagtctgatattccattatgacatagttataaaaaactacctgagactgggtaatttatgaagaaaagaggtttaattgactcacattccacagggtgtataggtagcatgactgaagaggcctaaaaaaacttataatcatgcaagaaggtaaagtggaagccaacatatcctacattcctggagcagcatgaagatggggtttggtaatacacccttttaaacaaccagatctcatgagagctgtatcacaagacaacactaggaagatggtgcaaaaacattagaaatcactcccatgattcaatcacctcctaccagcctccacctctagcactgaagataacaatttgtaatagttaattctcacacggctaataaagacatacccaaaactgggtaaattatacagaaaaaaggttcagtggattcacagttcagcatggctggcgtggcctcagggaacttaccatcatggcagaaggggaagcaaacatgtcctttgagcaaaagggggaaaagccccttataaaaccatcagatctcatgagaactcactcactatcatgagaacagcagcatgggaataaccaccctcatgattaaattacctcccactgggtccctcccaaaacacatggggattatgggaactacaattcaagatgacatttggatggtgacacagctgaaacatatcacaatttaacatgagatttgggtgggaacatagagccaaactgtatcattctagccctgaaccctcccaaatctcatgtccttctcacattttaaaacaaaatcatgccttctccacagactcccaaagtcttaacacattccagcattacccaaaatgtccaaatagtaagtctcatctgagacaaggcaagtcccttccacttatgagcttggagaataaaaaacaagagagttacttccaagatccagtggggatacagcaactgagtgaatgttcccattttaaaaggaaaatgttgaccagaatcaaggggctccaggccccaggcaactcctaaacccagcagggccctcattaaatcttaaagctccaaaataatttcctttgactctatgtctcacatctatggcacaccagtgcaacgggagggctctcaaggctttgggcagctctggccctgtggatctgcctgtcttttcctcatcttcctgtctttttctgagccttccaaactgtttcaacctctgcccattaccaagctccaaagttgcttccacatcttcaggtatctttataacaatgccccacctctctagttttctgtattagtttgctgtcacattgttctcacatcttctgtattactttgttctcacatttgttctcatattgctataaagaactactcaagattgggtaatttatgaaaaaaaggggtttaaattactcacagttccccaggctgtataggtactatggctgaggagacctcaggaaacttataattatgagaaggtgaaggggaagccaacatgtcctgcctgactggagcaggaggaagttggggggagcgctacacacttttaaacaaccagatcttctgaaaacactatgataagacagcactaagggggtggtcctaaatcattagatggggaaggcccccaaacttctccgttttacacacatgcttgcaaatgggagccgcatgaaaccaaaaaattgccccaaaagagttttgtccttgtctttcctcattcttatatattttcccactttttttcttaaaaggaggaaccaaactgtgtcctagggttttttgtgtggtgcatcaatgcgtgctgattgtaagtgagactccacatgttttaacattgagttgtttctgccttcttacatgtcttagtgaatctttgaaatgcttgttcttcagtgccgtaaagaaaagaaatagcactcgaacataaatttaatttcttcagcaagaccatttttttttcttttttttttcctttctgcaaaaagggtgcactcaccagcagtttagtcatgaaagtacaccaaacagaggatacagggtcatttataacttgatgcatccaccttactgctgtgtcctgtttctactggaaggaataggacctcatattctgtgtttgtcctgattggctagcaacttagaactttttaaaagaggcaaaggcagaggagaacaaaggaaggtggaagtaacttgtggaatgctgagaaaggtaaaaacaccttcaaataagcaataggacaagtctatgacctaacgctttcttggaccagtgcaagcatgccagggcaaatatttaggctaaattgtgggagctaagaacataaagtacattgatttctttattacggctagtgaatatttaagaatgttagcacaggtctttgaataaattttgcttctaagacaagttactatttattctcaattagatgaggaggaaagtctttgaagaggcacctctactttactttttacagtaaagcagactagggtcactggagcagttttgttgtttgaggtattaccaggagttctggaaagggttgtcctttcacagttgaatgcaaagactcttataaaaaaaaaaggaagaaagaaagctaatggggcagagtgtttcatttgtgtaagacatgaaaaactggttaggattggatgtcttctttgcatatatacaaattatcgttagctccacttcttccctctagtgtgcactcaggtccttagcctgacttagtgcatgttgttttattttgcttatttggtatgtgtcactgcggatgtgtctggttctgtgtaactttctttatgtatacagctacaggtctgtcttagacaagcactctgtgcaagttcctttatacgagtatgcctgaaaataaaaggtatgtgatcactgaaggccaccatgtacaggcagagctcacttgttgcacagaagacaaaggctttggactttgcttccttatctgcgcttgcagcttgatttcttccacactgttattttttgggggaggacttctaccaagaaacttgtccaaactatttgcctaactggttccttattttcttttctctcattagtttctctctccagacagctatcacctccatgagggctcaaaacactgagtgatcagctcttacatgcattttctagatgagcttttttaaactcgttgtgttggcaggggttctctgtttggccactatacatcatgaagttttaacatcccagacattccaagtgggcccccttggctgggaggagtaaaatgccctttctcttcagagctgaggagctcagtctctggtctctcatttatctgtgaaaataatagttcagcttctcatacaaaagtgcagagaagccatttgagcttatatttgggaaaaaaggcaatggagaggaccctttagaatgaactcctgaagtataattaggattctaaaagacaacctccaaggagaaaaaaaagaaaaaatgttcagaataaatcaaggactatataccaaaaggagatccaggactcaagaggacataccagttccactggagaagaagctcaaaattggagaggcattcagtgggcctctgttgctaccttagcttcaagttcaggcaagttttatggtgtcctgagttttgtctgaggccccacatgttcaagtgtcaagttgttattgatgaaaagagtcgaacactttaaaatatttaaagaggtttattctgagccaaatatgagtcagtaatggcctgtgatttatccctccagagaccctaagaacatgtcatcatggtgctcaggctacacagttttaatgcaatttagagtgacattagacatcaatccatacatgtaggttatatattgacttggtctggataggcaggacaactgggagtggggcttccaggtcataggcaaattcaaggattttctattggcaattggttgagttatattgttgtctaagttatagaattaacagacaagaatgtctgggttaagataaagggctgttaataccaaggtgttatcatgcagataaagctgtcaagcaacaggcttcagagagaatagattgtaaatgtttcttatcaaaattagtgagtctgttctattggttttaaagtctgcgttgatggtagtgctagtgagtttttcctgaattcagaaaggggggagggtataatgaggcatatcctatcccaccaccccacttctcatcattgcctcaactagtttttgagattaactttgaaatgctctttgctgagagtaagggtccgtttagatggttggggattcctaaaattttattttttgttcacatctacatacagttgttgaaaatttgaacagtaactacaggaaaaataacccagttagatgatattgattctgaaaactgctctaagttttgtgcataatattttacctaatgtcattatcaaacttctgcttattaagacagaaaccacaaccatgtcttttctcctacacattttttcctatctcagatattatcagtaaattcaaattttaaattaatttcttgcatttaactattaacaatttatgtttcattctattaggttgacatgtctcagtaactaatatataatttttatcgttttccctgttttaaactcttacctttacataccactctgtgttgagatgcaagagtttcttgctaaagaaaaggttgatcttgtgactatcctttaaaacttgagtaaataattatttgcctataaattatgattcaaactcataattttttatttaaaattatgttctccaatttcaaactaactttcttctgtaacgtcctgctctgaactttctctgtgaccactactcactggaatgattttcaaatatcctatacttttgtatgcttctatctattgtgaaatgcttcctttggcaacagtaaatcctatcaaagctttcatctcacctcctaagtcaaatgccttattaaagcttttattatttcatattaaagcaattgtgcattttcccctctgaaatactgaacactttgtacttattatataaaattagtcaaaatagttacccaaactctctaagtatattctcagtaaacctttgtattgtccttgtgagcaagggatgtgaaacatgtgctgtcctaaaccatctgatgccttggacttagtgtggaatgaatgtaagtgtgattgtgtgcatgtttctgcacatgaattattaaatctaaagacttgaaaaatttttttctttatcatcaatccaggtaataaaagtatatttatgtattttatttctaagttctagagggttggaacaacttttccctgatacattgcatttttttgataccttcagtacatgttaaactggcaaccaccagtgaactttactcttaaaatattaatttttaacttctgtgcttatattgtcatttcaactccttgcttagtaactacaaaaccattgcagatcagtgtgtgagggaactgccatcatgaggtctgacaagtcagctttggtatttctgctcctgcagctcttctgtgttggctgtggattctgtgggaaagtcctggtgtggccctgtgacatgagccattggcttaatgtcaaggtcattctagaagagctcatagtgagaggccatgaggtaacagtattgactcactcaaagccttcgttaattgactacaggaagccttctgcattgaaatttgaggtggtccatatgccacaggacagaacagaagaaaatgaaatatttgttgacctagctctgaatgtcttgccaggcttatcaacctggcaatcagttataaaattaaatgatttttttgttgaaataagaggaactttaaaaatgatgtgtgagagctttatctacaatcagacrcttatgaagaagctacaggaaaccaactacgatgtaatgcttatagaccctgtgattccctgtggagacctgatggctgagttgcttgcagtcccttttgtgctcacacttagaatttctgtaggaggcaatatggagcgaagctgtgggaaacttccagctccactttcctatgtacctgtgcctatgacaggactaacagacagaatgacctttctggaaagagtaaaaaattcaatgctttcagttttgttccacttctggattcaggattacgactatcatttttgggaagagttttatagtaaggcattaggtaagacacttttgttttatttttaatttagttatcaaaagaaatatttttaaaaattgtcatacattgtctrtgacatatatatgcaggtcaatgagtttttttagaaaatgttgtagctgtttttcataaagaaagtgtrtttgttctaagcgtaagataacctactttcttaataccagtaatatacttaaaaatgatcatcaataactaagagattatattttgtatttcctccaaatagcgcaaatcaacatcacatatttttgagaatcactgattgttagtctgaatkttatagaatttctattgaaataaaatgctaatcattattttctctctcatcatgtatttaagaaaatcttcagaaggtcttctttgaattaatttttcaagagtcattaaattgaacattttctagaattctttaatttcttaggtgattacttcacaaaaacttgaaaaaatattataaaaagttaaaaracttacggtcttgtggggcataagatagtagaatttttactttactgatatacacctayttgacttatttttatttcyttgctttactgataaaaagttgttttgctttgcaattttcatatagttgtgatcagagctggtcaatgcaagacatgtttttatccaaatatrtttgagaattatgtagaaacatgaaaaaaggtacaattatatycgacactaaaatattgtttaatgtattccaacgaattcttatgcatagactgtttcacagaactaatattcagaggatcccagttcaaatgtccttagccttagacatgatttgaatttacatrtattgatttgctttaaataattttccattcagtaagctgtgcctagctgcagatagcctaccaggctttatggatctaggtaaacaatacaaatctcttggcctcaagtctacattcagatattaatttaaaggggtacagctatatagaggtcactggcaaattttggtaaaataggattatagtraaagccccctgacaagattgaaatttaaaataaaacaaaagtgttatcaaaggggtgaaagagcattttccaataaacaaaagtgggttctggccatgcattcagaaattccccaacaattctttaaaaatcatggagcagcttgatatataagaaattcatttaataactatatttattatgtagctccaacttactaaattattgattattatatattttatagaattatctattgtgagtctaaatcaagagtatatattcaaacaactataggaaaagggatatcagtcaatttcaattcaaggatttatttccataagtgcttacgcacaggtgtatttcattttattatacattgctttattgtccttcacaaaaattgcaatttacaaattaaaggtttttgaaaaccttgaatcaagctaatcaatttggygtaatatttccaacaacaagtgtgtacttttgactctatcacatattggcatttatcatgctttttcaaatttttcattgttatatctgttacggtgatctgggatcagtgttccttgatggttacacgtttattagcttgggggcaccttgatgtgttacaatataagacagcaaacttaattataaatgttgtgcatgtactaactgctccgctgattcgtttccccatcccacttcttcttaggcctccctattccctgagacacagtaatataacatacaatgacttctaaatgttccagtgaaaagaaaagtagcaggtctctcaatttaaaccaaaaatataaaggaataagtttaatgagtactatagtttagatatggtttgcttgaccctacaaaatcctgtgttgaaatttgatcaccaatattggaggtggggcttgatgggaagtgttagggtcatgagggtagattccttatgagtacattaatgctctccctggggaaatgggtgagttcgttctcactctattaggtcccaggagagataattattaaaaagagccaggaacatccaccttctttctcttgcatatctctcattatctgatccctgcacttgctggctcccaacatcttcttcaatgagtggaggaaaccagaggtcttcaccagacacagatgttggtgccatgcctcttgtataccctgaagaattgtgagccaaataaaaacctttttcttttacaaattagacagcctcagttattcctttgtagcaacaaaaaaagcctgggacaggccaaaaactacaccattgcaccaaacagttaaacaagatgtgagtgcaaaggaaaagtttttggaggaaattaaaagtgctactccagtgtacatacaaatgataagaacaaataaccattatcagtgctgatatggagaaaattttagttgtctggagagaaaatcaaattagctagccagctgcagtgattcatatctgtaatcccagtaacttgggaggctcaggtgggagaacggcttgagcccagaagtttgaagtccaaggctgcagtgagctatgattgctccactgcactccaacctaggtgatagagcaaaaccactaccaaaaaaaaaaaaaaaaaaaagaaraaaaagaaaagaaaaaaaattaaaccaaccacaacatcaccttaggttttggcattagctaaaaactaatacatagtaaagcgttaactattcaattgcatgaarcctcagagaggagaggaagatgcagaaaaaaagactgaagctagtagaggttgactaatgaggtttacaggaataaactgcctacatgatgcaaaagttcaatgtgaagcaataggaagtcatgcagaagacttagctaatatactcagtaaatgtggctacagtaaacaaatgattttcaatgtagacctaacagccttctgttggaagaagatgccatttaaaactttcatagctagagaagagaagtcaatgcttgtctytgaagctacaaaaaacaggctgaatctcttgtagtggctaatgcagctgatgacaaaggtaaagccaatgcccatttactttttgtaataattatagaggactcttaataattatgttaaatctactttgcctgtgttatatcaatggaacaacaaagcctggatgatatcacattggtatatgacatggcttattgaatattttaagcacactgttgagacctattgctcaaaaaagaggattcctttcaaaatattgctgctcattgacaattcacatggtcaacaaagggctctgattaagatgtacagatattaatgtttgcctgcttgctattattacatccatcttacatgccatggatcatatagccttgactttcaagtcttatgtaagaaatatattttgtaaggctatagctcttactaatggggaaagtatattgaaaaccttttcaaaaggatttttcattctagattccattaagaacattcatggttcatgagaggaagtcaagatattaacattaacaagagtttggaaaaaatttgattctaactctcctggatgattttgagggattgaagacatcatgtgaagaattaactggggatggggtggtcatgaaaaaakaaatagaattataagtgggcctgaaggtttgtctaaattgctataatatcatgataaaactaaaacctgtaaaaccggtgaggaggtgctttttaaacagttactttttatagatgaacacagaaattggttttgtgagttggaatcttctccgagtgaaaatgctatgaacattgttgaaatggctacaaatgacttagaatattacacaaaattagtagataaggcagcatcaaggtttgagagaatggactcaaattttgaaagaaattctactatgggtaaactgctgtgaaacatcatcatatgctacagagaaatctttcatgaaaagatgagtcaattcatgcaacaatctttgttgtctaattttaaaaattgtccagctgccctgatcaatcaacagtaatcagcactgaggcaagaccctacaccagaaaaaataaaaataaaaaacctcacttgctgaagactcagcttattattagcactttttagccatacttttaactaaggtatgtgcattcctttttaaacgtgatgatattgcacagctaatagcctacaaggtatggttaacataacttttatatgtcctgggacccaaatttgtgtgaatcactttattgrcatattccttttattgagatgaactgcaacttatcttgcaatatctccaagatatgtgtgtatggcatttcaaataagatgtgaaattattttattagtataaaaagcaaatttaattttctttcctttgatcatctttatccttgttactgtgtatttatcctttaaacattgaatgactccaattgtttaaaactgagtctttcttaaatgagtcctaatatcatagtaattaaaatcacctacaagttggtaatgcaggcagcatgtgaggcacagaaaacaacaaatttataagacataaatgcatttgcttggaagctgagagaaggctctattctaatttctgataacttcaaactgagtatcttcagtaaaatttattcactatcaaattcaaggcgtttggatttatgacctaggaaaaaacttcaaacattaaaatgtgatgaccttaaaaagaggctctccacactatggtgtataacaccaccaactttgattagaattttaaagagaaacaaattctcttatggagtttatctttttatcacttgcaaaatatgtttttgtaaagagatactaattacttagttatttgtagttagccattcttctgattaaaaacctaaaattaaatcttgaaaatgtgttttccttcaaaacacatcatttgagagaaacactaaagtaagtgtatgattatcatagcatgtacataggtgcttcacaacccaaaaagaatattgtcatgggtaagaatcagtaaaggaatttctcctaataaaacagtagcctattaattaaagtaatgatatgcaatacagcaagttaaagggaactgatcctggtgggattattgaaagatatacccttgactatagattagaaaatacagagatgttatttagtgaagatattgtggtactcatttatcatctgcaattcacttgcagaggaaaaaatgagtaataaattcatttgcattttggatttgtgtctttaagttgtgaaaatacacttaaatataaccatctgtcctttgctccttccttccttccttctttccttccttccttccttctttccatccttccctccctccatccttccttccttcctttcttccttccctcctttctttctctgtccttccttcttttttcctttctttcttttttcttctttattatttcattaattcccccttccatttgacgtctaaaagccatgttgttctagaggacttaaacttatttttttcttaatagcttactgaaaaattagtgatacaattttttatttgaattgtatgctaattcattctgttatttcttttattgaggaaggcccactacattatgtgagactgtgggaaaagctgagatatggctaataygaacatatkgggattttgaatttcctcaaccataccaacctaactttgagtttgttggaggattgcactgtaaacctgccaaagctttgcctaaggtaggactattgtattaaggaatattatgtactttatgacatgacttgttttcccttgaaagattacaaccttagttatagaaggatgatgttgaatgtcktctgtttgcagctccatatttattttccatgccacaggggctcttataggtgattatatgtcttttcggtattatattgagaaagtaggcagaagaatktcatgattagaatagattttaaaatactagtattacaatagtttggataataaattgaattaatagggaattggagccatgaagatcactaaaaagaatgctctagcctttctcacaatcaaattgggcttatgaacaaggatatttgtcatgatagtacagaaataagcatattttcatgagacatattggatatattccacaggagttggtgagtgagagaaaataagtgatgaaggaagacaaagaataaaagaaaatttcaataaatggaaagtttaagtgtttaatgatagtgatgacttttactcaaataagtgcttagaagtcatcttgtttgtgatttatatgatgaattctgtgttgtgactatccactttgagctcgtgagaatgttaggtgaggtttaataaaagccatttgagaaaaacaaggtttcaacctctgtggacagaaatctaaatatcgatagttatcaggacaaagtagagctcatagaaataattttgcagcctgcaggtttsttttggagtgaaaataaaattgtatactatattcctaaatcatcagaggaaaaaatttatagttcaaggaatgttgaaagaaacaatattgagaagtaaaagtgagtaatagttgttatagttttttaatagttttgtaagtatgtcttgagttcactgtcccaaaagtggctattagctctagccttgacctgacaaggttctaggatatttagtcatggatgttcataatctacctcttacgggatactttttattctgatgaacagcctaatgcctaagtgtgcaatctataccaagattgttcttatagggaacttgtttacactggaagacaccactgtgtctcttgtatgacctatgtcttctttatccctacaaaggtaaccacattataggaaaccctgacaaggccagatgttatatttgtgttggtcaagtgagaaaacatgggagaaacttaaccaaacacataaaataacagaaacagtcttctttgaccatttctagagaaaagagttcagcatcccttgtaaggccactaggaagaagaaaattctctgggaaaagcacattcaaccaatgaatggagaccaagaaagagagtgagggatctatgtgccaaaatgttaactgggatccagggtgttacctaggtgggtttccaatggggaactgtaattggtaggtttaatgcaagcaggcacaaagtccatggaggcattctgagactgaaagatagtcactttggcatatctgcacagaatctgatcagtgattcaagcccaagtaggctgtatctagttgtcctatagggtggttaccaggaggcagtgtgtaagtaaaaatcctgactgaacacattgaggaaatggaaggaggtggaagattttaaacggtgtcagtgttgactaagacctgcttctggtatggaaaattcaacttatattttaaatgcatagccagacaacataaaattataagaatttaccacaatagctatggtaacaatactgggtttacctattactacagagtgaaaagaaaaccctcatttcccattttatggaaatataatcaaaatcctataaggaaggtttcagagccagtaggatttccagaaaaattattggttttatagtaagatgtgtattgatgaatataattttatttattaattattaatatcactttacttaccaggaaagttataccagaaaaccaagctctcttaagccatggcatctgtatctaaaatagaaatacagaaggagagctgacaatttccatcattctctaggtaatctcccatgccattctaccctttattcccacactcccagttttacacacacacacaaacacacacacacaaacacacactcatagaaataatcatagaagwcatatttttaaaaaagttagatccatacagtaataatttattaggtaaaagcttttgtgctgataattttacaagtttaattgagatatattttagggctgtcttacactaaatatttatttttattttttaaatttgacatgtaataattgcacatgtttaagagaaatgctgtggtattacaatacatttaaatgttgtgtaataattacatcaagataataaacccatcatctaaatatttatcatttctttgtggtgataacattcaaaaacctcctttctggctatcttgaaatatgtaatacattactattaactatagttacccaacaacttaatataataacagaacatattcttccaaatttaaacgttgtatccattgatccaccatttctcattgccctccctactatctcttcagcctctagtaaccacaattctactctctaattatattatgaatgcattttttgattccacatataagggataccatgctatctctgcctggattatttcagttaacattatgccctggaggttcattcatgtttctacaaatgacaggatttcattcttttttttccaatatatatttaatgaaatggatatatataaacattggaaaatgtatatatatatatatatctccagtggaatgctattgagctataaaaaagttaatatataatagaaataaagcttatatatatctaatggaatggatatatatatataatggaatagaaatatatatctatacatataaacacacrcaatatacatatccatttcattgcatatatatatatatagagagagagagagagagatattttcaaatgtgtgtatatatatccaatggaatggacatatatatatgtatattttttccatattttctttatgtatttcttcattaatggatgtttaggttgattcatcccttgggtatatgaataatgttgatgtaaacatagaaggacagatatctctatgacttcttagtttatttaaatatacacccagtaatggaaatgctgtataatatggtagttctattttcattttttgaggaactaccataccgttttccttactaattgtactaatttgcatttccctcaacagtttataaaagatcttctttctctgcatactttctagcacttgttatttttgccttttgataatagccataacaggggtgatgtgatatctcattgtagttttgatttgcatttccctgatgattagtgattttgagcattttgtaattatacttcttagtcactgatagtcttcttttgagaagtgtctattcaggtcttttgcttattttttaatcaaattagtaatttatttttattgactgatgtgacttctatgtatatttgagatrgtaacttattgtcagattcatagtttgcaaatatttttcatgttgtgaattgtctcttcaccctkttgtttgcttcattttctctgcacaagctcaatgctttgatataacccrtttatctacttttccttttgttggctgtgcttctgaagtcctatccaaaaaaatccttgcctagaccaatgtcacaaatcattcctcctacagtttcttctagtagttgtataatgtttggccttatatttaacttkgtaattcatttttacttactttgtatatggtgagggatagaggtctagtttcattttctgcatgtggatatgcagttttcctagcaccatttagtgaagaggttgccttttttctattatgtgttcttggcacctttgtcaaaagtcagttagctgctatattcctccatttgtgttgttatagaggaayacatgagactagcaaatttatatatcaaatagaattatttgaatgatagttctgcatactgtacaagaagcacagcactgacttctgcttggcctctggtaaggttctcaagatgcttccacttgtggtagaaggcaaacatgagctggtatatgcaaaggtctcatgacaagagaggaaaccataaagaggggatgtgagggagtgccaggttttgtaaaacaactagctcttctgggaactaatagagtaaaaattcgcctcccaggcaggggattaatctattcatgagggatctgcttccatgacaaagrcacattctgttagattctacccccaatattggggatcaaattttaacatgaagtgtggagggctcaaatatccatactatggcagcagtaaatgcataaatttattttgtggatctctattctatatagtattggtgtatgtatctgttttcatgccactgccatactgttttggtgatgatatctatgctatatatgtgtgtgtgtrtatatatattatatatatgtatatatgtgtatattatatatatgtatatatgtgtatattatatatatayaatactttaagtyttatatatatataaaatactttaagttcaagggtacatgtgcaggatgtgcaggtcagttacataggtatacatgtgccattttggtttgctgcatgcatcaactsatcattacattaggtatttctcctaatgctatccctccaccagccacccaacccccaacaggccaggtgtgtgatgttccccgccctgtgtccatgtgttctcattgttcacttcctacctaaaagtgagaacatgcagtgtttgattttctatccttgtgatagtttgctgagaatgactgttttcagcttcatccatgtccctcaaaaggacatgaactcatccttatttatggctgcatagtattccatggtgtatatgtgctacgttttcttaatccagtctatcactgttggacatttgggttggttccaagtctttgctattgtgaatagtgctacaataamcatatgtgtgcatgtgtctttatagcaacatgatttactatcctttgtgtacatacccagtaatgggataactgggtcaaatggtatttctagttctagatccttgaggaatccccacactgtcttccacaatggttgaactaatttacattcccaccaacagtgtaaaaacgttcctatttccccacatcctctccagtatctgttgtttcctgactttttaatgatggccattctaactcacatgagatggtatctcattgtggtttttgtttgcatttctctgatgaccagtgatgatgagcattttttcatgtgtcttttggctgcataaatgtcttcttttgacaagtgtctgttcatatcctttgcccacttttcaatggagttgtttgtttttttcctgtaaatttgtttaagttcattgtagattctggatattagccctttgtcagatgggtagattgcaaaaattttctcccattctgtaggttgcctgttcaccctgatggtagtttcttttgctgtgcagaagctctttagcttaattagatcccatttgtcaatttcggcttttgttgccattgcttttggtgttttagtcatgaaacccttgcccaggcctaagtcctcagtggtatagcctaggttttcttctaggatttttatggtttcaggtctaacatttaagtctttaatccatcttaaattaatttttgtataagatgtaagaagggatccgtttcaactttctacatatggctagcgtgttttcccaacaccatttattaaatagggaatcctttctccatttcttgattttgtcagatttgtcaaagatcacatggttagagatgtgtagtgttatttctgaggcctctgttctgttccattggtctgtatatctgttttgataccagtaccatgttgttttggttactgcagccttgtaatgtagtttgacatcaggtaccatgatgcctccagctttgttctttttgcttaggattgtcttggcaatgcaggctcatttttgcttctatgtgaactttaaagtagttttttccaattctgtgaagaaagccatcggtagcttgatgggcatggcattgaatctataaattaccttggacagtatgtccattttcatgatattaattcttcctatccatgagcatggaatgttcttccatttgtttgtgtcctcttttatttcattgagcagtggtttgtagtactccttgaagagatctttcacatcccttgtaagttggattcctaggtattttattctgtttrtagcaattgtgaatgacagttcaatcatgatttggctgtttgtctgttattgttatataggaatgcttgtgatttttgctcattgattttgtatcctcagactttgctgaagttgcttatcagctgaaggagattttgggctgagatgaaggggttttctaaatatccaataatgtcatctgcaaacggggacaatttgacttactcttttcctaattgaatatcctttcttctttctcttgcctgattgccctgtccagagcttccaatgctgtgttgaataggagtggtgagagaaggcatctttgtcttgtgcaagttttcaaagggaatgcttccagtttttgcccactcagtatgatattggytatrggtttgtcataaatagctcttattattttgaaatgtgttccatcaattcctagtttattgagagttactagcatgaagggtgttgaattttgttgaaggtgttttctgcatctattgatataatcgtggttttcctcgttgtttctgcttgtgtgaaggattacatttattgatttgtggatgttgaaccagacttgcctccggggatgaagccaacttgatcatggtggaaaaggtttttgacatgcagctggattcggtttgccagtattttattgagggtttttgcagtgatattcctcagagatattggtctaaaattctctttttttgttgtgtctctgccaggctttggtatcaggacgatgctggcctcataacatgagttagggaggattctctctttttctattgattggaatggtttcagaaggaatggtaccagctcctatttgtacctctgatataattcagctgtgaatccatctggtccaggactttttttggtttgtaggatattattgcctcaatttctgaggctgttattgttccattcagagattcaaacttttcttggtttagtcttgggatggtgtatgtgtccaggaattcatccgtttctttagattctctagtttatttgcatacaggtgtttataatattctctgacggtagtttgtatttctgtgtgaacagtggtgatatcctctttatcatttttattgtgtctatttgatttttctctattttattctttatttgtcttgctagtggtctatttattttgttgatcttttcaaacaaccagctcctggattcattgatttgttgaagggtttttcgtgtccctatctccttcagttctgctctgatcttagttaattcttgtcttctaccwgcttttgaatgtatttgttcttgcttctctggttctattaattgtgatgttagggtgtcgattttagatttttcctgctttctcttctgggcattcagtgatataaatttccctttacacactgatttaaatgtgtcccagagattctagtacttcgtatctttgttctcattggtttcaaagaacatctttatttttgccttcattttattatttctctggyagtcattcaggtgcaggttactcagtttctatgtagttgtgcagttttgagtgagtttcttaatcctgagttctaatttgattacacagtggtctgagagactgttgtgatttctgttcttttacatttgctaaggagtgttttacttccaattatgtggtcaattttagaataagtatgatgtggtcctgagaagaatgtatatgctgttgatttggggtggagagtttagtaaatgtctactaggtctgcttggagcagagctgagttcaagtcctggatatccgtgttaaccttctgtctccttgatctttctaataacracagtggggtgttaaagtctcccattattattgtatgtctctttgtcggtctctcaggacttgctttatgaatctgggtgctcctgtattgggtgcatatmtatttaggatagttagctcttcttgttgaattgatccctttaccattatgtaatgaccttctttgtctcttttgatctttgttggtttaaagcctgttttatcagtgactaggattgcaacctctgctttttttttttttttttttttttgctttccatttacttsgtagatcttcctttatcactttattttgtgtctatgtgtgtctctgtatgtgagatgggtcccctgaatacaacatactgatggttcttgactctttatacaatttgccagtctgtgtctcttaattgggccatttagctcatttacattttaggttaatattgttatgtgtgaatttgatcctgtcattgtgatgttagctgattattttgcycattaattgaagcagtttcttcatagcattgatggtctttacaatttggcatgtttttgcagtggctggtaccagttgttcttttccatgttaagtgcttccttcgggagctcttgtaaggcaggcctggtggtgacaaaatctctcagcatttgcttgtctgtaaaggatttcatttcttcttcacttatgaaacttaatttggctggatatctgattctgggttgaaaattctttcctttaagaatgttgaatattggcccccactctcttctggcttgtagggtttgctgagagatccactgtttgtctgatgggctttcctttgtcggtaaccygacctttctctctggctgcttttagcattttttccttcatttcaaccttagtgaatctgacaattatgtgtcttggagttggtcttctcaaggaatatctttgtggtgttctctgtatttcctgaatttgaatgttggcctgcctcgctaggttgggaaagttctcctggataatatactgaagagtgttttctaacttggttccattctctccatcacattcaggtacaccaatcaaacatatatttggtctttttacatagtcccatatttcttggaggctttgttcctttctttttacacttttttccctaaacttgtcttcttgctttatttcattaatttgatcttcaatcactgatatctttttttccaactgatcaaatcggctattgaagcttgcgcatgtgtcatgacgttctcatgctatggttttcagctccatcaggtcatttaaggtcttctctacactgtttattctagttagccatttgtctaaccttttctcaaggcttttgtcttccttgcgatgggttagaacatgctcctttagctcagagaagtttgttattacagactttctgaagtctacttctgtcagctcatcaaagtcattctccatccagctttgatccattgctggtgaggagctgcaatcctttggaggagtagtggcgctctgctttttagaacattcagcttttctgctctggtttctctccatctttgtggttttatctacctttggtctttgatgttggtgacctacagatggggttttggtgtggatgtcctttttattgattttgatgttatttctttctgtttgttagttttccttctaacacccaggtccctcagcttcaggtctgttggagtttgctggaggtccactccagaccctgtttgcctggtatcaccagaagaggctgcagaacagcaaatactgcagaacagcaaatattgctgctggattcttcctctggaagcaaatatattatgcatatatatatatatatatatatatatatatatatatatacatacacatacatacatacacacctccttgtctggtgtgggatcagggtaatgctagcctcacaagatgatactgaagtgtttttgcctttttgactttttgatggtttggaagagtgagaaaaagtgttattaattattctttaaattttgttgaatttcatagtgaagaccttagctcactggcttttttaatgagactttattactgatttaaacttcttcttcattatttatttctccttgtttttatttcttcataatccagtcctattttatgtgtccactaaattgtttattttcctagatttttccatttattggcatatgcatgtccatagaagccttttatagtccttttcatttctagtgtcatttttttccttttttttaagaatccttaagattttagagatgaaatgtcactttgttacgcatactggagtgcggtgacattattatagctcactgaaacccaaactcctgagtttaagcaatccttctacctcaaaattcctgagtagctgagacaggcatacaccatcaagactggctaatttatttcaaattttgtagagatgggttcttactaagctattctcaatctttgggcttcaagtgattcttcagcctctgtctctgaaaatgctgggtttatagatatgagcctctatgcctgatttgctttgtctctttgtaatctcccattttatttgtgtcttttctggtttgtttcgttttgttatgttttcagttaccttgctaaagctttgtcgattttatctcttcaaacaactaactcaatattttgctgattttccatatagtattttatttctatttcatttatttctgctctaatctttgttaaatatcttgttttcctaataattttgagtttccttgttcttgttttctaattccttgagatgttatcataaattgtttatttgatatctttctacttttttgatgtgtgtgttcgttgttgtagactttcctctttattattctgatttcttcctcaattctctaatattatgattgcattattttccaagtttcttttgtttttttatttatagtttatgtgattcctgaacttgtcaaagagattattgtgaatttgatgtcggatatttaagcattttcaaaacttttggtgcattattgaaattttattggtttattttagagatgtcatacttcccagtttttttttaacaatacttgctctttatattgatgtctacatatttaaaaagataaccacctgattcagctttttaaggtgatatgcagtggtgttaagtgtgtactgcttaatatcagagctgaatcactgccctgaggattctttctgttctgaggagagcttgtagttaatagcagaacctaaatagtgcagtagagctaaatctcttccatgctgttgttttcctgtctggggaagacttatcatgaccatgaaaacataatgctgtgccagaacttaaacccaaacctgtagtaatttctgagttgaggaaggcttaagaaataactggaacttagttactaacctgatagttgtttctgagtcagagaaatgctctgcatgatcacctgggatatttgtaaaatctaaccaaagattctagccttcccttggattgtgcctcctgtactactgtagtgctggctaggtcctcatcagtgaattccctgctgataggaccacaaagcatctgccaagatctgtttgccatttgctgtgattagtgcttctgctctttgcttccaattcaactcaggtggttcagcccttctgacactcctaatacctcctgtgggatggaacatagaaggcttctcacaatgattcacacactgatatggagattgaatgtccagttgcaactattttcttccacctgtgtaattgcaggtacagggaagttttctgtgactgatgctattttggtttggagaatggggtgatgtggcacaatgatctttcttctttctggtcatggattttttaatttccatgaacccataagatttttcacttttcttctgagctctggtgctttcagagtggtatttttatattcgaatagttgctagttgtacttttaaaagcgattgatgctggaggtcttctattccaccatctcgctgatgtcagtcctcaaataataattttatattttagcaaattattttggttttaggattttgtgtctaygtgacacagacatgaaaagagatgtactcattactgaaactttttgcatactgttttggttgtgcgccttttctagtatgaatgattacrtatttaagccacatgttttatacatagactgtcctttaaagagactagatagttctgtgtgtcagcatatagggacagaatataactacacattaataatttctcaagtatttattttagaagtgtaagtaacctttattttaatttttgttatattatgcctctgtaatgcagataaatttttatcttcaggaaatggaaaattttgtccagagttcaggggaagatggtattgtggtgttttctctggggtcactgtttcaaaatgttacagaagaaaaggctaatatcrttgcttcagcccttgcccagatcccacagaaggtcagtaaaacctccaatcctgataagcagctattcacataatgaaacagtatggttttatttgggtcttgaatctcattttccacttagcataasaggtaccaaaatttgcaaaacattatagtagtgtacatgggcataactgatcatttgcctactgagtcttgctgttactggaaacaactttcttgattgtcatttgtttataataaaatagatataataaataaagcyctaccttatattttaggatttgaaatctaaaagcgtgtgccaatgattccaaaaaaaaattctgacatctattatttcaaaggaccagaaaaaggaaaactgatataaaaaaaaaaagaagaatcaatctcaagaatatcttctcatatttgtgtgtataaaaactgtattcagggtagttttgcttagaaataaaagctcagattaatgtagtctttctaaataattagaagtttcaaaagtaaaatgtcaattacaattatagtatagtaacaattatttaagtaatgtaattatttatgatactccactaattttaactttattattactgtaattctagaatttcacactttagatagtgctatatataaactatccaaaagatatttcattttatatttagctaaaatacttcaaactcaataaaggcaagcatactaattaggaatttgaaatattgtaatttcaattatgaaattatctgttaagtagtttgaaacatctatgccgttctttgttttcaaatgtataaaatttgtataggtgtccaacaaagaaaaattgtgtaaaaaaaaggtacaatctcaaagaaaatttatcattgaacagtggaacataagtaattttctagctcattcttcttcaataaaacaattaaatataagaagaaagaggccaggaaggaaatagagaagaaaagacacccgattatccaaaagacacacataattgaaagcaaatttttatctgcagggaactgtaaatttgatggtagaatgagattggctccatgagttaaaatgacacacagatcaggtacttataaaatttttaattcttatataaaaatagattagccactgctgaattatttttttaaatattcactggtattctcattctcaaatatttttaattggtaataaaataataatagcatacctaataggcaactggtacacattattttaaaagatctttgtaaaacgtcctactatatctttcagtctttacgcggtagctctacacacccctgtctcaaccatcacctgaagtacaatgagtttataatttataactatatctacatccttagaatgctaatatcctgtggttcactctgtgaaatacatgtgtttcttccgtaggtgttatggaggtacaaaggaaaaaaaccatccacattaggagccaatactcggctgtatgattggataccccagaatgatcttcttggtaggtctatgagaaagtaaaaatatgaactagaygaggaaaaaatgaataaatgttaaacagcaagcaaattcagcaaagatctaaaattataaaactttattttacttactcttttgaagcagatataattaaaggattgactaaaattgtatagattcacactttctattgttaaggtgagagtgacaggaaattcagaaggaattaatgcctatttttctggagatagaaatgatctttagtagcaatgctccatgtgctcaccttctaaagaaagtgctgtacgcttcagtgagttatctcgtaattcccatctgtagtytttaaataattttaaaagtttagaataaaatatctcaccatttctcatccaatttacatactaggtcatcccaaaaccaaagcttttatcactcatggtggaatgaatgggatctatgaagctatttaccatggggtccctatggtgggagttcccatatttggtgatcagcttgataacatagctcacatgaaggccaaaggagcagctgtagaaataaacttcaaaactatgacaagcgaagatttactgagggctttgagaacagtcattaccgattcctcgtaagtactactgcttgtacagastgatctaacattgactrtgttatacattataccagaaaatgttaaatatcatcctggtagacatgttgagggattttactccacaatattgagtcattcatcaccttgttactggaatagttgtggaaattgtagttcatagagtgtcaaactttcttcatggaaatattaggtttaagttaacaactggcttactaagcttttattcacatcttaattttaccccattttgttaagaatatactctttcagtctctccactatatctgtttaatactatgtaaccaacaatattcatgtcacaaccagaatcaatcttttactgaacatgttcttggcttgcataacatatactacggtttatctacstgtcttttatgaaaacaaaactacaactttctaagttctatgtgtgtttttcccttccagttataaagagaatgctatgagattatcaagaattcaccatgatcaacctgtaaagcccctagatcgagcagtcttctggatcgagtttgtcatgcgccacaaaggagccaagcacctgcgatcagctgcccatgacctcacctggttccagcactactctatagatgtgattgggktcctgctgrcctgtgtggcaactgctatattcttgttcacaaaatgttttttattttcctgtcaaaaatttaataaaactagaaagatagaaaagagggaatagatctttccaaattcaagaaagacstgatggggtaatcctgttaattccagccacatagaatttggtgaaaaccttgctattttcatattatctattctgttattttatcttagctatatagcctagaattccaygatcatgaggttgtgagtatatctcattctttcgttgyattttcctaggtgtctttactctcttctctcactttgtgacacaaggacatgaatacatctaaattttcctatttctgatatgactgttttgatgatgtcattacttctataaccttaagtgatagggtgacatgcaatatgattattcctggtgtgcgcccaaacacatggatataaagaggtaaaaaacttaaaattcacaaaattcagtaaaccacacaaatcaggtaagtgttctatgagattagctggctatgagaaacataatgatgtttctttttcaatttaaataagccyttctacatagccagcatcagtgatctcagaaaataaattgctaataatgatgacatggcattatgcttagaaaagtttgctgtatttccatagacctcatctagatgtcatggcctacatttctgccatcactcaaccaatacttttttctgttttcttgatgataaaaagacctttctcatgattgccatcaaataacaaaagaaactattttttttctcacatagagaacatgtcagtaagatattcaaggtgaacagattatttttgggattagtaactatttgaaatatgtggtgataattactgagtttataaaatttatttgatagtacacttaaagaagatttatatgtttattctttaaaaatgatgaatactcataattcttatctctataatcaaaagtataatttactgtagaaaaataaagagatgcttgttctgaaagtaagatcagtgaactgcttttcagtctcaatctttgagaattgtaaattcatcaaataattgcttacatagtaaaaatttaaggtattagaaaacctgcataacaaatagtattatatattaaatattttgatatgtaaagctctacacaaagctaaatatagtgtaataatgtttacactartaagcaaatatgttaatcttctcatttttttactgtcatataatcttagtgatatgcctattaatagttttaaataaataaattggctyatctggctttttgaaaattttgaaattcttacagatgttgattaggtatatctacaaattaatttcaattttaaaatgatgatataaaaataaatataagtatttttcttgtgtatgtatacaataaatataaataaaattgtttactgttttgaaagtttcttaagtttttacactgatatgttttttgacttttacaatattattataatctaggaaaagctgattatatctgttttaagcctcatcttttctctgtaattaaacacagtaatttattaacatgctgtgacaggtgggaagccatttctggagttgagcctgctgacactctggagctttttaggttggacgttcattgtatgtgggactctctgcctctcgatagctgttgctcataagactctccttcatcaatctggcattgaattttgagatcagttgcaatcagaatccaattggccttgccgttttagtatgttctatcttaaccagcaatttctaaccaggagcctgcccaggtttgttctgtcttccctgtaagaagctcccagcataaatattctaaattttacactactaatctattaaccaacctttggaccatgttcactttaggttgagcatagtgtgatgagatgcaaattaaattacaatcctataggtgtgtgttataaattttaaagtgtataaattaaataacacattctaagtatccaacaaaggtcaaaaaaatgatataaagtcaccaaaccaatgctatttgagctcatcttatttcagaaattttctggtaatatcaccttttgtttttttaaattatatcaattattgcaaacaaaggaaatctcaaaggaatttttaataattacctagaatctcacttctagacctagcaaataacagcaaattcccatattttcatcacattgtctttaaaatttgcacatggtgtggtggcaaaattgttgttttaaaggtgacagagtaagaatgccctgtccctgtttccccatgcagaaagagacttaacaacatcatatagaccaaattgccatggtgataatcccagaaaccagtgaaaagattacagcaccccagaaaagagcaaagccaagaagaattttattgaaatatcttaagaagtgttgtatcatatactctctatagatccttctctagccagtacagcattacacaatcaggaaaaaaatatccttagtcatcacatttcccacaggagtgaaaggagagtgaaatgtggtctaattttccggctccttaggggacatcccaagggtctgatttctgtcaccgaacttaaatcacttatagaaaccacagcttttgaatgcctgggaataaaggcagtgtggcagtttaaagcagtagcaaaaaagctgcattattactacagaatggcacgagggaaagcaaaatattacaaaatcctgaaaacaaacaaacaaaaaaatcctatttaacttggtaattacattcaaaagccctgagaggatacagctcttggaaacgtttgccaagctcccagaatctctagctggggtgatagatgaaggtatttccctacactaagccagtacataaagacttggagatgtgggtgtttctttaaatctcaaaatttaaacaaagaaatgcaaaacatgcagacaccagaaagtatgacctatttaaaggaacaaaataaacattttttaaagcctgaatgaacaaagatctattaattacttgtcaaaaaattcaaaatatattaaatacctatcaaaaatttcaaaaataattaaagatgctctattagctaaaagaacacagacacatttttaaaaaccaggaaaataatacatatatgaaataagagtatcaataagacataaaaagtatagaaaggaaccaaatagaaattctggagctaaataatacaaaaactaaattgaaaaatttactagagaaattcaatagatgacttgatcagctagaaaaaataattcatgaatttgaaaatattggccatttgaaactattaagggagaggagcaaaaagaatatgataataaagtgaagaaagcctgacacttatgggacattgttaaccagaccagttatgcattacgagagccctcatgggacaagaggaaaagattgaggcaaaaagtctatttaaagaattaatggcaggcagaaaatttcccaaatttgagaaaaaatatggatgtagaattgttttaaaacacaactactgtacactgaaatcaattcaaaaattttacaccaataaatattataatcagtctttcaaaagtcacagacaaagaatattggaagcagaaaaagaaaaaatggatcatgacataaaagggaattcacatgatatcaacaagatacaagaggatatctttttaaaccaaaagtaagcgacataatatattcaaagtattgaaagaaaaataagaaaaaatccctaccacacaagacattcatttggcaaacctgtcattcagaatggaaaatggaatattttctcaggttaaaaaaaaaggttgaagaaggtaattattaccacacccgttctacaagaaaagcaaaaaggagtyattcaagttgaaatgagggaggctaggtagcaaaatgaatgaatgtaaaagtataaatctatctggtaaagataaataaataattaaatataaagtcacataagtttttaatgttgatgcacaagttaattttaattctgatatgcaatttaaaagagaaaagcataaaagtaacattacatttatattaattgggacasaagataaaatatataactagtgatattactaacataaagtagaaatgggagatgtaaagaaatacagttttcatatataattaaaggtttttttggtttaaaatggactgttattttaaaatattttaattttatttattatttatttatgctttattttttataatttataattatttataattaattatgtaaaataatttaattctatatttttattttatttatattttatttatgtatttattttttaaaatatttttattacacaatgtttattataaaattttttatacaatcctcatggtaagcacaaaatatacctatagaacaagagtgtccaatcttttgccttccctggaccacagtgggaaaagaagaattgccttgggctacacttaaaatacactaacactagccatagctggtgagctgagaaaaaaatagcaagagaaatcacaacgttttaagaaagtttacaagtttgtgttgggccgtattcaaaaccatcgtgtgctgcatgcatacacatatttacatgaatacccttagtagaggccagctatcttcatattatacattgtcttgataagaaactgagtgactgagtcagttaaaagacataatttactccaataattcctgttaatacttgattttctctctttagtaatttgtaccaattttttcagtagtgcctgctgtgctgttactcttttgtgatggaacaaattcttttttcacaggaaatggaagagtttttccagagctctggagaaaatggtgttgtagtgttttctctggggttaatggtcagtaacatgaaagaagaaaggaccgatataattgcatcagctcttgccaagatgccgcagaaagatagataaagtgccttactggtatggaaaactactaaaagaggctgttaaattctgtaaagaatccaattatagaaatttcctgcctagaaatgtagctgttgggaaagcactaattatcagatattagttcaagatcagaaatatacatggaagatgctaaaataatacaaagggtatattcatggataaatacatttggcactaatattgtgatcaggaataaatatattaagaggggtaggtaaagttttggtattaccatgatattggggtcaggatatcaccaaattctttccttgttatttgatccttatgtttaaggattcctaaggacattgtacatgctacagatgttatcagaagaagttacattttaatgggtgacttcactagcacaataacaatagcaggtatttcaaaatgtctaacatgcatcatgcagtttaggcttgccatgtaatccggcctcatatacttcctctacattttggaataggcctatctgagtgatgttcagggtactattcagagaaagaatggcctaggttgacagattagtccaagttcccacccagccaggtagatttagagaaagagaaaaaaagcagcctcccctgctggactgggcccagccagtgtctgaaacaggaagattaaagagaaaggatggagatagatcctgacctgaaggtgaatcctatgctgtataaaatgtggccccacaaggacgcagccctaactatgagattaacaactccacccagtggaggcagcagaaggaaatacaggaaagggtcaaacagaaggaagccaggcaggggaacaggttcagatgccccctccgtagaacatagtagaaacatattttcttttatatagaataaaatgatgacatatgtgtatttgtcaattactttttagttccgtatctatctgatatagtcttcttgtaatgacctatactaacatttttgctgaaaactcagttattttaatactgatataacaagtaaaagttaaacactgtaaattattcttcagttgatgaggattgcttgggagttccaaaattagtaacttaaacataaaaatgtcttggctataatagaacatattaatcactattgtcaaagctttgtagcacattgtctaagtgttaacaatcatttgaccaaattcagaaaaatacaattttgaatttattcaacagctatttctttatttatgaataagattccttatttcagtgctgaaaaaacaaccaaaattagcaatactgataatagtctgaatttgtctcaaaaattttcccttgaaatttctcctggaagtagtgcttgataattcataattccaaagaacttatacatgctacctttgtagcattaatttatttcttataagtagcttattttatctacttgcatttttatcaatcagaggacaccagactctaatataataacttacagacaagcagaaatacatgaactacttcccatgttactaaaaaatgaataaattaatacttaatttggaagatgaaaactagtataaatacataaaataacacaggtcaatactagattgttactgctttttctcactagaattataatgactatttaaattttttatacatataattttttagaattatgtgtttaaaattaattttattttttaacatttaagttcaggggtacaggtgcagctttgttacatagataaacttgtgtcatgagggtttgttttacagattgttttctcaccctggcattaagaccagtacccattagttattttacatgatcttctctctcctcctgccctgcagcctccaatacaccccagtgtatgttgttccctgctctgtttccatgtgtgccgagaccagctaagtcggggagaccctaatccagtggtgccagaggaattaaagacacacacacagaaatatagaggtgtaaagtgggaaatcaggggtctcacagccttcaaagctgagagccccagagatttacccatgtatttattaacagcgagccaggcattagcattctatctataaatattcaattaactaaaagtatcccttatgggaaatgggattaactaaaagcatcccttatgggaaatgaagggatgggccaaaataaaggaataggttgggttagttaactgccgcaggagcatgtccttaaggcacagattgctcatgctattgtttgtggcttaagaatgcctttaagcagttttccaccctgggcaggacaggtgttccttgccctcattctggtaaacccacaatcttccagcatgggcattatggccatcatgaacatgtcacggtgctgcacagattttgtttatggccagttttggggccagtttatggccagattttgggaggcctgttcccaacacatgtgttctcatcttttagtttccacttcatagtga
